United States Patent Application Publication US 2026/0058010 A1 - sequence listing, part 53

SEQ ID NO: 588 - DNA, 576660 bp, Homo sapiens
  source 1..576660: mol_type = genomic DNA
gtgtttgcaacaactttacagaaaggaactaccacaaacaatgaaaattgactgtatatcacagtttctgcccccacattatgtcttctttgtattaacgcctctgcctacttgtgtcccactcttattcactgttgaataaatgtgtgctgagtgaataaaagtcttatgcaagcaagttttctgcagagatacaatattgctgggaattttgagcctcagctgtgcaccagaaggatataaactaggtgacatctaggaggctgaagagtgggattattaaaatgaaagtaaacactgtctttaagaaaaactacaagggatatagtctgcctatggaatgtcaaaaattgtacatcatcagttgtttaaacttcatgactttgcaacattccagtgtcacaaggtcaggtgtttattcactgcttgtgcagtcagcacacattgactttgcgttcgtatcagaatgtgacactccatttggttggggtctgttttaaacctttacatttatcttcctgagaaggaaccatatgtccagtttttctgtaaccaaatatcaaaagacacaggtggaacaattttatgtctaagaatttcatgaagagtgtttggaataatgtaaaaaacttttctttccttttcaaagttcttttagttgacaaataataattgtacatatttgtggggtacatagtcactgcatgttttgatacatatatggtgatgagatcagagtaattagcaagaatcacctttgaattcatatgatccatactctcaggacatctgtagcctgcggctgctagaatgaccatcacattcttttccttcatgtagaagagaaaaagcgccattgaattccccctttgcctactatgaaagcaaaacttgcaagtaagaggggaaggtgtgcatgagataagagagcagagttgggacaacttttgtaggggcatacagtcttctgggcttctgtggctttggaagcctgtgcctgagaatgtttgagagccccggctttcttaagggctctctgggctgatatttagaagagatgctcagatttcaagggtagaagggaagagatttagagtcatttgtggctacttttcatggtctagtagtgcggctgtaagtcatttcatcatatcttgatttcttgtccacttaacaaaaataaaatgtagctaaagagtttactaaacctttgataaaaatattatgaatatgaaaaaaattatgaattataacttctagatttaaggacaatgaaatttaagaaaaaaaaatccccacccatcactttaatcccttagatccaggttaaggcacccagcctgatagtgaatgtctgttgacaacaacttctttgtatttgaagacagtattgactacagatggtaccaaggagtcaaagtcatggcaggctatcttgggagaaatcttcctcatgaagcaaattttccatttaaagatgaagcatgaaaatcaacatctattttatagaaaataggaaatatttaatatatataaatttatttgccttggcaattatttatttacaattgatgattgatatcaacaattgaggtaaaaatatacatgaggtataaatataatatttaaatgcaatatcatactttatttccattggcaagataacaatgaataaaatactgtggtatttgacaaacaagcttgatgcatcgttttttctcctttttttcccttttccttgttttaaaaagatgcactgtgttgttatgcagcggtgatatgattactatgtgcacaaaaacaaaaaagtcagataattcgaagagagggagaatcagaaatacaatcacatttgttcttattctgttttagggatcttctaggtcctcgtttctgagtgtggttttaggccagcagcataggcatccctgagactccttagaaatgcagaatctcaggcccagcccagattacttggagcagagtctgcagtttcacaagatccccaggcaattcatgtgcatgtgaaatctggacaagcacctctctgggcgatacaaagccactcatcctcgtgtgcctatcacgttttccaaacacataggatcccatctcaggagcaggaccagtgtttagctagattaaacttcactggtgatcttgttgatgcatataaagtaatctggcatatatggttaaattcaagatgttatggcagaagtgactttgttttgctcacaaagcattgcccaaaaggtaaattatggatttactgcttccttcttaggtagatatgggaatgaaaaatttctaggtcataattcaaactgtaagattttcctcgcaccataccaaactcatagaaagcttttttattcctctcaataaaataattgcacattgctgataacagaaacattacataaatgcatataatgcaaaaaaacctgaaaacactcatttgcttttctttttttctccaacaccagttgctaaatcttatcaatctctattatggatgaccaaagaaaatctctctccctgaaatcaaacacacaataagttatctttctctctatagctgttgaattacaataaaaagcacattcgatccattagcagttggctaaagggagtcaattcgcttcatctgtacaataataaataaggttgggtcaaatgcataggtagcttggactggctagtgaagaaacacagaagaattaataaacccgattatactatctaaaactaatcaaagaacatagttttggtctcatgttagttaaaaaccctgtctttcagattgtaaaagtttaatgaattacattttaagagtatcctacacataacaaaatatgaattccctgaagctgtaacgatctaggatttgaacggaatggccatcatctccctttgtatggtgtctggagttgaattcagtgcaataagaaaacaccaattaactgtgaccaaataggccactggtcaaatagaatgacatttaataacattatgaaatgtatttataaaaacttgagacaacacaggggctccctttggctgtgaagaagtaaaggctatgatattcatcttgacttggggtctgtagtgatgggcatgggagcgagaggtatcgcttctgtttcagtcactctcgctgactccggtggtccatatctcactgaaattccatcttactgggcccagtggcaactcctcatctagctttaaatttggtaatgacttctcacccccccatttgctttaaggaggagtaattattatttccttgctttatcccagatctccactctcagtttttgaatagcagaaacaaagcgttaacacataagtctcctttaatgttattttcctttggttaactcatctttggttaggcatcagggcatgttcacaccttggtgttagcagcaggttctgcacagcttacaggacagtggagagatggggcccagagccacttggaaagaactgtgtgaggaagggactcactgagtcagacaccgtcattttcaaaacacacaattctatataaaattggtattttacatatatacagtaaagatggagatatacacacatatgtacatatgctatacatacatttatttacagttaggtatacgcttcttagaagcctttaaatagcaaattaggcaatgcacaaggaatagtccatttaattttaagtaatatatataaagttctcattttaaaattatattagtagggatgtagccatctccaggaaggctaagaaagttcttggaaattcttgcatctccaacattccaacttcttaacgtttccatttttaggcattaaccgcgtccttcagttcctctttctctcgctttctcacatgcacactctctgccacactcgtcactttagcttcctcttccctgagtttgatgtcacactgggcaaaactcagattttagtttctgggccctcagcaatgaggggctggaaagagtttctaatcctggcaacttctgctgcacacagatgtccaaagcctttgctgtaccattctggggagtgacctctgtggggaaagaaatcagaaaggaagtgggaaagtttgtttccaaatcacagcaattagttttggtggacagggctgcccttgggccccgatgaccagtgaacctgcagacagctcgggctgctgccttgaggggctcaggacgtcattctgccatcaggggccttgaaaacgtcctggctgctaagtattcatgttgtcatttgagtactcatcaggtgctttaaaatgataccaacatcttggggtaaaatgaaaagattcagatgaaatccagaatttactgtgaaaactccgttttgtctacccagaccaagaactgggtttagcatcatgaatgccttgaaggggttggatgtaagttacttacttctcaaagaactaccagagggagcagcaaaaggggacaggcataaaagaaatacatggtcgagcacggtggctcatgtctgtagtcccagcactttgggaggctgaggtgggcggatcacctgaggttgggagattgagaccagcctggccaacatggcgaggccctgtctctacaaaaacatacaaaaattagctgagtgtggtggtgggcagctgtagtcccagctactggggaggctgaggagggaggatcacctgagcccaggaggtggaggttgcagtgagccctgatggtgccactgcactccagcctgggtgacagagtgagaccttgtctcaaaaagaaacacaagagagggaaactctgatttactgagtacctactatgtgtcaggctctgtttctggtgtgtgtttcatgggagaaagacagaaatataagtaggcataaaacagaaaataaagaaagacaaacagttgcaggagaaatgtcagaatttcaggaaagggggaaagacagaggggaggcatacatatccacctatgaaagcacactaatggcaatgaggaaacaaatacagtgaaataagaaatcagggtgacatccctgctggatgtgctgtacaagctgagactcccaagatctgagcctgccattaagggagtcagcacttacttcaggtctatcctgcagatgtgagtcagtcttgacttgccagagccacacggttctatcaagtactgcgagtccatcaccactgctcgcacaccacccaggagctgggcttcctcatgctccacggagagggacaccagggtacacattcctttgggcaaatcagttttccaggtcctgtagcaaaacaatccgcacatcagagtcatgactgagggaggaagaagaacctgaacacagagctaaggtttgtgtttatattttcctgccaacaacctgggctcagattccaatgctagtgacttggattaagctaatggctttcataagcttgtgtaaagtttatacagagaatttcaaagcaaggatctcagctctgggactgtgaggccagaaatggtcttgcagctttcagatctgcatctggaatccccagctctgcttagctgcagaggctcctgcccattctcgaagaggtggttttacagtttattattagaactcactcattcgattcattcagcagacatcaattaagcagatagacatgccagtctctgagaagccaccaaggacataaagatatacacagcccaggaggaaaaatactgacactctaaacagaattctaaaagcactgaggtaaatgcactggtaagattatgcacagagggctctgggatcacatagagggggctgcgggaggaatatggagaaggcttcctggaggagggcatgctcaaagagaagtgaactggtacgcttagcttgaaggaaaagaaacatatgtgggcctgcttattgtcttcacatacttgagtggctcttgagtgggagaagaaatgaatatggttgatttgactccagaaggcagagataggaaagtacatttctgtgcaggagagaagcactgtctaacaatgtgcactgttcagaaatgaaatgtgctgccctgggaggcagtgagctccctgttcctagagctattcaagcagaggtggctaccccttgaaaaaaggttgtggatgggagtcaggagctatgagaacatctctgtaacaacctctaacttccctttctaccccagggatctatcataatagattgcattattagaattcccatgatttactccacaaattctattcccttactaagtcatgtcctccatgatttcaccctgtcctcctacaccaggaagagaaatggtgatatgtgcttgacaagaacttgggaataaccaagccccacacaaatgctcagcgacttccatgctgtgactactcttttcatgaacgaagatgtgataaatcgtgacgactgaaagttgtagagatttgttgggataaatgggagaatctccagcaactctcagcggaagctcccgaggagctagcaatgggtgtgacatgagagacaaatgcagcaatcctgaaaggtgaccagcctcatacatgctagcctagactgtaagatgctctgaagacaggaggcatctcagccccgtgcctcctcaccacactcatcactttccacctccttgtatcctacacataaggaattcctgttgttgggaaccagatctggttcattgttagcccgtggagggctgcacctcttctccttcagggccacatggtccactccacttcttcaagtcttggatcaaaatcagtgcagcaagaccccgccctgaccattctatttaaaattccatcccttactatctccctatcttattcctcccaggataagtaagcccatctccctttcttattttttatggactttccccagtgaaatacaaaccccaagagagcaggagaggggtttgctgcattcccttggcatacccagagcctattgcagtgcctggcacgtggtcgtgatggaacgaagcactgataaatagcaggctggtggggttgccggatggatggaaggagggaggttctacacacagactcaggccctcagcctcctctggagggagggaggaggcacgctatggcatggccccattcctatggcagccatcctgcaacagctattcaactttccacttgtggagtgaaagcatgaagtttaattccaccagatgactaatgtcctaataactttggtaatatgccacccttataaactgcctgcattctccagcaggatcccaaggaagcagagataaatacatatatttagggaaaattgacctttaaaagtcaaggttccatgggccaattcccaagtcataaagagctcatgtgaaaagtaacctttagtttgccatcaaaactggtttcataaagaaagcgttttaaatatacatttgggagtttcacaataggttccttttacactgctgatctgtgacatgagacaaggcttgccaagattttcaataaaaaaggatatattgatctaattaccttctattcaggttctttagcaccctcaatttctgttctggctgatgcaacactgcatctctactgtgcaaactttctatcattggttgagcatccccttccaaaccccaagaacaggggtctggaactcaacccttacatcaatcagaagaaatatttccttggcagacacagaatcaacaagattttctggacctccagggcagtgccaaggtttctgagcatagtaatagctatgagcatctgaagttatacagatgagttctgaagtcaaacctactccagtcttgagagttacacacactttcccaggggagaaaaacaaaatcagaagaaaagccagtcagatccatttgcataatttggcagaaagtgcaaccggacaaacagcagcttttctgggccgtctgctctgaggaaatgaataatatttatggcctaataaactgtgtgctccacaaggagaggggcaatcagagagcccaggcagagctgtaggctgggtgaaaagacacaggaagtcgggcatcgacacagaaaactcagatgtcactgagggaaacaagagccggcttagtgttccccgtggaggctggactttggtgggagacaccaggagaagtgctcacatctacagttcgcgtcctgcctttggaacagaacatcataaaccctagagtcaggctcacctgagaaccacaaagtctctggaaggatggggagccatgctgttcagcacatactggtagatctctgtttgcctgtctagagtttccacaaccttccactgcacaaagtcctcgtcccacaggtggcgctctctcagcacgcggttcaggaccactgaggggggtgcttccacctccacagaagccttccacagcttcagcgggttcccgtcgcccaccttgggaaagacaacgtcagaagctgaagaggttgtctgggatatgggtccaacattttttgtttgggcttttagttttgctatcataccttgctgggtgttcaaaaaccatcactgattatgtaaattgagagtgatactacatacctcagctgtaacattttagtccttaagcttaaaagaataataatgatgataaaaataataatcaccaacacacctagtggttactgtgtgccaggaactattctaagccatttggtttgtaaattagccttcctccgacagtggtactcttacaatgtccattttgcaaatgggaaaactgaggcacagagaggtgtgtgacttgcccaacatcacacagctacgggggagagacaggaccgggatccagctgtccggctccatagtttactctctgattataggcaacagatctctggactgagttctttgaatggttcatgtgccttaactgtccgcgtgtgtgccaagccctgtggacacagcagctgttttcaatgcaaaaacaaatgtctgattgttagctgtggctttctgggggtgatctttttccatcctctgagattacctttttgaaagcaagatctgtattgtccgtgctggagcacgtgacccatcctttgaacttctccttggcttctttctggaggccctggatgagatggttcaggtaagtgtggaaagttgccccactctcctccagctgtgtccccaattcttccagggttggcacgtggatctcagcctccacatacgagttacgagactgggccaccaactcgtgtggaacctagaccaacggatgcatgaaagggcaacacactgagccaaagaaacgccgagactcaaagaaagcaaagccatttcacccacaacccggctctgagccacgggccgagggccacacggccagagatgtttttctaagatcattgccaaggccgggaggggccttcctaaagtcaggaaatacaaacatgtttctgaggctgtatttattattcaaaacattgcaatgacttcccctttattattttcacttcccttttattttacctttactgtctttttattcagtttggcaaaatatgggctcagacaactttacccactatgaataagacttaaaacagacagacttgtgaagggaaacatcaaacatgacttgggaatagctttacttttttagcacacttttcccattgacaaatgccaattctatcacaaaagtatgccacaagtctggttcacttacttcttttacatatctgtggctgtattcataagctgtcattggttcttagcaacaaagattcctcagtatcatacacacactcacacagatgtttaacctaatcaagctccaaggtaaaatcaaatagaacataattggctgactggccttgaacctgataatggcaggtgatgcactgtttgcataaaaaccatcagtatggtaatcccaagtgtctttatcaaagcctcaattgtatagctagctcctcagctttcttggaagcaaacaccagagctataacatatactattgtcataaaatcaggaacaaacagatagaaaccataaatgtagcaacaatcccaagcgtcttatctagttccaagagctactagggaggcggaggttcgagccttttgctcacctcaaaaagtctgtcgcattccatgatcatgtgcgctagcccctgagctgctgccagattctcgttgaggtccttttgatctggcttcccagtggcatatttcttctgtatgactctgtaattgaacgtgagtgtgctaagcagatcccacaccaacgagcttgtcacaataccaaactcatcccttttgttttctgtttatacccagatgctatccagatcccaggcttttgcgtttccaaataaaaacaatgatcacatatcttagatatctgaatcaggctaacagtctgacagttcacaaggaaaaatcttggaaaactaaagggcaggaagaacagcaggggacaaaattaatctgtttttccaaagtttgaaaccccttaactgcaagctcctgtgctttggtcttaaatatagccttttaaaaattgtaaaatactactttgtgtatgttttcctcctcactcacacagacaacataaaactcaagctttctggatcacagctggcattcttcaatgctagctcaataattctatgaatctgagccccgtgaattagggtgtctcacaagattttctgattatgaaaagagtgttgacaaatcctgaagttgaaatgtagcatgagacacattttatctatctataatctattatctatctctattatctacctatcaatcatctatttatctctctttatcatctaccatctatttatcatctatctatttagctgtcatctatcatctatgtatcaactatctatcaatctatcatctacctatcgttgatctatctacctacctatctatctataatctgtctaccaatatatccattcgtatctatctatccatccatccatccatccagtcttatgaactgtgggaatgcctgctttgggattactgttgttactgagaaaaaaaacccaccgtggagagctttctttcttcaataaattaagatgaaagagggagggggccagacacactgccaggttcatgggcgtcatctgattctcttccaccaagttgacgacgtcgttcaggaaacacaagagcgtctgcaggacctccctgttctcatcggccagtagcaggatggcagcctgcacggcctgcagccgctgctctttggagacatctgaggaaaagtggatgccaggtcattggaggagcagacatagaaagagccagctgggaagcactgtgtaagctccacattcctcgtgtgaacacgcacccagagtcatcatcaacaaaaacaaccagaacagcaggaaaggcacaaagaagtcagtaattgctgaggcctcgcagctcatgggaggcagagctgagtcccaacccttgcaattgaactttggatcccacgctctcgatggccaagcagggtttagaaaggggcaccaccatcctggttttctgtattctgagcaatcaacccactcacctgctttcagaaggcttctgggtgaagttggtgattaggactctgtcaacctggcatccctcttgcccatcctccctgacagacagcttgggaagccactctcaggatgcccaaggctccgtgggacatggtttgaaaaccactgggttagggaacagtagcctcgccttgcgtttctccacccctgccagccaggccatgatgccagtgctgcacaattcaccgggagtggtgttgagctggtgggacctctgacctcattcctagagggccagcttctcgaggggaagcctgtacatcttcctttttcctacaaatctcccaggacttgctttgcaggatgcctgctattgacttcatgtggagacccagcgtcacctgttccataatcttggggtttatggaaatggaggctgtgcttggagaagaagaaccaggcagcctaaggttatgggggatgtctggcccttctcagtgccattacccttgagggtggtccttgtggtagtgggtactggttatgcaggcttaccagggaattggttccaacaatatgaggggaactaaatggaaatcacaccaaatgagtgataggtgctgccttttgctgctcccacctgtggctgtgtttatttcatgatcactttagtcctctcactgcgaaagacaccgtcaggagcttgcttctgtcaacactgttgtctttcttaaagtgccatgttctggagcaggggcctccacacgagggtgtctgaattctcaaggggtggggaggtgtgctcctgacagtctcttgaggtgtgagaagaaatcattagcactcccacgtgtgtttatcttttctcttacccattaaaaatactgattgggtgtgctttataatgtgcatagtacattagagtacatccagtatatttatattactaaacataaatacacattcagatatttgctactggcaggagtgcatgataaaaacaaactcagagctggctgttccagaagggctgaggtgtgaccttctgagggggtcctggctggccccaggctttgtggtcctggggggctatcgatgctggattcgcctgcagtctcatgcaggaggcatgacgtcacatgccagggctgaccacactatggccctgattagcaaatccaagttcctagaaaagcctgagcatgccttcagtggtctgaaacccgtctccactcccaccatgtccattgtgtactggcacaagatatacctggggtttacagagaagagccgttttgttaaaattagagtgaacccattttcttactctcgcttagggtggaggagaaacagatggtactaatgatctgaagcttgtgagaggtgtaacaagttttgcttgagctgcagaattgttttaaatatgctgctctaggtaaggtgtccagtgtgtatacattgtttaactttagattactaagcttcttttccatgccaacattttttcccagccatcatttttgaagagtcgcctgtcatctctatatgttgtctcagttccctttctatccgcttgttcttttatccatcagaaaatacttcctgtccattattattattattatttactaaaaacgcttcaaatacctaaattcagcatttgttttggatcctatgctcttttagctttctgttacataccatgctgctgcgggtcctgcccctttcctggctctaaggggatgattctaggtctgaatttctaagtgtggataatttgcaatcatatgggggatcctggcacctcaaattcagattcctgtggattctgaacccttctcccctccaatttccacattctttcaatcatcaggccttaaagccttatggttgtctttgactcttctatccttctccctcctccagatgggtaggactcaaatattttcattacccatccaacactccaatttagttcatcatttgacaaaaatccaagaagtggcatagctgaaaacagaacttctctggagaaatggaggaggaaccgttcctctctgccacagtagcagtttggaaactttgactctagggtctatgcatggaatatcttctctccagtctcactgctggaagtccctgcaggtaatttggaaccttgattagtatgctgactccctgagtctccatgctcgtccagttcggtgcctcttgtgcaccacttccagattcctgggtcaatgacactgtgctgatggactttctccctgtagcagatacaaggctggccacctgctcaactcaatacccattcttcccttcttcctcattaagaaaacacatgttctgctcaggtgtgagctgcaatgtactcagggaaatgggtgtctccctcagacccagggatgaaccatgctgccctaaaccaaaactggtaacccaggtcttctttccagtgtttggtttaagggggaagctgtaaaccacttctgcctgagggccaagaaaaatgctgagagcttctgtaagatgtatgaccctgataaaaagagacacatggccaaagagaagcgtggtcactctcttcttgtcttggaatgtgattttgtgaagatgtgataattataagttgtgacaattatattgtgaccttaaagggaaagccaatagaggctgactttagccctggcatcactgagctgcgggatacccaactctggaattatgtgagataataaaatgtacttattgtttaaatgactgttcaaatgactgttcgttggatatttggttctgtctttacagctgagaacactgtaactggtaagtccctcaacaacacccgacggttccccaatgcttaatgaatcaagcatacactccttgccctaatattcaatgtccttcctttatggccccagcgtcatttttcagtgtcatttggtgtcactttgtatgtctgccatacatgcaagccagatgaatacactgggctctcctgacttctgcttatgctatctgccgagcaggtacccaaaatgtgttcctcacatatctcagccttcagttgtcacttcctccatgaagccctcattcttcatctctccctccttggacttttctttgtaacctttctatggaaattctccaaatttgttgtgttggagttttttgtgttcatgcctcatctccctcaattgtaagatccttaagatcagagagtgagtctcatccatccatatgctctgccatgctaagcacggtgcccagtacagaagtcacgctctgtaaatgtttgctcagctaaaataaagcctgctttgatctggcttcttgcttgtgactcagaaagggccaaagacatttatttcttgaaagtaatgtggctttagccttagactagtgtcaactttaatccaagaactgattaaatgtaaaagactcatatctgatacttccaaaccataagggagacttaattgaaaaatgtagttcaacctctcacagcaacaacatcaagaactccctgtttgggctctagcaacttgtaccattaacttaacttaatctacttactttgaaaaactaatatttacttagtgggttgccaccttaatctgttttcacaagtggttctgattacaatcctttctgagtttgcagtatcatggactccttaaacacattttatacagaattctctatagcatggatattcttcaaattgaatcaagtccatgtcaaggtccatttcaggcatattttgctgaaaactcaaaactcaaagtccatgggccaaatggcttttttcccccatgaattgggatctggaccatcaaaataattcataatgttaacattgtcatatctagcaaagagtcacgtgtttaatttcattcttttttttctgagatggagtctcgctctgtcacccaggccggagtgcagtggtgcaatctccactcactgcaacctccgtctcctgggttcaagtgattctcctgcctcagcctcctgagtagctgggatttcaggcacccgccaccatgcctggctaatttttgtatcttttagttagagatggggtttcaccatgttggccaggctggtcttgaactcctgacctcagacaatccaaccacctccacctcccaaagtgctgggattacaggcgtgagccaccatgcccagcccatgtgtttatttctaatacccccattgcaaccacttatagtaggatatgcttcttaatcaacaattgttattttcagggattattttaattatacaggctttgctgagaacttaacattattaaaaaaaatccaagtgaaaatataaataagtttatttaagcttaagacttgatttggtttgcttacttttcaccaatgaagatactttgtgctaaaatacatttgtttttatttcctgtcattttaattcatgtcactttgaatttcctatatcccaaagaaatgcttacttttttaaaaaattgaataagttttaataaatacctatatataaaacaacttctattgtgtccctttttcattttaaatttttgtaaatgtattgaaagtttgttttagatcatacacaaaactcttttgagaaggaatattttgatgtcaaaaaggtattttcaaatgcataaaaaaatggcttgtggatttccatatcaaactttgagcaaaagttacttccgtagaggagagcaggattacatacatctttatggattgatgtattattcgtataattaaaactcaatctatagggaattattttcattaaagtggaaggatgcccacgagaacaccaatctcattatttccacttacactgatagatatggagaaaggtctcactgagcttgttggtgaaaagaggctcagggaggtcccggaagaactgtttcaccatatccgccacatcataagcagactggtcttcatagttgacgttctcagggaagttttcattcatttggcgaagggcatggattcgagacttcactcctgatttgcgaaaaagacccacctgaaacaaagccatagggatgtgtcagccaggccacacttggttgtgaggaggaggaggaagcatgggaagggaactggatgagctggaattgcctcccaattagtacatgctgaactactagtatagctactttaggcagtacccgaacactgtcttcctctcctatgaaatgaagataagaataaaaccccacctcacaggattactgtggagagtaagtgaggaaatagatgtgcatgtgctttgcgacctgttacatcttatcacactgcagatgttattattattttattcatttattcaacaagtagtgattaagtaaccactgtgtatcaggcatgcttagagttcctaggtgtcattagtgagcagaacagataaaattccctgccctttagggtttacattgccatggggattttgagaacgtctggtcaatgggaggtttggtgaaaacaatgtgggtcgtggatgaaagaatcccagataaacagccatatccagtgcccctgcaggggagagttttatggggaatatgttcatgaaacagactaatatcataagtacatattttgatttaaggaatttatttactttttcttctttggaattcttggcacttacttttctacctgtttgtttttatgcagtaagctatggctctagtgagaatgattcctgggtggcttttttttcagacctcaagatattgtcatatcatgcctttttcatcttagagtctagactcctcccctacttgatgaataaatggagcattaaggcatcaaggacagagtggccctaatgagaatgagtgaggcagagcagagcccggcaagaatgaagatcctgcaatggtggggcaggttaagctctaggccctctagaggaactttctgtgctggacttacccgctattcaaaaaggaactgaactttcctgggcaccctggcttatagtgaaataatatgtctgctattttttaaatgcctatagggagttgatttgcttcaaccctcaattttcacagctctcattccccagtggctcatgggttggcccacttctgcaaagcaaggtagaaccttcctgagtggctggtcaggtagacagtggccactagtgtcagccactgctcatcccccctatacctggaggaaagcctaatacaggtcgtcttactgatcactctgtgtgccaggccggcctccacccaagttcgggtatgtgacaaaggctttcctgattgctgcaacaaatggagagcagtcctcattcttttaaattgtggtaacagcaggggaaggattccaagccattagagcatactcaggtttttgtatatgtcagccgaatggatcacaggggaaattatacactgctactttttgtggccataaaaacagaattcttagtaatatttctttgcattccaaggtttatcgctctaatcccacacatcaggatattcaggctgataatattgtcacttaaaatatgagttactttcttttttattcttaaagtttggaatgtctagaaaatgcacagttttgccatacttagatgattcgccacaaagaatccagacaatatttatcttccttcaactggcaacaactccaaatttcatcaaagggcatggaaagaaagcatgtactgtcaaaagagaaaaaaattcaagatgtcaggtgagtgattattggggtgagatccatctccgatttgtttacatcttctgcttttctgattttggaaggaggcccaggactgtgcacaccacagggctggctgtgctgtacgagagttctcataatcgagatgccctgaaggtaaatacttcagtgtgactcacaaatatttatcctcatatgagcaggtattattccatttgagaagaattcctacttttttaacagcagagaaatgttgatcaggatctacaaaaagaataaagcagacagtgtttctgtttaaattgtcgagcacgttcctcttttgtccaccgtgtcttgcgggctgtttctgggcacacagtcatgtgcgtgcacacacacatcccagagatgctatctttgtattgtttggtttccaaatttctttctcgtttcagcaaatattgttattttaattattttagacatgtctgcagctctccagctgtgggctctgagctgctttttctgactgagatcttaggatgtccagagggtagtcagggatttattgtgctgcctcgaagtctgacaataaccttcctgccctggccttgtcttctaggggacatgggaaatatagacgtatatatatattttggtttctgtggatttttgttggaagtacagcaggaaaattttctttcataaacctaataaagaaaaggtggtctcaaatcagattccagttatagtagctgaagatggccaaagggaaagatggaaagaacctctcttcaaagctattgatgagctgatgattgagctaaccctggaaccgttctatttcctgactttttttttttttgagacggagtcttgctctgtcacccaggctggagtgcagtggcgcattcaagtgattctcctgtctcagcctactaagtagctgggattacaggcacctgccaccacttccagctactttttacattttttagtagagacaggatttcgccacattggccaggctggtctcgaactcctgacctcaagtgatccacccaccttggcctcccaaagtgctggcattacaggtgtgagccgccatggctggcctatttcctgactttttgtttgtgttttgtgagaccatgaatttcctgtcatttaagccattttgggatggggcttctagtggttgctgtggaaagccactgggcacagtgagtagaagatggtctttctaaggcatagagagatcctgagaccagaagaagagcttcccctctcgatcctcatagaaaaacactgtgacggcaacgagtggtttccaataatcatttcttcttcagaaagttttggccgagcacagtggctcacacctgtaatcccagcactttgggaggccgaggtggttggattgtctgaggtcaggagtttgagaccagcctggccaacatggcaaaacctcgtctctactaaaaaatacaaaaattagccaggagtggtggtgggtgcctggaatcccagctacttggaaggctgaggtgggagaatctcttgaacctgggaggcagaggttgcagtgagctgagattgtgccactgcactctagcctgggcaacagagccagactccacctcaaaaaaaaaaaaaaaaagtttccaaagcaaggatttgatctgaatttttgacaagagatagttttccacataaaaaatggagaagaaacctgttgttcatccttttttttttttttttttgagacagagtctcactctgtctatcagggctggagtgctggagtgcagtagcatgatctcagctcaaccacaacctccatctcctggattcaagtgattcttctgccacagcctcccaagtagctaggattacaggtgtgcaccaccacgcccagctaattttttttttttttttgagataaagtctcgctcttatcccccaggttggagtgcgatggcacgatctcagctcactgcaacctctgcctcctgggttcaagcaattctcctgcctcagccccctgagtagctgggattacaggcacctgccaccatgcccagctaacttttgtatttttagtagtgacagggttttaccatgttggccaggctggtctagaactcttgacctcaggtgattcaccagcttcggcctcccaaagtactgggattacaggcgtgagccactgcacccagcctaatttttgtatttttagcagagatggtgtttcaccatgttggccaggctggccctgaactcctgacctcaagtgatctgcccacctcggcctcccaaagtgttgggattttaagtgtgagccaccatacctgccctgttgctcatccttctgatcacagtggatgggcaggcaacagccccagctccctcagcttcgttatgaggaagatcccaggagggcataatgtttttccttcacttttgtgtctgtcacccatggacgggcagcctgggccatcacacagggtctcacacacttagtttaatgctctgctgtcttggttttgaaattctcaatgatttatgaacaagtgatcccacattttctcttttcactggtcccacaaatggcataacaggtcctgctgtcatctactgttaaagctcagcccagccaccctcttgagaaaggggagaatggccatcagcaatgcagagttcattttataagcatctctcttgtatgtgatctctcatttccttttgaagataaaaggcgagtgatgagtgtccccttggtctagttttcctgtcttctttctgttgtctttcacctaaaaacctagctatgaaaaagcaaggactcagctgggcacagtggctcatgcctgtaatcccagcacttagggaggccgaggcgggtggatcacctgaggtcaggagttcgagaccagcctggccaacatggtgaaaccctatctctattaaaaatacaaaaattagctgggtatggtggtgcgtgcctgtaaatcccagccactcaggaggctgaggcagaagaatcacttgaacccaggaggcggaggttgcagtgagctgagatcgtgccactgcactccagcctgggtgacagagcaagactccatctcaaaaaaaaaaaaaaaaaaaaaaaagcaaggactcaaggataatttcactggatagccccagagcactgctcactttatctgaggcaggcaacagaaaaagtgacaaacagccagcgggggcagggacacttgtactgagtactaagagtcttcccagcatgattaggcttttaaaacttactgctctattaggaggagaggctgagcatgagtggtgcattagaattcacattccatctgaataatattaaatctccctcttggcatcctgtttatgctaatctttttcgggacttaatgatgtttatcaggacttccatttcctcttctttagaaatgtgctcagctaatgaaggaaggttggttttcttgagaaagaaagattcataagaagagtatgcagcagattcttattctgagcattgcaggttcagcctctcactgcggtgacttcatattcatcaggaataggtataatctattctgtgcacagttgatttagggcagaaataaaagctcagacaacaaagcaaggctcctcttacacactactatgtctgaatacaaatggttcataattgaaggctaaacttcctcatctcacccacagccagctgcaagggcaaacatggacactctgttgcatcatatagaaactgctgggcatgcaggagtgtggaagacaaaaggctggcaatgtgtcaggctctgtggggcagggtcaactgcaatgagtgcttatatgcgaggcgagtgtttagcacggggagaagggcccatcgcactgcaggaagccttctccctgagactcggggcaatgccttgggagagtatggggtggtacttcctattaaaatgtggcatagaaggggttatttgcggatgttctcgtcttctgcagctttgaggctgagatctcaaggccttgggcagactggaatcttttcaattccacagaagtgctgttggcgaagaaagaacattcgtttggtgttgctctccttgcttttcactcttttcccctcgcttttctgattgattcgcttttactagctcttgcttgctctgaaatctccggaaaagccaggttttgattccttatgtttctctagttctccccttttccttcctattaccaccttcctttttcacaggagccagagaggtggtctctgcgtgcttcccacaccacattgacaaggaaagggagggacattccaaggctggaagccctgccaggactgggtgcattataaggtggtgactgactgtggtgaaagtcccttcgatgtcctacggattctcccatgtgactgacgcgagatgcgtggctctattcattttaattacatttagaatcagtatttatatcttgaaatgagtcttcttcctccaagcctttgccggcacactgtttttcatcttggcattctcccagatttaaaaaattgacctgagatggacacaggggtggaagaggttttggtgccctgtgtctttctctctactgataagacttttgcttctaaagagagactggccccactaacagcaatgatattggcactgcacattattcagaagctacggggggcaggaatggtttatagctatggacattaactttgaataatgtgtattcttagtaaaacctctaagattaaaaaaattaaaatgtttgcttaagtaacgagattcattggctgactctattgggatgtgattcacaagtcaattcatgctggggcatctgtcaaagaagagaaccctagaaaagtagcctgtcacccttatttctggggaataagaggcaagctattaaggccatttctcaaaactaaacagccatcctcacaacaatgacagcagccatcccaccctctgcgatgacatacaaatatggaaaaatgttatgtgcagattctctaaattaaaaatgaggagggacaaaggggaacacacattcagttcagtcaaagacaacttcaaatgaagaagttactgctatttttctgcactgaaaattgatttctggttcaccaagagaccagcctgattctaagtgtggtctcagtattggggtctctacaagcatcactagccagctcattcctgcccactgagcccaaggaccagggtaaatcaataaaaagtacaaataatcttaggttggtacagattctctgcatggcatcaaaaagtatgatgaacagggactattacagaatagctgcctggaaatatacccactattcagggctgcaatttatcaattaagaacacaacttttattttggacagaatgtctaagaagctaatgggtgttaatttggaggagcaaagcctttgttttgtaaagtacaggacggacagcactctggatttaatcacagtccaccattatggtgggccccaaaagtctcggaggcagcaaatctctgaatattttgtttagcttcagcattgaatcaactctataaaatgaggggatatttgacttagctgatacttttgttcatattttacttgcacatttttaaaagatgtaaataaatctgtgtttggtttaagttttcctggtcatgatgctgcttcaaaggaaaaaaaaagaattaataaaaggaggcatgaaaaacctaattctttttcaaaaataatagggataaaagaacagtgtgaaatcaatggtggcactgaaataatagttacaaaggaaatgcagtacagtacatagcttaactctagtttttagggattgcaaattagacatcccaggaacaaactgttaacgtcaactttccccagtcactccaggtcatcatttaagttgccaatgaggaaacatcctcaaataggacatgtcttgttcaaattaaatattgctacataaaggtcacaatgccttttatttttggtgaggcatgtcttgcctgatattgggcagatctgactcagtctgacatcccctcaatccaatcccatggttgggggtggtggggcagcagcgggggggttacagccctacctgatcgaggcagttgctgcgtagatatctcagtgcttgctgaatactttgaggcaggggctgtcccgttctttggacgtggactatgagaggaacgccaaagacagccttgtctttgtagtcgggaactttcatcctcttcatgaactttggaactgacctagaatttacagaaaccaggtcatgcaagcctcctgggtcacactgtggggtgaggctctggaagcaagcatgagggaagccaggcttttgttggaatacccaacagatgcggggtgaattcaacattctctctgcattaatcacaggacactgctgtgctctgtgtggcccttgcctgcttgctatctctagctactaaacagcatgagtcacgttcccagaatgtatttgtagctctgttttcaggtcaagtggacaactttccaatttaactgtgatagacttatttctcaagtgctgaacacttaaaagtccccaacaaaacaaaacaaattaaaaattacaagaggaagaagaaatctggctggggttggaggaaaaggaagggagaaaagaagaacaatatttcttggctctatcttacttttctagagccagttgtagttttcaaaggacattttaatacagaagcatatattgatttgaccatgaatttataaccttctaaaatatttcataaaagcaccattgattttttaaatatgtataatataaaacatagaacaattactgacacattttgtattttttcaaacccaccaaatcatctacaataggtccacattcaagttctaacatgcttctgtcaattccttattacaaggtttactgcatattcttgtttctatttgccaatgaaataaaagcagaaatgtatttgaagaattaaatgctctttgaatgaatcaatgctctaagtggtaagctttgcatcaggccagaaggtacaagtgacagctgtttctgtgcaaactgccaggattattttatggcaagtttatttttatttcctctgttcacaattaatcaccctttacttgtctctttttcctttcttggagcctgactgccttccctggaaaccaactgagaactacaaatagagcaatgtttcctgtagggtccactgcatcgaggctacggcagagctcatgccttatgtccaggagatcatcagtgaaggcaatgaatgggtttttcagatatcacaaagtaaacatggaagcttctgcaatcacacacttagctctagagccaaggatcccctcctaggtgaatgtgctacgcaccatgtccagccgtgcttgttggacatggagtgcttctccatgatggccgtgaggcggagcagtgagaagcgctggagcaggctcagctggctggccgtctggctgctgatgtggggcgatgctggggccggccggggctggtgcgacagctggaaactgttccatcggagtcgcctttaccagagagaccatcagagaagccagtcacaaagtggacttggtagcgggaaacacgggacatcaccaaggtacacgcagctaatcaagatagcagccgagcaaagaaaatcgcaaagcaaatggaacagaagacacaagtgtgcagaataaacataggacatgatttttccaagtcagataaatctggaaaaagtcttattatccattttattagggggtttaaataagtgatagaggaaatattatgtttgtttattccaaatttgttcccaaagtgttgagagcaagctgagacagtgtgtgtgtgagtgagtgtgtgtgtgtgtgtatgtgagagagagagagagagaaacagagggagagagagaaacggaaagagaggaaagagacggagacagggagatatagacagaagcagagagagcagagagatagaaaagagagagacagatgtagatggagagatggagagatgagacaaaaagagatacagaggcagaggatggagagacagacagagacagaaagatagagacagagcaagagacagagagagggaagacagagatagagcaatatagacagaggacagacagaggtagagcgataaagacaaagagagaaagagagagagatacagacagggagcaagaaacagagagagagagagggagagagctgtcgaatgtctagggctgtagaaaattttctcattgtcttccatgtgtctacactctatatcttgctcagtattgagatggagcccgaagatgagaggtacagaggtgacacatcactgaaccacaagacacacccttgcctcaaccagaaacccagcagcacagggccatttttctatggtgcttctgaaacggtctttgtaggtcagctttgatgtactttgtaattggcactttaaagcaaaaacaaacttgcagagtacacatcttaggcctcagaaatttcttataggagcaaaaaaagtgtaaaatttggggaagagacattttgatgaacgcatcacaggaaggtcaggggaagagtcggtgcctaggaactgggtattggttatccaggattccctgcctatggtgcccagtataacgctttgcacataagaagctcaaaatatttttggataaaactaggaacaaaataaaggataagcacaaataaatatgagttcacatggattcaatcaccatgatacctgtacagaagtcatacttctgttcaaataattcctaatcacatacatcacttagaacagagtcaggcatttagtaagtactctgtgtatgtttgttaaagaaataaacagaacacaattactatgaaatggatgaaaaatcatttcacaagtgcatgccacctacctgtttggcctggtcagagaggcccctacaccagaatccctcctgtctctgaccccaggaggctcagattcattaagagatgttacatctctttccacatcactgggtgtcgtccgaccttctgagacagagttaccttcaaaatctaaggtgatctgattaggagatggaaaggtggataagccaggttccccaaccaatgtatcatgagtttgcagttcaggcaagacatctttggaccagtcatcgactacctcttggagcccattgacatgctgcagaatgtcatccaagtgagggaaaaggtcatctttctccaagtccaaaagatctcctgtgctggcatacagatgggagccagggacattgtcatagatactgactcggctggctctgtggcaggacgccatgagccggggctccctggcaccagggacctgctctctgcccagggagatgctaccggtcctccaattaaccccattgctactatctgtgggagagaggctttcaatagaaagtgccttggggaatgttcctggtttgtgatccttgggaatatgcaccaccaaattctcttgggagtgaaattcatgcatacggctttggtcccctgcatccggcagtgctgtccccgccagcacatctaggtcctccaagtacatgcccccgcgcttgttggcctcgtggcacttgcgttccttcaggcagggcgtgctcaccccgctgctgctgtgctccgacgggctgctctcgccactcgacttgccagagcatgggagcccttttctgcaggcaggtggcggcgaattctggagatctccatttggtatttggatgcactgcatagccttaaaggactctggctcctgctgcaacatgggcccactgatcaccaggccacctgtccgcccagaccccttatgcctcccgtgggctcccttccctcggagtgtttccatgcgtttcaaaaatgatttggccctagccctcgtgggcttctcattcttggggtggaaggggtggttgaggacatctctggggggctgtgggaggctgctgctgacgagtggggcatccagcatgaccgggttgtctgtacagcactggcccggctggctgcgactgtcgctgcctccactgctttcgctgtgaatggagcagacctcaggctcgctcaggtctgtgaggacgctctcactgctggtcgtgttcctcatccccgtgcctcccggtgacccatttctgtctcctcgagggagcagcgtgtagaggtcgtccacacgagaccacctgcgactggttctttggaaagtccatttgttgctgatacaaagatcttcctcatcggagtcgtcaccctgcagagcaccaaggaaaatgctcattagcagacagcgtggctgaagcaggaactctgggtgctctgagggcagccctgtgtggtcctccacctccctcccctctgtcctcccatgcacaggtgtgagcttcttgggcacctctaagctgtccttctaccacttgcactgtcttgtacatacccttcctcccagtggccagaggacccttctcaacttgccaaactttcttccttcccattttcaaagaggttttgaatgcctccttccttcctctctaagaagttttccctgactgattataaagagggtataattacatcagactagacggtctaaatataaagcacctgcagtcttctttttcacaaaggaactcaactctgccataaaaggcacttacttctttccagaaacctcttcactgagccccggggaccatatttccagcttgccccatctgaatctcagcttcagtatatctcaaagctaacactccttattttagtcccctgcacttgattcttatcgtgtattccctggataaggtaacagcaaaatgaaccactgaatttctttaagtagagatgagggagccattctggagatcgctatttgtgatccaatccggctactctgcatgagcgtctttttctgtggaatcaactccgagtcagaatgccgttggcaggacgcacacctctgtgtggctgcagtgggtccccgcggcttggcactgtcttacactttgggcctcacacattgactctaggtgtctggtttctgcctgaatttgcagcccctgagaggggagcatctgcattccctgaggccagagatggcctggtttagctttgcatagccttgggcccagcgcagaccttgacctagagcatatcatttccttctgaaataaactgaatcatcggatcctgcttcatcctcaccaagcacatcaccaagacctaattctgaactgattttcaaatctgttccctcattcgtaatttcactctcattctcttagtgtaggccttgccacctctctctggatctgttacagtaaaaatgtgggagaaaccctgtctccagcatcttccccatctaaatagctttccacagtgtagtccaaatcgaatcatatgatttttttttttcagcttagaagccttctgcttgaaagcctccactctcagttgttacaggtgaagtcatcaagagccgggcctgctacagtgagccgtgatggcaccactgcaccccagccgcagcaacaaagtgagacactatctcaaaaaaataaaaaagagcaagacctgtgtttctctgtttcattattcatataaacatatttattcatatgtatagcctgtccaatgccaaggacataataattgcttattttttgtgaattgaattaaatttattttactctacctgggtgttcagttttaagacctggttccaagtgtcagtgataccagttaagagctaggtgactgtccacagtctacttaccctctctaaagtaagtttctgccacttataagattgaagcgggtcttgcctcataggtttgctgaagagaataaagaaggtagtgcattcagcagtccctcactgagaggtatttgcttatttgtatctttcaatgtttgttcaattgcctactaatctttttatgtatctagcgtccactttaactccctttaaccttgcagtgtgttgtttttaaggaaacctaagcagatgcacagttaatcattgtggggatcctcctattcttgtttattccttcaaaatctagtttccgtgtaggtttgactaaatgacaaacttgaacattcaagtttaaagtgaaagcgagtacaaagccaaggtacagaaaagaattctatggcttagaagtcaggtgcggtggctgatacggtttggttgtgttcccaccaaaatctaatcttgaatattgtagctcccataattcccatgttttgatgtgttatgggagggacccggtgggagataattgaatcgtgggggtggttcccccatactgttcttgtggtagtgaataagtctcatgagagctgatggttttataaggggaaaccccttttgcttggctctctttctctcttgtctgccgccatgtaagatgtaccttttgccttccaccatgattgtgaggcctgcttacatgaaactgtgagtccattaaacctctttttacttataaataacccagtctcaggtatgtctttatcagcagcgtgaaaaatggactaatacagtggctcacgcctgtaatctcagctacttgggagtctgaggtggaagggtcttttgagtctaggagtttgagtctagcctgggcaacatatcaagaccctgtctcttaaaaaaaggaaacaaaaagaaacaaaaaagaatcctacagcttgagatcacagtgaaaaatgagtctgagttttaaaaaagttgtataaagctctgatgaaagagtttagaaagttgtaattgtacaagtggaaaaagggcaagactccagaatgatgactcaaaatatactttcctactagtactttctactccctcttttcctgtgattgatataatgaaaactgacatatgagggtcatttatacacaaggtgccatgataggctgaacgttgaacttattggatttttgtattgcattttaggaagctagtgagaagttgatattaaataaggactatgaaaaagcccttttagcagacagtttttgagaagacaaaaaaaaaggatatgactttaaagaaaatatagatattttaaaacagaaactacaacatttagtgttggccccaactacctctctcaaacctggttatgatgccagcacaccacatactagttggatagggactcctttatttaggttaagaacacatgccaagctgggcactgtggcctgggaagggaaagcctggccctgtctgctggtctctaagagcttattatactcactttggccaacaggaagatatttacagcccaactaaggcatgtgaaaaagtggcaaactcctgggaaaaaaggaaaacagctcagggaaattttgcagtatttaggttgtttgaaccaaagcaaacaaacaaaaaccaaagcaatagaaagcaaaatgcaacagagaaaaaaaacgaccagtcttctttggcaccctgtgcctacaacgatcatggtatgttccaaagggtattgaaatggttgtgtctgtttctttcactaatgatggatatttcaaactatttgatagtgacacacaacaaaaaatgtattttccatcacaactcagggcatgcatacagactatactaaagcaaaaaaaaaaaaaatttatgcttaagtaattatccttgtttgtttgtattctgatactttttaatctagtttagcctattttatttttttaaatgttgtttgtgatccaccaaattcacttgacaacctaccaaggggccatgatctgcagtatgaaaaacacattgcagtagagtttaaggtttttttacgcacttgggacccagcagagcatcaggcacatttcagactctccagtggtatttatggaagtgtactgattgtttaaaagagattatcagatttcatctgtttgataatttttgaggttaacaatgaatagtttgtgattatttagaaatgtaaaatggaaatctctaggagtcagatgtgtttataaagaaaaggatacatcaaactaactttattctcctgtctcagaaaccatggacgtaccagggacatggagcatcagaatttcagcaacacaactgaaaataggttcccacgttgtggacaatatggctcactagctagatgctacacaacggggtccaatcttttggcttccttgggccatattggaagaagaagaattgtcttgggccacacataaaacacactaacactaatgatagttgatgagctttaaaaaatggccaaaaaaactcataatgttttaagaaagtttatgaatttgtgttggggcacatccaaagctgtcctgggccacatatagcccgtgagccatgggttggacaagcttgctacagagagttttgtcagtaactggttgagtaactcctctaaagcgtgtgactaaaagactgtaaataactgaaggaagcatgtctcaaggttatgatcattttaagagtaacttgaatgggccggaactcctgtttttaaactgtaaagatggtattaggctatttgctaagggttctttgagactcagttttcagagttagaaaatgaaaacaataataacacatgtctagcatgatttatcaacagaaccaaatgggactatatgtgaaaataccatataaaccctaaagtggtagatgaaactagttattgttgttagagaatagcaatattgagaagtgtgtagagcttaacagaagtgaaggatgacctgttaataagataaaatttcataaaagtaaaatataatgactctaacttcaaaaatcaattacaggatcttcaggataaaacgaacatagttcaacagcccttcctgctattaatagtcttgagagttctggcagatgtaagcttaatgtgacttaaccatgtaatatggctactgaacaaagacaccaaccttaggatgcatgaccagagcatagatcccaagactcaaaaggtcagtgcccattgcattctgcactggtcacatatatcaggaacaatgggttctttctaagcgctccacattttaaggggtacatttctagagaagagtaatcagaatggccaaggatctaagaaccacaacctcctggggtggacaattgaaagaactaatagcttgatttagaaatgaggaactctagacagtgctactcagagtgtggtcagggggctgccagtccccaaacttgctctttaatgaggtagatacagaaattgagagtaagaagtaaaaccatttgtcaccatttgaaaagtctgtgctatctgagctcacaatcagtggatttgtcttactgaacagggtaaagaccagtctgggtgtagtcaaattcaaacggtgagtcctatgagtgacagctgcatggtactggtgtgtggtcaatctgatttacaacaagtgccaattcaaggttagtttgcttaccataaaccaaagtgtataatgtacagaatccactgtttcacaggtaatttacatttataactttataattataagaattggctagagatgaagaactgaagatgaattttggaaatatagcatcacttacctcattttgaataaaaggtgaatggaataccctaaagtagtaagtgaaaaggaataccctaaacttttaacttgccttaaaaaacctttcttcactggtttccctacgatgactggtactcaaacaaaagaattttagatatacattattacccatgagtaacattgttatcaatcccacttaacttagataacaaagaagaaacttgttgtcacattaaaaatcttatggccaggcatagtggctcatgcctgtaatcccagcactttggaaggccgaggcgaacagatcacctgagatcagaagtttgagaccagcctgaccaacatggtgaaacccatcactactaaaaatacagaaattagcctggtatggtggtgcatgcctgtagtcacagctactcgggaggctgaggcaggagatcgcttgaaccccagaggcagaggttgcagtgagctgagtttgcgccactgcactgtagcctgggtgatgaagtgagactctacctcaaaaaaaaaaaattatatatatcttatacatttgcagtcaaagtgcttgttcaaagtgtgcatataggcatttaatttgagggatttctcttttaaagtaaactttttgttcagttatgacagatgaacaacaaaaatggtatgagcacaattgtgattctttgtattaatcacatatacgcacactttcaataaaaatctgaacagtttttgtaattcttttctattgatagaagcaggaggcagtcaaatgcctaggcaaataggggcagcttcctggtgaaaccccaccctcaagccaaagacagtttgaaggctgaaagtcaagctacaaacccacagactggattgagaacctctcttcccatttggcatgttttcctctgattgatcctcacccttcctctattttacatatacctacctttccctaattggttttttacactgtcttgcccacctttgattggtgtctttcttttagcttttttgcacactcataaaccaatcagcaggcactcccccattctgagcctataaaagcccagacccagccacactaggggagaaaaccacccaacttcgggaccacccttgcatcccctctccactgagagctgctgtgtcgctcaataaaaattcttctccaccctcctcaccctttaattgtcagtgtaacctcattcttctttgatgtgggacaagaacctgggacctactgaacagtggggtcgaaaggggttgtaagctgcagccctccttttgctggcgccaagaagcagcagcagggctgggtcagccagggagccacaggccacagagcagggtgacaggaacaaagaagcaggggcccctgccaggcacagaagtttctggctgatgaagtggggttgagaaaaatcctgcatcattatttcctgttatatttgttttgattatatttatcagtactcacctttgtgtcagttgagcctaacaataaaacattaagccttgtattttctataatttgttaaaattaatatttctaataattcatttgtattgaattttacaaaagtatcttagtctgtggcagactggaaaaaaataaaataagaaaatcagtcactcaccactgacagttgagaaactgttctagattgagcaaaggtctgcaagtgttttctgtatagggccatatcataaaaattttaggtgtatgcaccataaggtctctctctctcacctactcagctctgccattgttgtgaaatgaatgggcgtagctattgatccaataaaactttatttatgaaagcaggagcagcagtgtgctgattccctgttctggaggacagagctaaagggcttctgagtgaatggggaaatccatattctgtgcttcaccagggaaaaaagctaggttcaggtgggccagattagaaggaatcagctcctagcttatcatatggaaggcctttctagtctgtagaataaaataaattgccttgccatgtgaagagctcgtcatgttgagaagcttataataaacagtggctcagcaaattgtgagggagagggatgcactaagaagcaaatcctgcagtgagtgagtgggaggttggaaaataagaccaaagatccttccaactcaaataccctacagttttaggacattcgcatgtaattatttgcaattcaaggctgttaatactctccagccaagtgaatgatggactttctctcatctgactgctctttggagttgccaggaggtgtctcatttggtgggagatgcgggggtgtgcaagggagtgggaagtaggggtgggtggggggccaggccccttgtcaacagctgcagtgcctctgaaatgccgacggcatccaggccaggaggtgctggctgcaaggtggcaattagtcatggtttctgtgttgctttccacctttggtcattatttcagagagccttattaaaattataagttcaaccagaaccttctttggaagctgctctttctctcttgagacatattcctaggtaagaggaaaggtaagagtcccatgtggatatgtgtccttctctttcctcatttaataaacagcctaattggagtcttcagtctctggcttttactttgaatagaagctgaatcacataaacactttaatcaggggatttcaatgtcatcatggagcaagcgcgaattttgtaggtaataatgaggaagaaacattttcccgagaaaagctactttgtgtgtgccttggtgtttttaatttagatgagtctccactgtttggctttttttttttttttttttctaaaaatgagaacattcttcactgaaattatatattcctcagagacagatgccaaccagacattccataaagaagggcttttttcaaaagacggaatttggccatatctttacactggaaacaggaacccacacgaatccacagctgcaaaaggcaacgcatccatagtcacatagaaatttagacgttaactggagctacgtggccgggcctgcctgtttggaagcaggaatgggccgctgggaatgccgcgggagtggagagcccgagctgcaggcggcagaagtgctggtgtcctgtctcctgaaatgctcttggctgggttgttagtcttccagtgaggcgtgcagctaagctcgagaatactcctccacctgactcttacagaggcagggaaggtcatctcgaatccttaaagggtcccttttctcttctgcaaaacagttagaaactgtattgtgggagggtagcggtgttgtcatttctcccagtgctttggaagtggcatttcatgtataagaaaggtgtatggctaaccaggcatgaaaaagccttcatcaccatcatcacctatttgtggacttttcacattcttccttgtgtcagcccaccaaaatctacaggattaaacacaattgccatgaagacaataaataaattgtggactttagtacagatggcaagaaccatgcctcttataaaaacaatatacacagtgaattgagtgtattgctgaggaaacatgagacccttgcaggtgtcaggccaagggctagaggctcacccagactccagtttgtctctgaatatctctgaaaggtgaggaggatcagtccagtgccagattacccagattcaagtactgcctctgctatttctgtgtggctttgggcaagtgccaagcccttcaatttatgcaactgtgacatggagttaaggacaaggaatagtgcctggtggggaggaagccctgtgtcagcttttgctatccctacaaactgctgagccagcacctgcaaccctttcataggtccggcagtcccaaggcacaatgattgtgaccccagacagtttagctacttggggatgactttctgcagaattaaataagtctgggattctgcagattggaggtggggattctatttctatttcttggatggcttaacatggggacttacctagaggaaatcccgctgccttatttttcttccaaataaataaatactgaagttggctggagcttttcacggggtgctcgattctcaagtctccttttctatttgtgatcatttggcctagtcttagctcctattcatttttttttctattttttcacagtaaaataagggattaaataaagtctatggcttgtgtaagaggaagatcacagaaacgggtgtcacaacagtgtctcctaagtggttgcttcaatctggccatggattctggtcattattgagattcataagtaggtggagaccacatgtcagcattatttatttgaaaattcaggccataactctccaatttacaacatgaaaagcaatattttattcaagtgcatgcattctgaggcctatagctaagcaggggctttaagggcgtgtgccactagatgcgatataaagactacattaaggtcagaataccgaagtgaccaatttacagaggagcttttgtggaggtaacgcacaaagagccaaacaaatgttattcaagcccatctcgcctctgggttttgaaaagctggtgacagggtaaaaatccaatcactccactgtgtggaaacaactcatgtcattagttttttggcattttcttttgtgatgcagtgcagctaatggtcggtataggcagctgtatagaccagccatttgaggagccacactttagacacacaggcatggctgtgttcagtttaataggaaccatgtgttccaatcaaaacaacatctgaccctcatgcttcaaatagtgtgtatgcttctcaaggggtctattcagtcagacagctgttgggaggtttattcccacattttaaatttgtctttggcctggacaaactgctcatgttttaatatttctctggatattgtttttcactgttttacctcctcagcttaaagctttggttcccagctcaaatcccaaattgtttttaaggtgaggtccactaaaattcatttgatcttctttttttttggtgttattttacagcagaaattcagattaaagttattttcaaagattaggttactaaggggtaacttaaaatcctttggctttaatgatttctctgtgtagaccaggataaaaacactttcttttctttcttttttttttttttgaggcggagtctctctctgtcaggctggagtgcagtggcacaatctcagctcactgcaacctccgcctcccgggttcaagtgattctcctgcctcagcctcccgattagctgggactacaggcgtgtgccaccatgcccagctaattttcatatttttagtagagacgggtttcaccatgtgggtcaggctggtctctaactcctgacctcagatgatccacctgtcttgggctcccaaattgctgggattacaggtgtgagccaccgcaactggccaagaacactttcttttgattcaaagatttttttctctgatccttcaaaatatatggaggcttgagttgctacgtagtagagatgttaaatgaaaaaagtagttaaggaccctaattctgaatttcctaaaaagaatcaattcagtgaaaaagagaggctgtacagcactttggctaggagccttggttttggaatcagacacctccgaggtagaaaccctgctccgccgctagctgcaagatcgtgggcaatgacctagcctgttcaagatttaccttccttatagagaaaacagagaagcctcatctcagcggattaaatgagataatgtgtggtaagtacataatctagttcctagaaaacagtacatattcaataaagtacagctttatttcaaaactcaaatctctagtcttatccataaagaggaagcagcacatggcaagtcctgtgatggggagggagcttagtgacttttcggactgaaccgaattccttgtggctagagacaagtacacagtggggagaatggtgaaagatgagccagagttcaggatcttgtcacaccgtccctgggccccctcatacattatcagctgaatctgcctgatagtgggggcatcttgacacatgcatgaaataaaacactactggaaaaaatgagccagaagtcactcgccatggacccccagatcctttctgaacttttaatctactcactgctgtgaagcatttgagtctaataaggggttgacatttacaacggacacttctgaaagatcaccataaagcaccgagatattttacatctttacgcaaaccctctaataaaaaaagaaagcaaaatgaaaggtaaaacaaatagatttcagtcttagtttataatagacttatttaggtggttatgatgaaatgggacatggagaatacacatggatggtcaggcatttcaaaattttgcttaggttcacgttgcttttttgtttttggagacagggtgtcactgtgtcacccaggttgaagtgcagtggcatgatcatggctcactgcagcctcaaccttctgggttcaagcaatgcccccaactcagcctctcgatagctgggactacaggcacaagccactgtgcccagctaatttattattattatttttttgtagacacaagggtctcactatgttgctcagattgatctcaaactcctggcattcactggcatagccacattcttattaaggtgtgggcacctacctttttcctttggaagttcacatcaagtttcattgaggcacacttgttcaacgtatttagtcgtctaaaaggaaagaaaaatgtgatgattactttcactaatgaatttaaatctctccagtttgataatcctcctttatttccagtaaagttgaaactgcaggaacaaccaattatgtcccaagacagtactgcacccacagaaggtatgctatatagtagttcccatttgtgctccagcctcctgacctgagaggactctaccactaagcctaccaatccctgccttttccctaatctaaacccagcccttttctggcttctctttccactgttcttggaatccatggctgatcattttagccatactttcactatctcctccaatcgtttgccaccttgaccttgcatcaagtctatcccgttaacctctaaatatggatcaacacaaccgtgtatcttctctcctgatctcaggtggttgggtataggtagaaaataactcacatcacagtgctgaattatacatgctataggctaactatgccgctccagaacacatacgttgaagccctccattcacatatgtgaatgtccaacgtgattgatttggagtaaagaagtgattaagggtaaaggggtctaccagggaggagctctgatcccagaggattagtgtccttgtaagaagagataccagagagctccctctctctctctgcatgtgaggacacagtgagaaggcagacatctacaggtcacaggacccttaccaggagccaaaccctgccagcaccttgatcttgaactttccagcctccagaaccgtgagaaaataaatttctgttgtttaagccactcggtcatggtgttccatcatggcagcctgtgctaataaatacattttgattttcaccctcagctggactctcaaagatgttacccagcatttctttcatttcgttgggattacaggcatgagccactgtgcccagcccctctttctgacttctatcatccgtagattagttttgcttcttcttggtcattgtgtaagtagaattatatagtatgtattttttgagtgactgttttttcattcaacacaacgtttgtgagattgactcatgttgttgagtataccaataatcattcagcttagttcctgagtatgaagacacacaattgggttacctattctcttgctgatggacatttgagctgtttccagtcgtttcttttgtttgtttgtttgttttttgagacggagtctcactctgttgctcaggctggagtgcagtttcgcaatctccggctcactgcaaactctgcctcccaggctcgagcaattctcctgcctcagcctcctgagtagctgggactacaggtgcacaccaccacacaggctaatttttgtatttttaatagagatggggtttcaccatgttggccaggatggtctcgatctcctgacctcgtgatccacccacctcagcctcccaaagtgctgggattacaggcgtgagccaccgcgcccagcttgtttccagttttgaccaatgaatttctaaccattgaattcaatggcttctttttagcaaagacctattaatagcaatagtcacaaattagtacccatcattccttgaaattcttttcatccttgacattcaagattatgaattatctcatctctctggacaccatctccttcctgccacgaagcagtacttgccctttaactattaatttttttgttagaattcagactgaggtccatccctttttactctccatggccttactgaagaatcttaacataaattagactcaagtgatacccagtcctctgtctccagcccaggcatctcatctgaggccagagtcacattctgcattctcttcaaaacctgtttctcctacgtactgtcttgtcttgactaagagcatcaccaatgggccatccaaactagaaaataatgtcatcttgaggctctactccttcacaatctacattcgttgatcaccaaatcctgtcaattatacctctatgatgtctttgaagtcttgcctctcctttggccctaattcagtctcctgtcgttgtttatcaagagtcaggcatcagcctcctaattggtttcactaccacttctaaaactttacactgaaaccagttctatttctcaactttttctcacgtcgctcaccgactgaaatacgtttaatgactctcctcattttcaaccacctccaatgtaccctctgactacgcattcattagtgtcagatatagcaggcaatgctgagttggaagctgatcatctcatctgagaccatctttggcaggctctcagcctgtctctttggtctgttccacgtgtgttagcatgtctacctaagagtgggtgtgaagtgaaaaaaaatggtggatattgcacatttggtggctctgtaacaggtttgtttaggggaggattgcctgttatttataaaatgaacttatctagtgaacttgttcttccattagggtttggaagcacaaacaaaacactccattctgcttttctgtggaaaagcttttgatctacgacacacacacaagacatcaaaggaatcatcttctatataccacagactcgaatatgctttatactttctgacacatgcaggaagtttatttattattttctaaagctgaagactctaagtagatttgactttatagctctgggtccttttattgcccctaaactcagatgtttgcctgtaccttacaaattgcttctctacttggaaaaagcagttgcaaaacatgtatttgataaaggactcatatacagaacacctaaagaattcttaaactcagtaacaagtcaaacaacctgattttcaaatgggcagaatattcaaacagatacttctaagagaagacatgaaaggatgttcaatatcatcagtcatgaaagaaatgcaaattaaaatcataacgagacaccactacacaacagaatacctaaagtaaaaacgctgacaacattaagtattagcaaggattcagaactactgaaacttccaaagcgtacagtctctttggaaaacagtttggcagtctcttatgaaattagatatatttttagtacttgatctagcaattccactctcagctacttatgcaagataaaagaaatcacatgtccacaaaaagatttatactttttataattttttttttgctgtaaaaagatttgtacttgaatgttcatagcagctttaatcataagatagccaaaaagtagaaatggcccaaatgtccatcagctggtaaatggatataaaaattgtggtatatccatacaatggaatactcaacaattcaaggcactaactattgatacatacaacactatacatgaatctcagagtcattatgctaagtaaaagaacccagacacaaagagcatacactacaggattccactcatcaaaaaaatttcaggcaaggcaaaactgtagtgacaggaaacagatgagtggttgccaaatgctggcactgggggactttttgaggtcacaaaaatgttctgtgtcacggctgggcatggtggctcatgcctgtcatcccagaactttgggaggccaaggtgggcagatcgcttgagcccaggagtttgagaccagcctgggcaacatggagaggccctgtcgctacaaaaaaaatatataaaaattaagccgggtgtggtggcttatgcctgtaatcccagcactttgggaggtgaaggcaggtggatcacctgaggtgaggagttcaagaccagcctgaccaacatggtaaaaccccatttctactaaaaatgcaaaattagccaggcgtggtggcacatgcctgtaatcccagctactcaggaggctgaggcaggagaattgcttgaacccgggaggcggaggttgcagcgagccgagattgcaccattgcaccccagcctgggtgacagagtgaaactccatctcaaaaaaaaaaattagctgggcatggtggcacgtgcctgtagtcctagctacacaggaggctgaagtgagaggatcacttgagcctgggaggtcaaggctgcagtgagctgagaccacgccactgcactccagcctgggtgacatagtaggaccctgtagctgaaaaaataaagttttatgtcacgattgtggtgatagttacatagctgtacatttcacaaaattaatcaaattgtatgctttggtgattttttggaatataaattatatttaaataaagctgaataaaaaataatgcaagtgagtgacatcagtgaaaaaggttaagtgaaaacctccaaaaccccacttcttcataaaatcaacaaaagtactggcagatattgtcaaaatcaactttttaagaaagctgtaaattgatatgggcttccaacaaactaagtaacactaagtgtctatttaagaaaaatggttaaacatatgtaaggacagtgagctttgtgacattcaaacccaccctattcctatgcccttttccccagcttttcaggagctttgaaaatcaacagcatcaccgtcagagtagctgtgaaaactagtagccttgcatccactggagagggaagaacatgtttgagcttccccaaaactccgttaccaaagaattgtcattatctgagctgtctgggaattccctgaaaacccccagttcacagcgcttgtctttatttaacctgactcaaatcattactgaaactagcttatacccagggtgtttgtcaaagacagtcagtagtaattagtcaacatggcagttgcctgaaatggtaataacagttgagccaaacaagatgctaaccaaaaagcttaaaaagaatatctgggagaatgagatgtccataggggacttagaaaagttccaatgtattcctaggaatctagaaggccaagtacatgtgcagaactgtgtgtatacccaggaaagacctgagctggccctaatcttccacctttagctgaccttgatgatctgcacaagcaggaaatcaaggctaaggcagagttatcaattccctgctgcagtgctgaagccatattgtaacatgcacaaagagccgctcagcaaagactgagggattggttgaaggtatctaagaaaatctctgtccaatcatttgctgattactaaattaactgagtagatacttcagtggatacaacaagggatacagactttagagaattagttccagatattcattaaacagatagcaacaatgaccaccctgggaagagaagatctgatttcaagaggtgccatattacaatatttaaaatgtccagttttaaacaaacaaacaaacaaacaaaaaaccaaaacagtggatatcagcaaattgattctaaagtttatatgaaggagcaaaagactcagaataaccaacacaataatgaaggggcaaaactggaggactgacactatccaaattcaagacttcctatgaagccatagtaatcatgatagtatggtactggtgaaagaatagacaaagagataaatggagcagaatgaggaacccaaaacagactcgcacaaagagagtcaacttacgtttataaaggagcaaaggcaatacgatggataaaaggtagtctttccacaaatgctgttgcaacaagtggatattcaaatgcaaaaaaaatttagtctagacacagaccttatatcatcacaaaaattaattcaaaatgaatcatagacctaagtgtaaacacaaagctatacaactccaaaaagataacataggagaaaatctacatgactttgaataaagtgatgaccttttagattcaacaccacaggcctggtccatgaaagaaataactgataaaccagacttcattaaaattcaatacttctacttagttctttcagagaaaaaaactttcaagagaaagagaagacaagctatatacagagagagcatatttgcaaaagatatctctgttaaaggactattagctaaaatatataaagaacccttaaaactcaacaataaggaaacaaacagcccagttaaaaagagggcaaaacatctgaacagacaactcactaaaggagatgaatatatggtaaacaagcctttaaaaaggcactcaacatcacatgtcattagggaattgcaaactaaaacatccatgagatacaaccacatatctaaggtaaaaatctaaaacactgacaacactaaatgctggtgggaatgtggagcaacagaaactctcattcattgctggtgggaatgaaaaatggtatggccacattggaagacagtgggcagcttcttactgccaaatacacttttatcatatactcgagaaattgcacttctaggcatttactcaaatgaatggaaaacttacatccacatgcaaacctgcacgtaggtatttatagtagctttttcataattttcaaaacttgaaaacaactgatatgtcaggtgaatggataaactgtggtccatgtgggcaatagaatgttattcaccagtaaaaagaggtgagctatcaagccatgaaaagacatagaagaaacttaagtgcatgttactaagtgaaagaagccagtatgagaaggctatatcctctatgatccaactatatagcattctaaaagaggcaaaactgtggagatagtgaaaagatcagtggttgccaggggttggggagaggaggagtggaaaggtggaacacagaggatttttagggcaatgcagctactctctatgatactataatggtggatgcatttgccaaaacccacagaatatataacaccaagtgtgaaccctaatgtacactatggagaatttgggtgataatgatatgtcaatgtaggttcattgattctagaaaatgtaccagtctggtgggggatgttgatagtgagtgggcggggggctgtgcctgtgtgggaacaggctatatatgaaaactctctgtagtttctgctcagttttgttgtgaacctaaaaattctctaagaaacaaagtcaatttttaaaaatgaagtctttttttattcatttaaaacaatttcattttttggactttgaaattactgatgtaaaattatctatgtgtcttctgttcttggtttacttgctcattagttgccattcctactaacaaagtcatcatcactgaagacatcttagacattttaggtagatttcaaacaaccatccaaatcttccttctgaatcttgccataagccaaaggggaaaatagtctatggttgtctgaaactaggtacatattcccatcacggtatagcattggcctgtgatttagcttacacaaggtaaaataaacaatggctagattctgtaagaatacaaattggatgaaacatatccctgacagatgtaaacgcctctttaagatctgactgcctcaagtaaaagaatatgtcacagtggaagtattcatcacactttatcaaaaccactgcaaaattctcgtgtgagtgaagccaatctgcatttaggacaaatatttagccccagtatctgcttccctttaacttaatcataagtaatataaaatccttcagataatctgagttggtctaatactggttccttggaaaactgttcctgcatggatgaaaatttcaattatagaatgtatttgcagcatgaatagtgtgtcctccattggattggagccttgattcagacagggaccataatttattcttcttctaatccccataaatcctagaaggaagttttatacatgataggctcggtaggcttttctttttgaactgagcatgctttgttcatataggtccaatcagtgattgactttaagtagttacaatagaccttgtatagtcaggatagcagaattattctccaccactgagtatgacaggctatgagttgcatcttatttgcattcttcatgcctagtacaggccctggctcagagccaatccattcagataatgtttgctaaggaaacattagatcctggacaacactagggaccacttggactgatgcttttattttcagatgagaagataaagtctctgaggggaccatatgctcaaggcagccacacattagtgagcagccaagctagaacttctttctgccatgtgatttatctgctcctgtctacttaagaaaaattttaggaaggcctgggaaatgagagcttatgtcatgtacccagcacaggctattcaataaacacttgtttccataccctctctactttctccatgggaagagaaaacccatggcacatgatgaagcctgtcctcttcatgttttgagcaaactgaattcatgtgttaacctaaacacagcagtttgaccctttcagaagataatgatactgctgccacaacctgttaatttttactgttgtcttcagaatccttgagaagggctaatacgctagcaaatgtgaaatagtagtctcattttaagagtgaaacttgaggttctaatgggaaagtcaacaagaagagaagaagccaagattcgttcatccgacagtgcgctgtgtaccaggaataagttaggtgctgggaatacagtatttaaaaagatatggtccctgcccttgagaatctcatggtcccatgtgggatagaaacatgattaaaaagagaagaagctactcactttctgagagcatagggacaacgcctcccagaggaggtaatatttgagcatacctatgatggattaagagaaatttgctgtctaggcaaggagaattacaggaaaaaaaaataggcacaaaatagcagggtataatccaggaattgcaaatatatgaaaaggggtgttagtctgttttcattgctattaaggaatacctgagactgggttgatttataaggaaaagaagtttaatttggttcatggctctgcaggctgtacaaggagcatggtgttggcctctgcttctggtaaggcctcaggaatcttaccatgacagcagaaggtgaagagagggtgtgcataccacacggtgaaagcaggagggagagatagaaaaggggaaggttccaggctcttttaaataactagatctcacgtgaactaactgagggagaattcaacatcaggaagatgacactaaacctttcatgagggatctgcctccatgagccaacacctcccaccaggccccaactccaacactgggaattgaattccaatgtgagatttggaggggacagacattcaaaccatattgagggataagcctggacaagcaggcaggggctagatcacaaaggattcaaatgaagatgttaggagcaatctggtacaatgaggagctactgaaggatttagacaggagcgtaacatagatttgcattttagaaatgtaactggcagcaggatagagaaggaactaaagagaaacaattataacatggttctaatagtccaggggagagatggcagagagatgcaaaaggggagtgagagtgggatgtctgcgtgaagacagagactcggccattggttgatgtggaagctgcagagaggcagaaacagaggatgactcccagatttcagactttgctgaacatgccgttaaacacagaggaaacagggaaatagggaagttgacagggagctaagatatgggggagatcatgatcatgctcatgtttggatatgttaaattttaggggccctgtcacattcagacccacttgggaatggtccacatatggatgatatacacagaagatacataataattaaagtcaatcatccaggggaaatccagaactctggagaattacagtggttaaggcatgggccaaggaagggagccaggttcagggaaggtgcagtcagagatgtaggagtcgacaacaactagctgaagatggtgtcctaggaccctggaattgagatagaatgggagtggtgagaggctcctccttcacatgtttttttcattttttttcttcttctcttctcaaaacccatgctactactttgctgacactatacctgctaaccccgaggcttcagtcatacaaaaaaaaaaaaaaatagccattcttctgtgctcttataaagttttaccctgtcttttacttaaagaactccaggaactggccttaggaaaccaaacactgaaccaagtttgcagtgtcccacctcagaaaggaatgaggaacaactaatgtacagccttgttgcctccagccagacctcaaggtggcccattactcaagataaccatcgtgacctactcatcccctacccaccatgggctttgcccagcccagcccacatacctcctccgatgtcaattctctgcctaataaaaaaaatccctcccagctctttttgggaaactagctggaggatccttgggcctctgctgtctcccttgtgctcaagcacaagccttgaaataaaagcctagtctgggaaatgtgcctggtcccgcgttaattcccgtattacatggggagccgaagagcccgtggcctataacagaatgagcattaaaaaaaggagggagtaattgggtggctgtatcaaatctttaagaaagagtaagtgataaagcctaaaaacactttttggattgagcagttcatgagggcagtattaggaaaggcatggacattcttttaaaatgtctagctaagaaggagggtgatttaggttattttgaggagaaagtgaagaatttatcaccacatagtcttctctaacatgaagatgccatcaagtaatttgagaactgacaggctgttttcttccaggttccagttcaatttaacaaatgtttatggaagtcctgctcagtacaaggccatgtgacaccaagcacccacgatataccactgactaagatgccatccccactgttgagcacttggaaattggtagaaagtcccttgcatggtcagcagaccctaatggaagtaaggcggtcgtcagcagaaaatcgagctgtgcacagactgcctgggcacacaggaaaagagccagagagggatgcccagggcctgggaggatggccaggagtgcaggaacggagggaccaggaagaaggaccagagaaacgctgggcgactgtgtgccgggagggatgttaagcagcctgtgtgccctgagtattgcagggtggctgggaggtgcccgggcccagaccagcaggggcgtttgactcaagctgaaacagaagcctggagagacacccagcggccctctgcctacagatgtataggaaaacaataggactctctccttctttgtagtttagattcccatttgacatctaaactgccagactttagactggtcatgaagtctctcgtgttgatttaatgaccagtttcctgtgatacttctaatattcctgccaaaggcttgagagaaataacaaccaggggcatgatgagttcaactcttacagacaattctgattaaagcctagcagcctgaacttctcacccaggctcctatgtatgtcctagcccggcctgctggggagtgttccgggtggggccctccaagacattcaggaacctaagtcactgaggatgtgttcttaacctagggatcaaaggcaagtcagggagcagctcctcctcctcgggctgtagctgcagggcatgggaaaggtctccatgctggcggactgttggaaaatgcagattctggagagcagagatggatatactaatgccaaagagacaattctggtatgtaactccatgagggtggggcctttcaacaatcacaggccatccacagggagggtgtcgggcgcactgggggcagggggcaggaaaaagaaagaggacagtcagaagtcagaagtcagcaggtggtgtcaccgtgccactacgcagccagggaaggccacacctctgttcagcttttccctctgatgttctgccgagtggtcaggctgcagcaggaatactgacctctgttccagtccataaaccccaaaagaactgcccctggacattagttgaggtgtggaagaaaagcagttaaacattgagggctctagctatacaaagaaaattaagtatatgtatgctgtccagggacacgatatctatgtggaactgtgtgaatttcatttagcttgtgcaagaaaataaatgtaaataagctatgtgctttaatcatcaggacttcaaggaagaacataggctctcttggctattcaataaaaagtgatggccaaagtggcccgggggaaagaacttaaaacaaaaaaaaagtccaggttttcttggacctctttagtttgtggaatttcagaccaattttatattcacatgtgcttgtattggaaaattgagtggggtgtccttagctttttattgtaactgtttacaataattgcatcagatccagataatttttctagtgagaactggtccagcttcaagtgagggtcatgactagcgatttctgagagagggtcaagaactgaaggctgagcaaagcagccgcgcgggaaccggctgctcaggagcccacccctcactcacactgaggcttctttccttccccttcccctggggcttctttccttggggcttcttttcacttggggcttctttccttccccttcccctgcctgcccgtagagaggattccccggcatccactcttagtcctctcctcactgtcccagctgtccctgagtgacctcatgcactctcagggccttcctcctcacatgctggtgacttcacatctccatccccagctccgggccgggcaccctactgaacactggacattggcacctcacccacccaacacctcagcccaccctatcttccctcctgactcgctcctccttcatggttgttccccacctcagggaagggtatctctgccacccagctgctcaaaccaggaggactcagctcaccctcaattctgaacaacacctgttattcataggctgttatgaaaattaagtgagatcaatgtaaagagcttagcacacaacttcatgcataatgaacactcactaaatgttagccattagcatctgcaaggcaaggcattttttaaaacattgctaatgtttttaataatgcaatacaaacacctgaaatatacatagagaagtgaataacaagaatataaagtctctctcttcccctcaatctcctccctgattttgtatcttcttacacattcttcctgaaagcttaggcatataaaagtcatcctgagtacctggttgaaaaagatcacaaaagaggccattaaaaatatatataaaatcattttttatacaaaataatatatactagcaaaatcccctatctttgaacctattatgtctgttcctgactatacctcaagcctgtccccaaactctatagactagtgaggcagacagctagccagagaacagacatgattacttgcaggaagctaaaagcaatacaaatagggccaaacaggttagtgcaagaacccacttcctagtggaaaggaatggttacaacaggctgtaccaataaagacaggcagcagccatcctgctttaggcacagataagaatgtaacaaagaagaaactggccacaacagggtaaatgcaagatatacatgctacagttaattagtatatatttaaaaacacaaattatgcaaatgaatgactgccaaaccttggctgcattacgcccccattaccataaaatttccatgggtaagggcatcccactcctatcacgcagctaacgccatggcggttctggattaacaatacttagtcaataaaagggtggcattccaattccgaaaactgcccatcaatttcctggaaaacccattcccttagtatagaatattccaagccttcattatacctattcatctagttcgtgagccctggccatgttgggcacggctccttcttttgagcgtgtccctgttcctctcttgagtgtgttcttgcttttgctctacaataaatctgctacattttcactttggtcttgctttcaaattcttttgtgtggcaaagacaagaacctgaaatggctccactggcaacactaagattgcagtggggttcatagagtggggtggggaagggggaagatggcttttctgcacattaatttagtttttttaaaaaaactaaaagttcaaacaagcccatccaaatgtcatgtgttcttgtctgggtaattcctactaccatttattagctgttagtgggcacattcttttacccctctgtttctcagtttcctcctctgtaaagggggaatgatgttaacagcccatctttacagtcaagaatgctgaagagcttaaaacagacaggagcctatcttacagtgttaccatgagaatttaatgagtaaatatttgcaatatacttaaatgcagtgcctggtatataataagcactttgtaagtgttttaaagaaataaaataatgatttattgggatctgtatttatttatagactcaagattttaaaggtggaagtgactgtggtgatcatgtaaccctcatatccttctcccaatgacttgcccaagaaatcagttaattgtcacttattatttattataggacataataatttgaaatgtaatactgtacattttctgtgataaatattctaaaaggaaaaatatttaaaatatcaatattcataaagactttaattatttaatattattaatgttattcaacatactcgaatcaagtatgggcctttgtatgtgtagataaattgtagataccatttttgtcaacactaccttccaatccccacccctgccccatgtgaaaatcattatttattatccttttaaatactaagggcaatgatacgtatactgtataatcctaaccgattccttagctctatcaaacaaggtgaatgcccttgttttgcatgtgctataattaattagtatttattaaaaaacacaaattatgcaaatggcttactggcctaacattaaattggaaattcagagatggccaggcatggttgctcacgcctgtaatcctagcattttgtgaggccgagttgggtgaatcacttgaggtcacgagtttgaaaccagcctggccaacatggagaaaccccatcgctaataaaaatacaaaaaatgtagctgggcgtggtggttggtgcctgtaatcccagatagttgggaggctgaggcagtagaattgcttgaacttgtgaggtggaggttgtagtgagctgagattgcaccactgcactccagcctgggtgacagagtgagactctgcctaaaaacaaacaaacaaagaaagaaattcagagatcatcttgagcatcggggctgtatgtcagcagcctgagcaaatactgcaaaccaaaatgcaaatttaacatagtacttctccttcaaaatagttcattcaggagctttggtttactgcaatttgtcctaaaggttacaaactctgtaaactattttaacaccttggctatccctacattctgataaagttacagtttcaatgagctcacctaggtacttagatttccaagtagcttctcatgacttacaggagaaaataattttcaattaagaattcaataaaaaacatcagaatacaattacaattgtggttgttacattaataaaaagtgcactttcctgacttgcagggacaaacatttatggagtgtctactatgcagccttgctgaagcaacagagagacatggttgtcattctggaggtcacaccttctgcaaagacagcaaatgtgtctagtttctggggcctaaaatgagagctagagagaaagagagagagagagagagagcaagagaaagctacacatttacatattcagagcctcagagccaggccttggtcctccctgccagacatatccttagtacaatacatatttccaaaccaatcaaaaaaggtaacactgcttaacaactcaagagtaaattgggacctagggcattcactatctatctactcaggagagatgcttgcagaataccaaaggtgagtggaattcttgtcatggctaacacttgcgggagctctttgactctcccatcttcatctgcctacctggcagaagctgcctgccctccggctgtgattcggtttatgatctgcactagctcagcatttcaaatacatacatgaaatgtagagcccacaaagctttaaaaataaaacaagagaccagctccatctctgtgtctttggtgcacaaggaagaaaacaaagaaaatcacaaccccttactgctgtcttggcatccatcatgacttaccataggagtggctgagggtctaattaaccactcatcaatctcaaagttttaaaagtgctgccgttccccgcggactggagatcttccttctgcctgctttctgcttttgcaaagctggaaatctgtgtcttggtggatctcaagaggaagggaaagaaactccacacttctttgtagccaagccacctccatctgtctacctcctctgcttcttcctttgatccaccccgggtatgactactcctttggcctctgttctacacacagctcctacgccctgagaatctcagttcgcacacctccagccaaatgtttttcttgcttcgtaatatttttggagacatagctgccataagaattattccagttataacaacttcctgccactctaaccatttttatacaagccgggcccttatcaggagcactgtggtgtctagtattgcagccttattccacggtgatgtggtaatgcctttgggggtatgtatggacgaatcctgctacgggctatatcatgacaggtcatgtgctctacaagagaagacttcctgatttttctggacgacactagtattattatcctgaactttatatctctgaatgatttcacatgaattgtacttgctcatccctatgatatgtctggaagatgctttctgttgttaaagcatagactttgatggaaaagcccataacgtagtcaaggcatctcagatcacatgcagcagcaagtggataaggattcaacacccacatgtttgagagtcaaagcttggcccgctaagccacctatatcatcctgtaaatagaactgcataatcagagacaatctttgtccttgcaatcctgattttaaaatatgcaatagaatttttattcttggtttaaaatgtattttttccttaacattttagacttaaaatcttcaggaaactactacaaagctactagaactcatgagtgagttttagaaagattgcaggatacaaagacaatatacaaatttgtatactagcaatgggcaactgaagacaaacattaaaacactgtgtcatttacagtaacaccacaaacatgaaattcttagatactatcaatgtgaaccactcatatgcttaaaactacaagcactcttgaaaaaatcaaaggagacctaaatagagacatatactgtgtttattaacacaaagactaaatattgttgagatatcaattctgaacaaactgatacagagattccacaaatccaaatcaaaactcctttaggatttttaaaataaatatcaataaactgtttgtaaaatgtatatggaaagtcagaggcactagaatagccaaagcagacaaagaagaacaaagttaaagaactcagaatattgcattccaggacttacctaagtaatcaagacagtgtcacattgatgaaagaacagacacatagataaatgggggcagaatagagagtctagaaatagacttatacatacatggtcaaaggtaattcagtaaagacagtatagtcttttcaatattgatctgaaatgattggacattgatatacaaaaagtaaatcttgactcacaccttgttctttctataaaaatgaactaaaaatggatcataggtctaaatataaaacacaaacctatgaaacttccagaagaaaacatagggtaaatagttgtgaccctatgttaggcaaatatttcttagatatgacattaaaagcataaataaaaataggtaaaactggacttcagaaaaattaaaaacttttgttctgtgaaagacactgttaagagactgaaaatgcaagctacagcctggcagaaaatatttacaaaacacatttctgacaaaggactcatatctaggacatatccaaactctcaaaactcaacaataagaaaaacaatacagttaaaaatggtcaaaagagttgaatagatattttataaaagaagacgtatggatggtaaataagcacatattcaacattattagtcattaagaaagtgcaaatgagttaataccagacatctattaaaatgtctaaaagcaaaacaaaaactgacaatactaagtactaacaaagatgtggagcagtaaggactctcatacattgtcaatggcagtacaagataatatttcactttggaaaaatttggtggttaattataaagttaaaataaacttatcatatagagcccacgatcccattcctaggattttacatcaaagaaatgaaaacttaaatgctcatacaaaaacttgaatatgaatgtttagagtgggtttataatcacccaaactggcaacaaccaaatgttcttcaactggctaatggataaacaaccgtaggacatccatacaatgcaagactattcagaaatagaaagcaatgaactattaaaacacatagcaacataaatgaatttttattattttataacaagtgaaagaagccatactaaaaaggctacatgctgtttgatttcatttgtatgatattttagcaaaactataggtacaaaaaacaaatcagtggtttgctagagtttgggagtaggagtagaagctgctaacaagaggaatagggaaattttgggagtgaggaaactgttttatatctttttttttttttgagacagagtcctgctctattacctaggctggagtgcagtggcacaaccttggctcactgcaacctctgcctcttgggctcaagtgatcctcccatctcagcttcccaagtagctggaactacagatgtgtgccaccatgcccagctaatttttgtatttttggtaggaatggtgtctcactgtgttgcccaggctggtctcaaactcctgggcccaagacatccacccacctcagcctcccaaagtgctgggattacaggcatgagccacaacacctggtctgctctatatgttgagtgtggtggtggttataacaacttggaggcatttgtcaaagctcaaagacctattcactgaaaatagtcaattttactttatatatatatgtattagtccattttcacactgctgataaagacatacccgagactgggaagaaaaagaggtttaattggacgtagtccagttccacatgtgtgggaaggcctcaggatcatggtgggaggataaaggcccttcttacatggtggtgacaagagaaaatgaggaagatgcaaaagcggaaacccctgataaaaccttcagatcttgtgagacttatacactaccacaagaacagtatgggggaaactgccccccatgattcaaattatctcccaccgggtccctcctataacatgtggcaattatgggaatacaattcaagatgagatttgggtggggacacagccaaaccatatcattccacctcttgctcctccaaatctcatgtcctcacatttcaaaaccagtcatgccttcccaacagtcccccaaagtcttaactcatttcagcattaacccaaaagtccatagtccaaagtctcatatgagacaaggcaagccccttctgcctacgacacagggcaccaagtgcctaggctgcaaacagataaggaccctgggcctggcccatgaaaccagtttttcctcctagacttccaggtctatgataggagggactgctgtgaagacctatgacatgtcctggagacattttccccattgtcttggggattaccatttggctccttgacacttatgcaaatttcttcagccagcttgaatttctcctcagaaaatgtgtttttcttttctactgcatcgtcaggctgcaaattttctgaacttttatgctctgtttcctttttaaaatggaatgcctttaacagcacccaagtcacctcttgaatgctctgtttgctgcttagaaatttcttctgccagataccctaaatcatcctttcaagggcaggggcaaaatgccaccagtctctttgctaaaacataacaagagtcacctttgctcctgttcccaagaagttcctcatgtccatctgagacaacctcaacctggactttattattcatatcactatcagcatttttttttttcaaagccaatcaacaagtttctaggaggttccaaactttcccacattttcctgtcttcttctgagccttccacactctttcaacttctgcctgatacccagttccaaagttgtttccacattttcaggtatcttttcagaaacaccccactctcggtaccaatttattgtattagtccattttcacactgctgataaagacatacccaagactgggaagaaaaagaggtttaattggacttacagttccacatggctggggaggcctcagaatcatggcgggaggcaaaaggcccttcttacatggtggtggcaagagaaaatgaggaagatgcaaaagcagaaagatctgataaaaccatcagatctcatgagacatattcactaccatgagaacagtatggaggaaaccgccctcatgattcaaattatctctcactgggtccctcccataacatgtgggaattatgggaatacaattcaagataagatttgggtggggacacagagccaaaccatatcaataatgttatacctcagctgggctcggtggctcacacctgtaatcccagcactttgggaggctgaggtgagcagatcacttgaggccaggaggagtttcagaccagcctggccaacatggtgaaaccccatctctgctaaaaataccaaaattagccaggtgtggtggcatatgcctgtagtcccagctactctagaggctgtggcaggagaatcatttgaacccaggaggtaaagcttgcagtgaactgagattgcaccactgtgctccagcctgggcgacagagcaagactctgtctcaaaaaaaaaaaaaaaaatatatatatatatatataaaacatatatatataacatatatatatataaaacatatatatataacatatatataaaacatatatatatataacatatatataaaacatatatataacatatataaaacatatatatataacatatatatataacatatatatatgttatacctcaacttaatgaaaacatttcaaaaattcaatgggaaaaaataatatataatttttcaaatattaaaaaaagccaactagcaaaaaaatatgtggttaaaactgagagataaaactcaggacgaagtgctggctacatggctctgagtggagtgaatgcttatgaggaggaatctgctcctgcttgctgtgtaccttagacatgcagaagaggaaacactgtctttccaattcattacctttacagaatcacaaccaaatcatccattcacttcataagctctcataaatgtcattttgagtttgtttgttttctcgtccaaataacttagtcctgtcatttatgatttgaggagttctttgctcttccacccatgtaagcaagcccatagtattattttcttgaacattcagagatcatttcttaacacaaacctattttctcttcatatagaaaacacagagtgactggtttgtgacacaaaaatatattatgtatatacgtgtctgaagattcagcaagcctaggattaggtaatttacacactatttaatgtgcgttgatcgctcctgtcttcataagttttgctaatcattactttccctttaaactactaccttatttatgtcaaatgcagaatatactagaaagaacattggatttagcattaggaatactgggttttaaggtcattttggccctaaactagctgtatggccttggtaaaatgactcatctcccataactaatccttatcttcagctctgacctctcttcagggctttaattatgaaacttcaaattcctacagacacaccacctctcaggcagcatttaattcttcaggaatatagcttttcctggatcttttattattacccaaattataattgttatttgctcaggtattcacacctcatttcttcaactgagtttcttcaacaagataatacgttgttttaaggggaagaaattatccatatatacatctttgtctccttacactatctatcacaaactaatagcttaaataggccagtttggtgctacaattacttgagttcatacacacgagtttgaggagataatcacttgactttgcaaaaaatacagccaagtttgacacactcgtagtttttcagagccttccctcaccacacatgctgagcctgctcatgcttcttccctctactgacccatccacacccccaatcactgtctacatccccatgttgttttagcttgaccatagcatttatactctctgaaataaactttccccctccttctttctttttctcactctcactctctctctcttctttctctgtcattttcctaatctagtgtccaaaggcccctgctaggatttaagctccatgaaaacacaaactgatcatgctcattaacagtagtacatttagaacctgcacctgggtcaggcacatggtaggcactcagtgaatacttgccgaatagctgagctcgcccttcagtatagtgatgcctgttgcagactgaacagtggaaagaaacaaaaatacttcacatggtttacctgcaaagaggttctacaaggtccttttcaagaaaatcatgatcattcttgacagccacaatgttgatgggaaattgtgaatctgagagagaaagacaaagaagttgatgtactttgttttatctgaatgagcaccaacatattcagaccttcaaggtctgtaaaagccactgattttaatagcagtgactgcccatcatcattgttgggaatgtttaagagagcaaaaaattgctatcactgtaaatgcttttaggagtacaatataagtgcgaaatatgaggatagtcaagtgcttgaccttggataggattgaacactaagtgcctgcatttttctagctcatccttattacagtcttaggtggatgtggcctcagagaagagcttttgtgctttcaccatccacctaacacgtaggtcactggcgtctatcttgatggtttcacgaaatacttaatttggcagatttttttccttcaaaaaggaaatttccaaaaatacccaaagttctatcatctgaaattttttttagtagcaaaatctttatcactctggagtatcagcaaaatactcaaattgattctatccaaaaagaataattcgaacactacttccctccaacagacaattcatgccagctttgaaggtcacaggcaatatttagaacatggtgtgaattctgggtacctcgttcatggaggtagcaatctgcagctcattggaatagaggacatagccaaatgtaaccatgctgggtcactatcattgacttgccactttttcctttatctcatcttgtattttgtgctgtctacaccttgccagtcatgataaatctaagggtatctaaattttagcatgagttggaaacagacataattccccttctggtgaaaaaaaatcatgtgagtgacttacagatggttccagagtgaagctgtcttgctcggctagtgagggagggagggagacacttgtgattttttttcatggaaggctgcctcttgccagctgtgctccttcctagggtctggtttgaggctcctctctcctcctgggctctggcactctcttccttggcctgtccctttgggctcatggtagtgacagctgtgccactacaagccctgggctcttgcactgtgcaccgttcctcgtggccaccccctgtcctgcctgcacctttgcaatgagcactgttagaaacaaatcctctgtaaatggccttgagcctgccacctgctcattgttggggtcctgactagttcattactagataaggacaatccgagaagaagttaaaagctttggttataactttagatataagggacatgagtatgtctattaactgtcaattaaagaatcaatgaaaaggctgggtggtggctcacgcctgtaatctcagcacttagggaggccgaggtgggaaagtcacttgaggtcaggagttcgagaccagcctgacccacgtggtgaaaccctgtctctactaaaaatacaaaaattggccaggtgtggtggtgcccgcctgtaatctcaactacttgggaggctgaggcaggaaattgcttgaacccaggaggcggaggttgcagcgagtggagattgtaccactgcactccagcctgggtggcagagccagactctatctcaaaaaaaaacaaaaaaaaaaccaaaaaaaaatcaatgaaaggaagtgtaatgctagcaataagacaccttacctaaaactcggaagaataacatctgattcatgttatatcttgacatttttcatataaagtaaacagaattaaacagaaatttcaggataattaattttgtgacttctaggaagttttttaacagtgagttcattgtgatttcaagaaaagtgagagtagtaaaggaaaaacaaggagaaaaagaaggaagtgcagaaaagctgctgatggcagaatgctggaaggaaaacgtcgagttggggtttgcggtaaagagatgggaattagtagtgggaagcagaaagtaaagtgggcctgggaagtgatattcatttctaaattggtatcaggataacccctgggcatagcaaaaaggccgagggaaaaagaaagcgaagcaaaatgggcgagaaaaaaaaatctggaagtcaaaacacaccacaggatacgtgtggttcattttggatttattctctgtgtaagagcgaagcgaagggctgacgtaccctcatataactgagcgtattgcgggaacccggcagcacggagccagtcacatgcttcttttgcctcaatttctgaaaaacacaagagagataaaattgtgagtcccacagccgcaccctagtactctgccttcttaatcatggagacactggtgagctttgtgcaagttattacaaagcaaaattgttccaggtaagtctgcataagtaggcttacccgggagtgggtggaaaacgagcgggtaatacaaaggtccttgttatgtgtctgctaagataatcttcaatgtagatccataagtatgtggataataacaaaaccacagatcatagaagacaaaggctgaatttcaggcagggaaaaatgtcttatttatacaccagggaaccagggcactaggggaaaagagggcattcttctttacaattctttttttttttaatggaattttttttttaagttccaaagattaggctaaaaatgtttattcaacattccttcattctttcactcttgggataactttaagaaagactacaactagattgcctatgaaaatgtattttctcatgaaaaaaagctaaaatccagtgtattattgttttaaaaatttcactaatagccttaattccccatgcattataacaaaatgttcattaatcaagcacattggaatgatttcaagctgtagagtgcggcatagaagaggaaagttgattatttggaattgagacttgagtttgatgagcctgccagaacctctgagggccaagcccaagaggttgatatgtcccttgggtgaccatttttggtgtggatgcaccaacagcccaccggaccacctgcctggggaagctgtggagtgagataggaggagtctacagtatgtgaaccaggtcactttttgaccttgtgaatcctggatcatttcccaaccacaactctgttagacaaatatgaatccaaggggaaagaagttcatctgttgaaagtccagtctctccaaacaaaattaaacagcctattatcacaagtctttaccaaggccctttcctccgctgttaggatgggtccctgtcaggtcattgtatttccatttactatgatgctaatttttccccatagccaaagctggagtgtacagggcgttcttgggatcactgcacagaaatgatctacactaacatcaccctgggcctgcgattgtacctcaacattgaaagctcagtgtctgtgcagtaagatgtttgatgtgccagagctatttggtatatgttaggaaaatagaccaaaggccagatcttactcaggcatcaccaggaagagcaaaaccctaccgcctagttccacagatctggttaaatctagattgaactttgtcattaaatccaaggaaacagagcctgtggtggctcctgccccggaacgcctgcctcttctgtcatcccctaatctactgttactccagggactgatgatttcaaaagcttgagatttgtctcttgtgtgagggttttccacttaagtgtgaccagcatgttcctaccatgtacccattcctgccatggacacatggttcagaaacatccagggaaccaagctggaaagaaaagctattgaaagcatttctatcagaaaaggagtctctgagttccacaactgctgttcaaaacacagcttagctgaattgtgctgcctgggctaacttgggctttcctctgggaaggtacaaaaggcaattattgcattgctcaaaagttctatttagtacccagttgagagtctgtatttgaaggttcctactttgataaccacacaagtatttcagaggaaataggaaaacatacattccatctgtaacgtgtggaaaatgtggtgagttgctcctgagtcatggataaagtgctgcctaatagattttcaagctcagatttgcttcccgctcccatataatacagcggatagtaacgagaaaacacctaatttctagacatgctctaaacctaattatgagtcagcaagtcttggagagaagcacagaatattatattttctcttggcattacatgaatcctatgcctttttctgttttattattacctttactacaatgaaaatgtagtgttcagcaagacagtcccagagagccaggccatgaagaacaaatggggaagacccacaagacaggggctctgcagcctagaaagctcaaagacagagagtgggaagtgacctatgaaagagttcgcacccctccagcccagggaatgtggtgagctcagatcctgaagatgaaaaggataacatggtggagaagaagtgggcagccaggaatccttctagaaaactccctttggaacatcacgtgttttcactaatttgtgggatctaaaaatcaaaataattgaactcatggacatagagattagaaggatggttaccagaggctgaggagggtagtgggggctggaggagaggtggggatcattaatgggtacaaaaaaaaattagaaagaatgaataagacctactatttgatagcacaacagggtaactacagtcaataacaacttatttgtacatttttaaataactaaaagagtataattggattgtttgtaacacaaagaataaatgcccgaggggatgaataccctattctccatgatgtaatgagttcatattgcacacctgtatcaaaatatctcatgtaccccataaatatatacatacgcttactatgtccccacaaaaatgaaaaatttaaaaattttgaaaacaacactccttttggaacttaaaattctggttggacagtgcaatggggctgaagctagccagggaaattttatttaaaaggctcctcagataatagctgcatttcattttttatgacagcaacatggataacgaactgaaatcctattcagatacatacatgaataaccaaattttaaccagaacccagataaatcaatcattcaaataagatgattttttttgtttgctttaatgggcaggcacttaaacttttagacctcaggcttaaatgacaacaaaactgcaatgagtaaatatcataaattagaagcagccctgtcctagccatggcaggtgactcctcgtgtagcatcatttcctatacccaacttgccattctatttgcccaaatgtctctcaaacacacaccctcatttcatattcccccaccctagctgcagtcccaacatcttgatacctcaatttaaggacaaagccaactctcatttaccagctagtgacaaaacaagcaaaataatctggcataattaacccctatcaaatctgagtttgcccatccaattgaggggggaagggtaaaaaagtcttacaatttttattaattcttcatggcccctactaataccaatcagccaaatactaatgcttttccccaggcccttccactggccaaaatgactggagaactaaaaaggaatcattattgccagtgccatcatttcacaaagatctacctaatgagatttaaatgacatttgaggagaaaagtgtgaaaaactcttttttattgttctcttgctagccagcataatattatgtaaaagcattaagagctattaaaatcacattttgacagttttatttgttctccatttgctacccttacccacccctgtagcagctccagggctgcaaggcaaagcctcagctcactgtagctgtctcatggaaaacctgagtgtggagtgaaaccagagagtggacctggacagaagggcccaccaatctctacggaggttactgtgctgctttgctggtgaaaatccaatccattcagcttggtattatgaaaagatttctatgtaatttttgtaactattctatgtaataattatttcattttgctctctggcaggtatctatttttgtctgtccaacatccttccctacgtattctgataacggaacctctttctgcaaggagcctcttctacatggtttatgtagggctgacgcctcttgcctccaagcacactccctagccctatcaccaccacccacataaggtgacctgattcttaagagcaccccatccctgttagtctaaggagaccaatagtcatttgggggctgaaatcaactggttgaaaagggagatatccagtgtttccactggtagcctggtctagcaaacattttcactgttttactcagtaagttcagtggttggtgtggtgctacccgtgctattcagccatatatctgcgattccacttaaggcaaagtcactggctttgcctcagttgccttacacatgctttgagcatgatgtgaccactatcctcagacagacccagcagagggaagctcttgctagcacctggggaggcacccactaccatgggcatgagaacaaaggcaccgtggaaacaaaccatggccgatgtgggttttcacatgaacatattatcatgtttcttaattatacatgcccagtgttgaaaacttcctaatagagaaagtcacaatgaatgaaaaaagtcaactcttgccccattatgaacacctaactttatatatgttatctgtcaaaacagtactatgctaatatctttggttgactgcttttttcacttaagaatacattgcgaatattttcttatataatgatcttatttgtaaaaaaaatgggaaatttactttgtttcgagaatgatgcttattttttaaatatttgatttttgaatactgccaattgcatttccctgtaggaagattataacatcaaggtagccaagagaaaagagttcaataggacctcaccagtgtagactgacggtggagaaggctggaagtctatgggagttaaaagagatttacaagctgtttctttaatgtagtctcttagctacagacagtctgtggacaaggctctgtaggacctcaggcaagtcaggaaacatagtgagcacagcaaatttgctgcccaggtttgcaggcctcatctcacattacaacctcattgtatttttaagctggtgtgtctagcgtgcttctagcatgcttgggaacagtgtgttctcttggctaagcattttaagtatgtacattttgttttacgtttttctcagcatagcaaatactttttcaatagctcactgaaaggtattgggtatcctttctaaatgaccaaaaattcaaatgaggcccaaattaaaatttattattatcagacatgtagctggctagaaagaatctgttctattgtggaaagtttatgaaatcattacatacgagcacatgtatttatgttgttcctacaaatctccttgaatttctatggacaaactggctccaatttaaataggtcttcttttttaaatgttcgttaaaagtacttaagagaagtaaggaaaagaaagagtgtgatcgtcatgggatttaagaaaaagtaggcttgagtagagtgttttgtcttttcctttaaactggcctatttggtgggcaccctgtttctaaaagactacgggtaccagcatagcaggatgactcagccaccacaagatgcctgcagtggatgaaattatcactattaaagtatatcaaaggtgttaacatttcaacgggcttgtggttgctggcttaggataatttatatggctaaggtagcttcattagtaactttactacttcaggagaatgactcctttgtcttcagacagaatttctctagtgaagtccgtatttattgaaggtgtatttctttggccatacattaagccagttttgttaaaatcaatgccagggtatccatcccatctatatatggataccaatgatgcaatcattaatattacatagaaccatacgctaccaccataatcctgccaggagggctttataaccttagtgacagatacaggaaggaatgtcagatttttagtagtaacagactttgatttacatcccatggtatggcatcaggatatatctttttgcacttttaaaattatatgttaagttattttgatatgtaaaagaccttaattgtataccaaatataattttttcctaatattcataacattttctttccatgattttctaagttactaagaggaactaaaatacaggttatttggaatgaatttgggattattaatcactgaatattcaaaatagtggatcaacttataaacacccactttatctatccataatttgaggcaatcttttccttgatgtgcaataaaatatctgactgtcagcaagtatacagcaataggaagaggaaacctggaagacccgtatagagtgatcacgcttacctgtactcagtcaagacagagactctcagctctgtttatgtggacttctttcccaaacgcaagaatgagagatgtgttgagacataaaattccttcaccaattctacacataagccttgtttcctaggccttgaaatatcttctggaagctggattcatagcaaatctagtcacttaattcctattagagtaaaagaagatcgagcaaattctccagctaagtagagaataaacctaagcaggtttattcctcgtcactcaagggttatttttaatcagtctttttcagcctggttggggaaaccatagatattacgacatatgacatatacgtaaacaaatacgttacacatatttactgttaatttttaattagccttaaatatataattaacatatatatatactatatagtcacacacacttatgcatttttttttctttgtatgcccacagtgacgccctgccctttccagctgccatgtgcagttctcctgcaactaggaggcatacccttcccacctcactaatgttatgcttggccatatgacccactttggccaattaaatgtgaacagatgtgacctgtgctagtttcagaaaaacatctcaagagccatcccctaacccaaccacctttcctgctcttttccctttaccatgaggctaagagatattccttcagcctaggtattggaatgatgacactggggacagagaaacagcagaccagctgctgacatgtaatataagcaataaatacacttgttttatgccactacaacttgaggggcaatttgttcaagtggcataatctagcgtaagctaatgtaacacagctgccagctattcactctatagatgaggcatatggaaggcactatggacctttatctcaagcggaaactgttgttgcatgtctgttagtgtggtgtagagatgaacatagtctcagtaatcatttctgctccgaattctgcttctctgcctagagtgcatgatctatatgaattccaaaaaatgttgtaaacaatcctcacatgcatccatgtgtgtgaatgtgtgctcatatacacatttgcaccacagaaaatcaaaagctccgttgcaagtgaatgaggaaactcatcagaaatatattttccatgcctgtattcccaatagtatttaaaaagaaaaaaatgtttacaatccccaaaccccagtcaatctgagagaaaaagaaagcagaaaatagatgctctcccagccaaatagtttctgaccagattgttttgactcaagttttccatgaagcagagtagttctttattctcctctttcatttgatacagattgttccaatcaggcgcttgtggtatttctcagggaggctgcatgcatacatccccagctttttgaagttgtggagccactgcctaccactaaatcccaagagattcttcaagatggagtcagtcaagcaactgaaatgcaaggcagggaacacagagttgaccagacaattagatagagcatcataatttgcaagcattggccaaaacacctccatgttgaaccaccaagccagtagagtcttcagtaacccttcttgggacaagtgcatgagattctgcagattgtctctccctctctaattcagtttctccagcttctgtaggaaaggtggtgaacaagagtccaggttgctgtcttgatattggctctcagagccgagctccaacttccacaaaattggccaaatgaccagtatcagaagggcctgtgggtactcactctgtgtcatgctgatgatttcttgcctggggaagagcaactgctttggacaaatcccaccaccactaggaagtcagatttcttagcttttgacaggtactcttccatcctacattgctttaagatttttcttttttaaatgttaaaaaaatgcgtgtttttagggatgcaaactcctcctgtatcttttcagacatttctgaatgtctatgcttgtaagaggttatctgctgtttgatttgctcaactcttttttagctcttggtactccaattacccaagaagatttcatgatagcaggggaaaaccttgccatgtaggtgaaagaaggagcacagattctgttaggataaagtcactccaatacttctgcaggcccttttcaattcctttgctccttttggggttgacatggcaagatagatacagcttggctgaagcttctgactccctctgcaaggctttctgcatgtaacttctcagcaactgtcatatctggatcaatcaaaactagttcttgcttaatttaattccaggaaaagatttccacagctcaagtataatcctattatctgagtatacatgaaaacttgatattgtatgtattttcttaaaaaattccttggcactggctcagagtgtaaataaaatatttactaggatttttcaacgtgtctttgccagttttctggaaccctttctacttgtctgctgaacgtaggcaacagcattggcagtatgaatgattttctaaacatgcatcactcattccaggaataaagattacattcaagaaatgaaattgttactaggtttacagctatcgatagattcatttttccctatgctcttcaaggtcaaagatactgctgagcttaaaagtctgctctctaagggatttttatttgcagtttgttaatagatattgacattatatattccttatagaaggaaatttaaaatgagttcaggtatttgaaatagctttacttgatttgggatggaagagatgaagttctccactgaagacttaagaaacttaattcctatgctgcaactcccttttgtcatcaggcacagtgatgcatcaatgacttgtatcatgctacaatctaaacacacggcatactcagattaaagttaattgaggcatcccataaacatgccacaaatgtaatccaaaaggttaagaaagttacatcaactataaaaatgttttaaaagtttaatataatagaagtttacaaattctggaatatttaaaattgtatagcagataacttcaaattttaaagaactctttgggcctttataattatcgtcacaaaatcttaattgaggatcttcacatttgatgtttaaaaacaaagtaggaaacagcagaagtacatgctatgtaaagatacatctatttctaaatggaggtccaggtggctaccttgtctaatatgaatagaatttaattccctggctagctttgaggaatatgacaacttttactaataaagtcagtatgacggtcttggctaatctgcctgccaaatactcactgaattcaggtataaaaagatcattttctgtaagaatagatttgaataagagataaaagtggcttaaaattcctaaatgaaatctgattgtaagagtagcaaaatctaaacctaagatttgaaaaacttacacacacacagtcaaatcaaggcaaatgtacgaatagaaggaaaaaacacaaaccaaatcagccatttaaaaatgcaaccaatcctttcatgactaaagtaccagcaaatgggctctattgtaagattttggtgatgctagttacacaattctggcatactgcaaggctggcaaatccgtcaaagtcaactcaaggaccagctgagctggggatatcactggattttagcagcattcatgtcaagccatgtgataaacaagaaggctgtcaaatgaaggcactatgcttattatttgaaaatcaaataaatgatttcaattttctgttactaagcaaaaatataagcaaaaagaaaacgaaagtaatggaggaagggaggaaggagggagaaagggagggaggaaggaaggaaaaaaggaaggaaggaaggaaaggaaggaaggaaggaaggaaggaaggaaggaaaggaaggaaggaaggaaggaaggaaggaaggaaggaaggaaaggaaggaaggaaggaaggaaggaaggaaggaaaggaaggaaggaaggaaggaaggaaggaaggaaaggaaggaaggaaggaaggaaggaaggaaggaaggaaggaaggaaaggaaggaaggaaggaaggaaggaaggaaggaaaggaaggaaggaaggaaggaaggaaaggaaggaaggaaggaaggaaggaaggaaggaaggaaggaagatattgccataattctaccacctagagattgatcaatattttgttggcataacgtctcttgttcttttattatgaagatgtgttcatgtatctaggctaagtatactatctattttacataatctttaaataaaattggaatctgcttttgcactcgacaatgcattttgaacatctttttatgtcaacagatgtccttctcaaacattctaggtggcttgaataacatttctactgacattactttaaaaagtatcttctttcatcaattcaggctgccataatcatgggttaaaaataataaatccagttctttggaggctttcattctaaataaagaatttcaccagaacgtgcatcctggtgaacgtatttcagggactacttctgggttgacatttctcatgttatttcacattctggattaagacacatctcatatggttttgatttatattctcagcagacttcaaaaaggaaattccaaatggaagtttattcatgtaccagaactgtgtttaaatgatgctacagggatatcttaaactaacaggagccaggaaattcaaaactaaggtcctggaccgtattcccacctcttccttcttgaatgtcttaggtatctggaaagtggagattttatgtaacagctgtttcacttgtctttgaccttctgcatatgtatttagacaatttcaaagatatattttactttatgtaataacttggtatttcctggttgctgaagtttcaaggttgtactcaaaaaacaaaacaaactagaccaaataaagaaaatctccacatcttgttttaatgactaaatgaatatctggagtctatgtgactcccaaaattcttcaaataatcaaaagcaaaacatgatccaaatttgtaaaactagcaaatttaccaaaagagcaactctttaaggcaagactacttttgtacagggttcatgttattgctttaaagagagtttacaatgaagatacattctaatttcattttgttcttaaccaatggcatatctgtttctggaataaagctcaagtttctactcttattgaatacatatacttagttttacagattaactttttaaaaagaacctgtcaatgtttttagaaaatactcctttatttgagggcataattgaaccagatgggcacaagaggggtaaatacggcatcaagcagttagaagtgagtccaaaattctggatacacctctcattacctgtgtgaccctgggtaggttaattctagcatacctcagtttcttcatctatagaatgggaataaacaggagtacctacctcagagggttgccgtaaagattaaatgattgcatttctgtaaagtacctggagcacagcatttgctactattactagggcagaggtgcttatgttactttcccatattagaagatagtggttctgatggatggtctctgcttctcttctctcagctctcttcatttggtatgcagaagtggaaggcatttgtctttacttatttattcaacagacacctgctgggtgcccctgttgtgaaagcctgctggtaggtgctgaaggtgaatgcaaggctgtgggcagtgggtcctaccctgtaggtctctaaaccaagcagggatagacaaagacccatccaggcactaccacaaccaaagaaagcaaaagccctgcagaacaggacactatcctccgggtctcagagcaggagggggcattttggataagatgaccaggaaaagccttgcagttgaggtgagattcagaagaaggcagaagaaggttagccacatggttctgccataaacaacccatcttcttcccccagatgaattaggagctgagattcgtgtgaactcactgccttcttggaagtagaatctcatgctcctccctctgtgcctgcaggaggtccttggggtcacatggcacccatcaacctgcctggagattcttacacgacaagtatctaacatgcaattcattttttgcagtccacagaatgtttcatgatactctttctggtaaatgaagctgtatctcaggaagccatgcttcacacaatgcagtgctctttaacaagatgtaatgagagtcataaatgagatgtgacactttggatatgtgacatttggacacattcagaaatatgacaccttaggataatggcagtaagagccttctcctaagaggctgttacttttaggatataaacaccaggctggggaagacagtattgcgattatggtttacaacgtgcttaccagttaataagtaaaatattagcaatcacatgcctgatatgcggggatctcaagggcaaagatgtgttaaaacataaccaaacactccaggaccttgggaaagaaatctgtatcagacatgtgggcttcattaagggaaatgccttcagaagattatttttccatgttatgagaaaaaatctcaacaagtaagtaaattgtgagcaagggatatgggcttcctgtggactaatgactgggagaagttgtgggttaatgtggagtccaaggtcattgatctcaagaggtcatgaatctcccaggtcggcttcctaaggtcattctcactatgagaaacatgctaggtgtatattcagggatctgctttgtgaggaggtgacggggaaagtaattcaaatacctttcaaatacttaaatacatttacatttaaaaacaaaggaagtgttgctcttatgcatataatggttacaattaatgttccatgactgcttgaattatacctagtgccaaatggaaaatttagaaatccgtccttgaaacttttgcttctctaaaataaggaacaagtaaatatcgacacataattttttaaaaaatttagatgaagtctatcttgctcaatttaacgcataaaccgagagctctttacctggggtttttagatataattgagaggcctgggaaaccctttgtatgcaaacattgttgtgtgttttttgtttttcctgaggttacacagctttcctcaaatgtgtgtgtttactctacctctaaggtgctctcccttagcccaagaagaagataacactatgccccttggaggcctaaggcatatcagctttgtcctgctctgtctcccgtgggctatcaatttctgactttggaatttggagacatagatattctatctctgtctttcactcacacatacatacacacacacacacacacacacacatattcatgcacatggattctgtaaatatgtcttaggtaaaactgcaaacatccttaaataaatatgtggattttgtatcctcttaaattttgacattgcaggtacacattaccagattggaaaccagattgcatctttacatctcatgttcttagcctagagtcttgtaaatggctatcatttagtatgttgactgaatgggtgaatgactataagagaaaaatatttatagatctgaaggccaataaacacccaaaacatctctcagatattcaggttcttccaaactcacaaggctgttgtacatatgggaaaatgtattatgaaagtcctttgcaaactgtaagctccatatgaaaataaggtaacattattcttctagttctgattctgcctctgagggacatggctattcgtgggcagcaatgtctgtgtatctcgatattgctactgttttctgaagggtggggcatttgacattgtcctggcactgactaggattgttgcttctgctggctgcaatctttccctttctctctggatggaatctttaggagttccaagtgcgcacagtaatgagagatttagtcttggaagaagagtagtgagaaaagatttccctgttttcccacaaaagaatcggtctcgctttttaagatcatcttaacctgactgaggcatagtcagtcatacctgagaataaccaatcataaccatagaaaaagaatatcccaggactttcaaatattttgatcacaatctttagtcagaaataaacttcatgtagttgtgaacatgcacacaccacacatgtacacacatcatacacacatagactaaaacaaagtttcataaaacaatagttgcactttatgtatgcaaggagatctgacatttttctgttctatgctttcctattcagaattaatagtcatatccactgacttcatcacccgtttaaaacactgactagataacactcagctgtatgagatgcatctggtaaaatatattaatgtaaaaatggaacacagttctatgagtctgacacttgagggtcttcttagattcattctgtctcttccagtccccatattctcactacacaaccccagcacctgctgaatttgactcaaatatatttcttaaactcctaccctcctccccacctctgtctcctggacttggtttaacagaagtgtccaatcttttggcttccccggaccacattggaataagaaaaattgtcttgggccacacataaaatatgctaacactaaccatagctgatgagctaaaaaaaaaattacaaaaaaaatctcaaaatgttttaagaaaatttacaaatttgtgttgggccacattcaaagccatcctgggctgcatgcggcctggggccgtgggctggacgagcttggtttagactctcattttgtctaaaccaggacttctgcaacagaacccaatagctctccttgcttcagttcttgccttccttgaatctctaacgtgaaactatgttcattctctttcaaactccttcacgtctccctgtcacctgcagaataaagtaccagcccatcaccacggcccacagtgccttcctgcctggcctctgtgtgcttctggggctcacgtgcagtcacgtgaagctgcccggagatccccagtcccaggctgctgttgcatatcccacgcctgtgcttacactgtttcctctccatctgtcacattcctctccctatttacctcctgacttgctcacatttatctctatcaagatttagcgaagacatcatctgtatcccaggttagctcggctcttctctggactttcacacattcattatggtccttagattatactgaaatgttcttgttacacatctctctcccccattagaccacagctctttgagggcagaggttgccttatttactctttgtaccactagtgcctagcagagtgctcggagctcagcatgtgctcaagacatgctgaattaaggaggagctgagagtgactttcttgctctgcataaatctcaagccagagtggactgcagcccattgatttattccctgcaaaggacttgcacgttgctgctggtcaaagatctttggcaaaggaaacttctgccccctgaaaaagctctcctgctctcttttttctctcttggtctgatgtaaagaggctgaagggcacatgccaggctttcatagctttctgttccactctgtttgagaagtctgatgctactattgctggggctgtggttgggctgagtgccagaccccagccttaatcaataacaagaaatctcatgaagcttagaggtcttccaaatgtgggtttggaatagtgctgggaagtcagatttggtgaggggagtcatctccaatctggaggaacttggagaaggagggcagttccggtgatgaacaaaggattaggtcaccttatgagcaggaatgaggcctggtccagtcaggaccacccaaaatctccctgaatatgccctggaggaaacccaattcccccaggctgccccattcacacctccaagggaatcatccagccagtccaagaaggcattcctggggaattggagatgtggggatgcttttaattgcagttcagtaatgcctcctttcccttgaaatgtaaccacattcagctatgactacgctggttctcaggagcagaggaaaaatatatgatgtaatgggatgagttttttggggcactgaactagtcgggcctgcctataaagcctttctctctactttaaacttctccttcctgaaggtgtagcttgttggacacctcctccaacaaacctttcctgaacccttctgataattatagccacctccactctatgatctctggccatcttgaattcttacttgtcctgttagatgtaactgtgacttctgtctcttttagagttacagtgtgagctcagtgaatttgaaaacagtagggacaggtctgtggtggttggggttgccatggctgttgttaagaatgaagatacaaacaagcttgtatatgggcacggctgctgctgctgctgctgatggttgatggccgttgttgattttcagagaaagaaaagtggattctgaaatggatgtctctagtggataaagtaaaggtgggaacagataaggggaaagagacagtaagttggaattttaaaaaaatctttcagagaggaaggtggccatggggagctggctgagtgtgggtttactctatgggtccctgagcaagtctcattacatctcaaagcctcagtttcctcactgcaaaatgtgcacaacattatatatactcttctgagtcattgtaaggatgtgagaaactccagaacaaggaagagcatttagtttactgctgcaatcctggtctctgtcacagggatttgaacttgacgttatgttcacatttgttaaaatgaattatgtaatttgacacagagcaggcacttaaaaattggagctattattattaaccgaaatgaatacttttcacaatttccactgatgtacccaaatgggagaagaaaataaacagatacttccaatggatttatttatttcctcctatgtgtagttggaatataacatgcccatacttcttttaatgcaacaaagctttccttcaaatttgaggaaaatctatgctccaagaaaatgcactgtcctgtagcttctaaacactcttggccatgctgccttgctgaagaggctcaggtgtaaatttaaaagataaatctcattttcagagagatgatctatttattttcaacagcagcctccatgtatgccagaaaatgtggggttcaggtaaattctgactgcactctagacatttatgatggacccaggtatctgcccttaaagaactgagacacacgcacacaggccatcagtggctgatgttggctaagcttaagatcacgggatgaaggaagaatctctgctcagcaacacgaagtgctggaaaataaagactttcttgtatatgtttccataaaatagcaggacatcttatgttttgaaggcaatttatgcatttttttaggagtgctaccaacatcatgcaaagataacttcagagacaaaacccaagtctgatcactgtctccttcgcttagaattctccatggttctcaaatctctccaaagaaaaatccaaatttccgaggacactatgaaattcttaagctcagcctgggtccctgatattcttctgtgtctcaactgcccacatccctgatagttggcaatggtgctaaacaactcaaagtttcctaaaatcgaccctccaactcccatcctctgttccctataggcaattttcccactgtctagaatgacattcttcttctgctttatgtgactagtcaattcttttcctctttgcctctctgattcccagctctagttttatctttccgccatgtccttccagaccacctgaccactgccactgaggccatgcaaggctaagtaacaagttcacaaaggtctatcctttgtacccacatgcccttctgatccagcacttaccccggcgctggaatgtgtggttcactctgcttttctgtttcccaccacagacagtgtctttgcattctctgcaccagcgcagcaccaagcaccacaaaggggcctggttaacgtttgcatggagaactgaggagggttccagcatggaggttcaaagaaattcagagcaaggagcagatgatagtcctctctcatgtttccggttgctaacagtggagaggaacctcactgctccccagtgacctgcgaagcctcagctgagattccaagcctccacacttcctttcctcattgttttcattcccattaaaaaggaacaccaaagatttgcatcacagccttaaaataaagtcccagagaaaaggattctgtttggaatagaaagaaccacacactttctaatgaatcaaacccctaaagaggactaaaatgtaaggtggggtatgttccactcattcacattctcaacagagtcttttagtagcgaacagaactctcctctcgtaaagaaacagtgcgatttctatcataattccagtggttaatcttttgcttgaaatttccaaatattttcttacatgccctttaagaccataaatacagttttaaaacattccacagttgactaaaagcagcaaagatgatgattctaagagacttccttccttttcctcggtacgaaaactatcctcattgtataatgcaggtactaaggttcgtgatctcttttaagctttatggtacttcttttttctgtggagtgtggcttttatttacatcctaaagagtatgtcattaattatccacttcattatctcacttatgtcctaacacaataatgaaatcagcaaattgagagtatttgagattaacaatctcaaaatagcaaaacaaaatgaaacaaaaaaaacccttgtttactaaattctaggttttaaaaattatctttggtataatggcttctattagcacaatccagacaccaccaaactacctgttaaatctgccagaaagccccgcgttcctaggcttgcaaagaaaatgggtgggaagtagttcacagcaacgctcttaagtgcttgtgtaggagagtggaggagtaccactaatgctgatgtcattgtcgtttctgaaattcctgccctgatcactctcccatctgggctacttttctaatctggaattttctctcccttctttctctcactacccagacacctgacccccaaggaatcattgagtcacttcctgtcctctaaccttgtggcttaacttccgtttctgtttaagagcattgacctgggggatgtgaagagaatgacagagggagagggttgccgggaaggcagggaaagagggggaagggtcccgctctatcggggtcagacaaggagttgctgagaactgcccacttttgatttttttgagataatcattgctgtcacagtcatgatctgaattgtgcattagttaatacttgatttacctccagaatctgctcatggactttctactgcttatctgcaacttcagaaagggtggagagtgaaagaaataaaaagcaaattcatcagtcttacatttatgaaaagtctgattgggcaaacctgagacctgttcagaagaaagggcttggaagggcatgcattttactgagacttctatctttatttgtcactaaccattcattcattaaatgtagtgcatgagtcttagctttccagatcagtttttaataaaaggatatttttactatggtaaaaaaaaaattaaatgaagcatcttttttttaaaagaaaaaaatttatttatttattttgtttgtgagatggtcttgatctgtcacccaggctggactgcagtggcatgatctcagctcactgtaacctccgcctcccaggttcaaatgattctcgtgcctcagcctctcaagtagctgggattacagacctgtgccaccacacccagctaatttttgtattttttagtagagacagggttttgctatgttggctagcctggtctcaaactcctgacctcaagtgatctgcccacctcggccctcccaaagtgctgggattatagacatgagccactgcgcccaacctaaacgaagcatctttaaataatgttgtggcaaaacccggctgactatgggatagacctttgagtggactctgattctagccttcctggttgctgggccatgggaaagagcactggccaaaggcaggtgggtgaatctgccatgtgacctgccaccggctctccttctttagccacagcagatgttccagtgcccaggtgacctagaagcttcatgtggaggtgatggaacttcagtaggcctggaagtgatgcagtatcttctgccctcaatgtgagtaggaaacaaacatttagttggttaccatgataaacactttagggacaggaacctcaaccttctttaacccccagtggccacatatgcctggaaaacagtaggtgtatggcctatatttatgggaatagtgaacattgaatgagtcatacaacaaaaattaaaatggacacagagagttaattctgagaaaaatttctggttatgatctgctgctacacacacacacccacccacccacatgcacacatactcaacttcactgtaaatatcactcacaaactcttttgtcttttatgtccatttttgttttcatggaaaccatccaactttcaatactcaccacactaagatagtgaaacagcttcttttgaagaggattcaattttctccccgaaataactatttcaattgactgaataggtttgtttcactgttcgtcacttctagaaaatgaaatgcattgaaaaagcagtttggagtgatctagactttaatatcagatcctctgagcaggtactgaccagatgggtacaatttcctggctctgtgctttcttcataaagaatctgtcagattagttggtgaaaatgacaaacgaaaagacactttgccttaataacaaaacccatgaaatcccttagacttttgtaattattttccggctaactttgctttctaggcttaagctgtgaagtgacatttggtgtttcctttttaaactaattgttattgcttattagagcagacatttagtgtctgtcaggtataagtcaatgactctcacactttgtatttatgcttttcttttgtcatttagaaatgttttattttgtttcttttaattgcttaaaagtagtgtcatgaatagctcgatgcttcatataaaaccataaggaagaactacaaacaaagctttttttattactttaatattttttgagaggtgatagaaagcatgtttataatttggttagaatctccaaagtggctgtatcttttaaaactagtatttaatggctagatataaccaactttcagttataagaaagaaggaaaggaggaagtgggaatggcaggaaggaagtcaggaaaagaagcaggagggcaggaagggaacgacaaaccagagagtcccttccctttcctcctgctttccctccttcctcctttcggaggaaggagggaaagcaggaggaaagggaagggactctctggtttgtcgtcctttcaaaattcctaaacaaattcagtccttccgatggcactttcataggctagcaggagtacttctggacacttctagctggtcatcttgctgctgtgtatgaacctccctcccacaaagaaggaacctgtttgtgtgcccttcctgttctatatgggtgcccttgctgtgggacagggcccagttcacagctatttcgctaatcagaaacttcaacgcctttctcaatttcatctaagtacagttttctgcttgactcagttactctctcatgtacaaaatggtcctctgccccgtgtcctccctgtgttcatccttgcccgggtgatcccagtttctagcaggagttcagcagaagtcactgattgaaatgtaccacctgaaacagcatcttactttcaactgcaacccactctaagccattttatatactattgtaaaaatgatgatcccaaacttaactctagatttatgttattttaaaatttagcttcctgatccccttttgggacaaaacaactttctcattatactagataccctataatcacccaggaagttcacattaattgatgactaaatatttggctaaaggtctatcatggctagtgaataccaatttgggctttattttaccctaaatctggtttagttaaaaatattttaaggataggctgggtgtgatggctcatgcctgtaatcccagcactttggaaggccaatgaggaagggtcacttaaggccaggagttcaagaacacaatgaaactctgtctctacaaaaaaaaatgaaaagaatttagcccggatgtggcttcagttacttgggaggctgaagtgggaggattgtttgagcccgggaggtagaggctgcagtaagctatgatcctatcactgtactccagccagggtcacagagaaagaccctgtctcaaaaaaaataataaaatatattttaaggatttcctgagccaggcatgaaaacaaaaccccaagggtttttaagcatgtggttcttaacaccaccaccatgagagatgaaaaataaatgatgtactgttggaatactgcacccatttcgttttcttttcttttcttttcttttttttttttttttgagaccaagtctcactctattgcctaggctggagtgcaatggcacaatcttggctcactgcaacctccgcctccagggttcaagcgattcttctgcctcagcttcctgagttgctgggattacaggcacataccaccacgcctggctaatttttgtattttagcagagatggagttttaccatgttggccaggctagtctcgaactcctgaccttgtgatccaccggccttggcctcccaaagtgctgggattacaggcatgagccaccgtacccggccactacacccgtttattaaagtactgaatataaattacacagtcttaaaaataccagcattcaaaaaaaacccaaaatatcagctttcaaaaatacaaaaacaaaataccaagtattactgcaatgccttattatactcatttccaaaaagatgttgggattttgtaaacaatttacaaggtatgtttattttaataagttacgacataaacaattactaaagtaaggtcatgtcaaaaactatatacgcggttttcagctttttaagtgtatttttctttgggaagcttttatgattggcccactatggattattagatggtaagttaactaacttctgaatgcttttaatttaatttttaaaaaacgatttaatacttggctggtcacagaccccatctattattgttactgaaaggttaattaacaacgtggctagctacttgtatgaccttgggcacaaaactttaccctatctgattttaatcttctcaccagtaaaatgagggctcttttagagtcttgtaatgcttttaatgctctacaatcctgtgatttctaagatgaaatgttgtgttgaagtcggtgacattaatgtctctttggaaaaatgtaatgggactccagagaaggtcaaccacatgccgatgtcctggctatgtgattatagacaaaagccacacccaggctaactgaatccagaaaaatccacatgaacattgtaggaaagttaagattgcccttgcacttggttgctaggaaagcatggttgatgagctctaatccaaatggtttataaatttcatactgtggtctctgacacagctagctaaacatccaagaccacagcctcagcaatgtctttgtccctgacatcaacctcaactgattgttcattttcaattttattcttaaaggtaacatgttgatttctccctgttttgtaatccaattctaataaaaatgagaaggcaggcaggattctgatattgggagataaataaaactgcattttgcaaggcagtcagttattgtaagacagttattaaaacagctggagaaatggcctcagactgcagccagcctgcaaatcagccgggcaatctggcccttggtgcacatggccttggatggtattctctgaaatcaggttacaggagtctgtgagctggagtctctgttttttggcagttcccacagcaattaacccggtgttaggcacacagtggcatggtaaaacttgttggcaattcatgaaatagttactattgaaaaaacaaaagaacatttctagagcttcttgcattttgtagtttggagataaacattggctttaattgcagtacttactaaacagggaatatgctacttagaagctaaaacagtacatcgacaactttccttctcttattccttaattaattaatcataatcatccacagttgttactggaatatgttgaatttgtggaatttgtgagaatgttgcaggtttcttaatgcatattcaggagtatttgccctgatataagttgtacgaggaaagtttataggacctgtgaaagccattcaattgtttttctaattctcatatgcatatgccattcaaatattctgcttaaaggtatctgcattgttattgttgatatcaggtgtcagatgtgatgctaaatgctttatgtgcaatggctcacttaatcctcacaagagcttttaaaaaggtattaccattcccagtgggacgcagtggctcatgcctgtaatctcagcaatttgggaggccaaggtgggcggatcacctgaggtcgggagttcaagaccaacctgactaaaatggagaaacgccatctctactaaaaatacaaaattagctgggtgtggtggtgcacgcctgtaatcccagctacttgggaggctgaggcaggacgattgcttgaacccaggaggcagaggttgcagtgagccgagattgcaccactgcactccagcgtgggcaaaaagagcgaaactctgtctcaaaaaaaaaaggtattaccattcccatcttatggaggaagaagctaggatcagggaggttcaatgaggtgcccaaggtcacaaatgggatgctataactcataccacagcttttgctcaaattctagccctcattcataactaaatgggaataagtggatgagaaaatggcaaagcttttaaaacatctttttaaaagaaggagggtataaattataaataaaaatgcaactgaagaaaggacaaacaattcctcacataatttcttcatttatttattcatactttaatcagccactaaatacacatgttcaccacagcagcatgtagtatgaggagtaagaaaagagatcatctatacagcagggcttaatgaaaatgaaagttgttagtgattagaaggagaaggaaaagttgaaccatcaaagatcttgacgccttgcagaaggttctaggtgggaacattatttccagtcagaatggtctttaagagctttttaagaggtgagaaacagtaacaatgaaaacgtcacataatagtttgttgttggacaaacacgcagacagaacacaactcgaggctctttactgtattatctctcaccctcatgacactcaggtagacattactgttgccattttggagatgagcaactagaagcttagaacacaaccagcgacaaaccagtcggaaagcgtgaacacaaccagcgacagtgtcaggattcaaacccagacatacagaagcccaatgcctcccacctttcctcaaagccatgctgctcagagctgacttcctgtggtgtttttgttggctgtgacatggtatttgaagcaggaaaacaaaacaaaacaaaaaagatcttaacttggaggacaggagagagaaactgtagagatcagtaaaataaatgaggaggtttatccagtcatctgtactattaattgaatttagctctctactagctaagtgctacacggctccatggtgattatcaaggtagtcaggatttcaaatggtgctgataactaagtgtaataggattatgcattttttttcttttagagttgaaacaaaaaaaggccctttaagctgaggttttcaggttgtttttttcctgttacaaactagtccagaatgatcccagagacctcaaggagtgttagagcttatttcacttatatagggaaaaagaaagacagagtatttgctaggtagatgcatactcttctagctcttcttgcctcaatctggacttagattcaatggactaaacttagcagaaaagtcacacggagaaggcaatgaacacagcacatgcctaataccatatttttatttgatgatatttgaaccataaatatacttcacttcaaaaaaaccttaaaaattgtgtattaaatgaattttggtaaataatttaagtaaggagagatggttaatattcattatggaaacattctgctatgaaattcagtttactaagaggattaatgttttcattaaaaaaatattttgactgaatcttaaaaaaaaatccctgatttacattatcttgtaaatgtacattctttcatggtaagaatatttttaaaaggttaatcagcatttgtttttgatttaaaagtaagtttatacttaaacatcatattttaaggtatttagtgcagaatgaaattactttaatataaactagatgtaatttgtcatgttttttaatagaaaacttttcaatactataatgctttgcttgtattgggcagaatataaaacaaattcaaagcagtgaagaattgggaggaaaagaaaaatgattctcaaccctcaaatatgggcttctttggagaaagtgaaaatggatttttaaaaaatcagaaacgaacaactcactgtttttttgaaaggagattatatatgctgttagtcattttttaaaatgaccacagctaccatagagactttgatttatttacattttcctgggcctgcagccccctcttgtataaacatatacacataccaatatgttatgtgaacagcaatcttgcagtgacttcaaggaaaaagttgtttttgtaaaagaactcatattttcccatgctacttcacttcttgtgcaagaacttttatgagattctagtgaactgtgttttatttattttcctttgttctttccctcttactggaagaaaacattatctggatgtaatcatgttcaatgagaatacattctgactcaggagatgatttaaatcaatgaccaacaattaaaatgcctaatctgccactactttggatatggcaatttaattttactaggtcaacacattcatttattttaatgcaatatatattcccccacaggaaggaacactatttcagtaatcccctgttactgacatctttgcagatttagccactctctctgtaactcaaccaactaaagttgaagttttgtagcgggaaaaatacaaagtgaacatctctaggctacttcatcaaagtccccggggaccacatttttctctcaggagactgtcctgtaattcactgaatcattgcttgtattctcactatcagtaagcctgtgtggtgttccagccacctggagctgacaaatatttttctatgtgaaggataccatagcaaccagatttgccgcatggacagaaaccagccataacgatgctgcaattttagccaggaagccgacacgtagcacccacgacagtattatcgtaaagcatgtcttgagatctgaaaattcattattttctaggacttagttctttagacacaagaacggaaattaccccaagccctaagtgaaggaaggcggtaagaaggaaggaagatgggaaagatcatatgtttcaaatctgtctctctttcttacaagcaatgccaacttgtacaagttaataaaccctctgagcctcagttttttcatctgtaaaatggagacaatcattctccctcaaagggtggtcgtgaggatgaaatgagtgctctgtactgtggttggcagatgggacacacataacaactaaaagctttctccatttggttaagaagggaggtaatagacacttagaggccacaagaacaatgctctccaaaatagggttcagatgattatatgagaaatgttatctgtgtttaaaatttcgtattaaaatattctaaaatatttttaaagaattaggctgggtgcagtggctcacgcctgtaatctcagcactttgggaggccgaggtgggtggatcatttgaggtcaggagttcaagaccagcctggccaatatggcgaaaccccgactctactaagactacaaaaattagctgggcgtggtgacacgacgcatgcctgtaatcccagctactcaggaggctgaggcacaagaatcgctggaacctggggggcaaagtgagctgagattgcaccactctccagcctggacaatgaagcgagactctgtctcaaaaaacaataataataataaatacaaataaaataaatatttttaaagaaacaaattgttatgccagtatgcaatatcaggatatgataggaggcgccctcactggagctgccagcctgccagtggtttctgggagggagggtggcgattgtatagtagagaggattgaccccagcaatcttacctccacgcttgctttcagtactgccctacatcatgatgtgcggcagccgacatggactcgattgagagactgtgagctacattgcttatctttaaccaaactaatcctaacagaatggagaggcaacttaaaaagattcttgcagaggaaccacaaagagaaaatattaattaccagcaatgagtagccaacaagaaagagacaaagctgaaattcccttactcctagtactggccctgttaacagtcacttctacaaggcagcaataatgaacacagatttagaccagaaaagaagccaactgaactagtgtaaaattgtctggaagactatttgaaatagagatttacgtaattattgatggactttggcctttatgacttgagatattaatgacagtagaactgcatgtaacttataaaatacataaagatagatatattgggagtactgctcaagattttgttactgatatgagtgtatattcaacaaaggctggggccactgtgccggggaaatgaatatagggtggccacactgcctgcttcccagcctttttcacacatggcacacacgttgtgtttgtactacatgctgggataagctactaggctatgggaagctcaagcctttggtcaccccaggtcccgctcagccagcccaagactgaggaggtcaatattttcagcacacctattaccaattcagggcacactcatatcccatgtgaggcaccctgtaagcgtactggttgaaaactcagttctatagacagatttaggcagggttaattattgaagaatatagctatttggtgtgaattgagttatctctatagacaaaggaagagagttgtgtgtgtgtgtgtgtgtgtgtgtgtgtgttttcaatagacctcttaagcgtcagcccaataaaacttgtttgtatcgcaagtgggcttattgtcagagttaaatatttacgctatctcattctctcagatctgatgaaggaacaaactttataaatattctctttcctctccgtcagcgagccaattccacttcggtctgcccagcattcgacacagtgctgctgctgacgcagtaagtgctaatgtatgcttgcctaacggatcagcaagccatggtagaaccaacaccctgctcatccgtccttacattagtatgtagttagatccttttcctgttcctcccaggaggtaatccaaaacattgccactgaatttccatccccagtcctaatccctggctgctaattcttagctgacttcccctcttccttgatgaggtcaccaaggccatcttacaaaagctgtttcaggccgggcgcggtggctcacgcctgcaatcccagcactttaggaggccgagatgggcggatcatgaggtcaggagatcaagaccacactggctaacatggtaaaaccccgcctctactaaaaacacaaaaaattagccgggcatggtggcacacacctgtagtcctagctacttaggagggaggcaggagaattgcttgaacccaggaggcggaggttgcagtgagccgagatcacgccactgcactccggcctgggccacagagtgagactccgtctcaaaaaaacaaaacaaaagaaaagctgtttcaacaccaaatatgtcaacctaagccatccaggaaaaaaatctaaattgtctttgacttattctttattaaccaagcccacagtcactaagggatgctttgtttctctccttttccctcttctgcccacactgcccaactcactagtcaacttgtgagcatcccaggctcacccagcatcagagccttggccctatctgtctcctctgcttgacccaggcttaccccagatgtttagagaccctgcctaaagcctccttccttcaggtcttccctcaagttctttctccaagaggccttccttaattaccttgaatatatattgcaaaatgtacagaaattaacccttctccctcacctccataccccctttccctgttttattccttctctttatcagttatcactaaaataaacatagttcatttatttatgctattcactctctgtcttctccacaagagcatgagccccacgagtcaggaaactttgttttcctattttgctcattcctgtgcctctatagtctaaaattgggcctagcacacagtagatatctaatgaatatatacttaaatggacaggtgggttattgcaatggacctataaatggtgctactgcatcttctctaatgcactttctaccaaaatattcatcctaaattacaagttgaaaatcgccaccttcctcataatttgtcagtaactacatatgatttattaaatagcatctaaaacccttaaaaagttctagcccccatctccttttccaatcgcctttcccaatgcagtgatctctccatacatcctaaggtatagtcacgctgaggttcactcatctatttttgaacacattacacacttaaagtctttgtgtttttaaacatacatcctttgatcttgagcatctgtttcctactttaccttctactgaaatctgttgatgtttccaggccacatttcatatcatgcataaagcttttccattctttgaattggatttaaatatgtgccccatagcacattgccttaagcccctgattacaacaaaaatcattctttcttgaattgtgtccatatctgtccccaagacgtgactgtaatattcttgaaaagacattatatgtctccttttcatagttcctttcacacagtagatgctcaataaatgtttgttggcattaagtatacaatgtcactagctgtgcattttggaggaggagaactgtagtgagataagcatttaggtcctttgtagaagtaatacaccaacaccaaataagtgaatgtcagcaaaaccgaaaagaaacagaaagctatagtttaagccaacatgaagcagaagactttacaagaaactctaaagataaaaataacttctgctctgctagaatgcctgccacagagaggtcacttattttggagtttgatcctcagctaaaaataaacagcttttattgaaactgagttcccaatattgttgtttaactattttgtggtttcattcaggtacttgcaaggcccaaagaacactaatcaggatgcctcagtgttacataagggttcttttcatggagtaatttatggttagtttgagaaattgtatctcatctgcttgctgggtttctcctccttaggcatgtctcgtaatgtatatatatggccagtcattggccgggcccagtaccaatggtccaggatgcagtataataagcacatgtgggaagaacagcggttctcaggacactgttctaaatcattgttttcctttggggagtagagaaccaataattccaagtagcttttatggcataatctttgctgaggcagtagagcatgtttgaaatctgggcccatgagcaacaaattcagataggatcctcttgccctttgctgagtgcagaataaacaggtctttggggaggccccacagaggctgaaggtaaccaaacacgctgccttctagccctgtggtctgctgacacagctcatgcccttccctgccatcccctaagggttcctggggctggaagatagtgaagctttcttcagctagccgcttgctctgtcattcacatctagctcccctaaccagcctggctcagctcaagctcaggtaaatgacctattcgtccctgtgccacccaccatctgtatgtggaagcccttggcaaggcaggagctaccgtgccagccccttgaagtctgcttcagtcttccaaagcgtcaccaacaacgagaccacttcaaggtactctccggtcattaacacttaagttccctgtagtgaatttctcaggactccactttcccctgctccttccacacctaacctgctgccaccgacattgcatgtgtgcttggctgttgccctactgggggacttacccatatatgtattattgtgtttctattcactttggaagttggcactccttcaccttttaaacagtgaactctctgaagcagaggacttgcacccacttactctgttgttgcacatggaacacaactgaacaggaccatttagaaacatgcttaaagggccgggcatggtggctcacgcctgtaatcccagcactttgggaggccaaggtgggcagatcacgaggtcaggagattgagaccatcctggctaacacggtgaaacccgtctctactaaaaaaaaaaatacaaaaaattagccgggcatggtggcaggcgcctgtggtcccagctactcgggaggctgaggcgggagaatggcgtgaacccaggaggcggagcttgcagtgagccgagattgtgccactgcactccagcctgggtgacagagtgagattctatctcaaaaataaaaaataaaaataaacaaataaataaacaaataaaaataaaaataaaaaaataaaaaataaaaaatagaaatatgcttaaagaagcaatgtgcttctctgcacttttgggatgagatggaaatgttcctgcccactagcaatccttagctctggcccctgtaccgagagcttcagcgggtggcattattagtggggatgcactttaagtattattccaagaattggaaacagaaaccctcccacactgagcacagatgtggtgatggatgatgtatctcagtggcatggccccatcaaatcccgtgttcaactgactacatgaacctatttttgtcagtgattatttccggtattcctgtggtttatcccaatgtaacatgcagaatctactatgataacatggctttacctctgccagttattccatgtaaaaagagattaaatgagagattgccaaaaaacttccacaatttacatagttttcttcatagtatttgaacaagtagactcaaattttctttttacctgttttaaacctcagctcaagagcaaagttaaaccagtttgaatctccagctctccatgcagtcaatttttaaatgaaaatggttgaggcaggccttctaggccccttctgatactcagattattgttctgtcaaagaattttcaaattctggcctcaaaggttaccttattttcaacattttctaaatttaaacagaagggagagtagtaaaattggaagcatggtaagaagttgctcaacttgattgttccaagtatatccttgattctgtgtaaagaacctaaaaatggaggccttatggtcaacataattagtacataatctgtcaggcaacctttggattcttaagaatttttatttgattataaaagtaatactggtcacttatttgccatttttcatattatttataaataatatcatgctgaacatctttgttcagaaagctttgtctacatttttatgaaaccatttcgttaggatagtttcctaggagaattactggatcagaggatcttgataaatgctgccaaactgcctttcaaaaagatggtcagattttctttttaaaacacagctagtcacagatatgccaaggctctctcagaatagagacagatggatgatagttttaatgtttagttacctaactatgattagtaggattcagataggactagtaggttaatagttaatctgctggtgattagatgtagggttttgcattgttgcaatctcaggttcccagctgacaacagtctatatgctgttatgccataagggacaatttattccagacacaaaaatgggtaccagggttctgtcccagaaggtgtgtaatgacaggaccccacaaagaagtggtatggaaagactgactttctcattcacttgacaaacattacttgaacaccaaccagacataagaaactacagcgagcaccagggagtcaaagcagcatggtacctggcctgtctttgcggagcctagggaggaaggaagatgtgtaaataaagaatgaagtagaataagataaaaccttgattagaagtttggaaccatgaatgaagaaggctctagctctgtgaaagaatggtggtggagaaggtttcaaaggcaagtgatgcttaaggtagctttggaggaggaggaggatgttggcaagtggtagagaaaacatttagcagagcacagggacagaactgggcagagcgtggaggtgtgaaaacatggagtgtaatagtgaagtcatctggtgggtggggcaggagggacacgggtggcaaaattcgctcacttcctctttctgagagggacctctgggggctccaaagaaacctttgagatcaaaaaagagctaagagaagcctttgaatgacgggcagaatttattaagaaagggaagaaaggaatattccagcagcaaagaagttgtcgaagttcaattagtgactttaaatggcctgaaagttttcaaagcattttcatgcacattatgtcatatgggcctcccaaccacctcgtgctacagtaaggcacacattctgattcccacaatgcagcggaagagcacagttgaatggcgtggctcccaaggctgccatatttcgagattctaggggccaccacacacctgtgttcacagaacagggtgcgtggtgattctctgtactggcaggtctggcttctgatgtcctttgcagtacactaagctgtgatcatgttcatcatgtaaaatgaaaaggatttaaaatgaaaacacagtaatcactcctatcttttcatatcttatatgctgctatgctatcagttttactggattattttgaaagatgaagtggatgtgtgtgggtatatgcatatatgaagattagcatatatttatttgtatggtatatctatgtatctataaaatgtgagaaaatattaggtaccttaatctgcactattatccatttttttttacattaggaagtttaaaaattacatatattcaaccatactaaatcaaagcagcatcacaccaattttagccctattttttaaagttcaacctgtttgaggaaatgactagtcttacacaatgctgagaatcttgatgagaaaatcaaatagttattctacaaagagaaaaaaaatagatgcaaataccttcaagagcagcctcctataaacaaaagtattactacataagattatagaattttgtttttaattttgttttaactttaaaggctaaagtttttagctttttcagtgtaatgcagaagttctgtctaagagagtggaggcaatttcattaatggcatacgtaccaaaagctaatagcacaagatgcattataaatgtcttactgacatttgaaatatctctgggagacaaaaatggctataattattcattatatttgtaagcagtgaattagattcatcaaaaggttaatcatcttcctcaaggtcacaaaattaggcagcataaaggtagtatctgaaatccaaggcttctgactgttacctcggtccttgaaatcaattaaaatcgtctccataaggtctgacgtgggtactgtcagaagctggcaaaattcttttacacattagaaaaacaggtgcggatgctaccttgtcacatgtcagcatgtgtcagcacatgtgagtttagctcatgcagaacatactggttggcatagatgattccttcacatgcagatatgaatctacacaacaacagtatgttccagtatttcacaaagagtatcagacgcacatctctcaatgactacataggttgcacagagtgtacaaagaactctgtctactgatatttccttcctctcatttttcacatttagactgtaggaaacaggctaagctaatgaaaagacagtacgacaaaatcttcaactttcagtttctgatttccccaataagaaaagacataaatgtgtcatttcttatgagacgcgtggaaagaaccccgtagaaaccatatggttgtcagtaacggcataatctcattcaaaggtgctaagaacactaatgagaccaggatgtcaggaaaagcagaaatagatcaatatttctctcccatttatagttgtcctcaccatcagtctctgcaccagctctatgtaaatgaaatcaatcagcaaggatttctgcaaaacgcataaaacagttctcctctcagctctaccggaagataaatgattccagacgttggcctgtggccattttcccacacatgctccagagctctgacatccatattgggccataacactgagtggtttctactttggcgagtttacagccagcgcttccacttctggtttggactagacagcctgctaatgcagatgcaaaataagtccctttccgcctgtgtaaattgtaaaagaattgactttttccaataaaggacctcctgtgagccccctgaaaactttctgctatcgctcatagaatcttatcattctcaatcactgctttagatccccttggaattagacgaatcctggcctaataaaacatgcgacatatgacatcgaacgcaaaccacttagatgtaacatacaattaccaacagcccaagtccaactttgaaaacgaagccgttgaaaaatgtattaaacataaatagcaggattgtttcatatggtagcttatgttctgaaagagggtaacagactttctgagaaagataaactacagaagatccagaagcagcttcctttaaaaatgatgtcaacaccaataacattatttggaaggctcgtaggaagtccaggtcatattcatagctatttaagtaacgtagcccatggaattaagcatgctaatacaaagcatttactgccaacctcgtcaatctgaaaggtgggtcgctttcttaataaactgcctttgaggaaagatacaaataattttgcccattgttataaatagagagagaaggaaggaaggaaggaaggccttatctatatctgtagtctgagataaaacaattctctctgagattaaataaaagtaaaataaatctaactgtaacttgcaaatgtttctagagtgagtagccaaaatgacagtcactgctttttaattttaaatcaagttcttgttaagagaatgttgtaaatatcaagtccactacaaagaaaactttttatatcaatgacaaaactcacaatctacataggaagtaactgttgtctttcccaccaccacgacctctttttctatggaacacaaacttactttgtttaaaattgtccttaggctgtgctgtacctttcaaacaaaacccctctcttcttcaattcattttcagctttcttgaaaactgctcctcagaaactgacagatggtgcatctgtcaccgagtgttttctcttcgttatctctgccagctaatatttcctctgtgcttggctgttgtctgtgagactggtccacatcattctagcctgatcaatggtgtgcctggtttgaggttggttttggccccgcctccagctctaagagaaaaaaacgaaaactcacagctggatttcctataaatcctctttttaaaactggctctgccgctctggcacataccagaggaaacgctgccagtctatcacaaaccaaggggggtgctccttctcctaggcacccccaccgctagtgtcaggtgccttccttatataacacatcccattttaagttagcctaaaacttcacaggaagggaagaagtgttttaaaccaagcttaggtttttccatgcctaataagactcgaaagaagatgcccatgactgaaacacacacacacacacacacacacacacacccataaataatttttaatctgttaatactgtgcaaaccaattccaaggagaaaacagaaaaggagaaaatgccaaaataggatataacaaaatcagtgcacatttaattgtgtatccttaaaaaactcaggtcatccttcacattctgatgacattacaccctcagttggcaacaggatttgcttgtatttacactgccaatgaacttggtgaatcaggagaatgcatgggatgcatttcaggttccagatgagaggcagttgcttctctgggttaaccactaccaagtggggttgaacaggtgactgtggaacaatcagtctgctctgtaagtgagcatgacaaacaatgcattgtagactttcgtatactgcatgctcgatggtaatctcaccttatcagtgagtggaggccacacgtttaccatgaatagaaaaagtgagtgttcctaaactaaggctatatgttggaatactgtactaggattcacagtcacaggatctggattcgagtctcagttttatttctcggcagtgtcctcgaacatgaaaggcacagagtatgctctggagacctcacagatgacagcagatcaaatgaagatgataaagaactttgttgttattatgcaacattcgtattgttattttcaacaacagagagaatattaaataaatatacatgtttaatctggcagaggatgataccaaactaccactgcctgtgataaggagagctaaagatgaaaggattccgggagtaaggtgcagagtatacagtgcatgctgaggataacagccactcagattttaaatgtttgaactccacagtgagggagaatacgaagtaagcatagggcagagtggggctgaatagcaaaagtttgataccttagttctccttccactctcactcaatagaaccctagaactggcatctgccattagtcagtgagctccttaaaggcaagaaaaacacaactggagtctgtcaaataagagaatgaatgagactttgaactagataagaggtactcactctaagagagggagtatagagtattgtgagaagcctgagtttgaagttgtaaaatcagatacttcaaggttgagagtgcctgtgtgtctcaaccttgtagggatttgtagagagagaggctttctgagtaactgaaaagtaacacgagagattttgttcagggtcccctgatttcgtccagctttctacactcacccctcaactccacccctttcccacttcctccatgagaacgtcattctgtgacaatgaacttgagtcaagaaccaggatgtctgtaaacatccctttaatgaaagcacatggattgttgggtcaattcttcccatatggtgttgcaagtctttgcttgctgtagctggccagaagtcagctttttaatccagcaggccctgctcgatgcaggctgtgtgacaggcatctgtgaccctgccccgcccacaaaaggcagattataggggctgctcctgctcctaccctgcctggcacctcactgccaatgagcttctgtgctcttgactaaatatattgggaaattccctacttccataatagtttcatgtgtgtgatctcttctccccaagctaaaggattatgccaattttgggtaagagaatttgtcaactgcgaagatcttatctaataaatccttttaaaaaacctcctaaaatgtgcaagacattccgtgctagccacttcagaggatgtgtgctgccagctctctctggcacaggtggtctgcaagggtacatgaaatgaaattatcacctaaagcaggatatgaggacagtgggaggtggaaggagtctaggttggggagtgggagtgggagaatctagaaaacatggcggggttgtagcatgagggtacacaggcagagatgagggaggacccaggagagagaaggacacttccaagtagggagtgagctctaaggcacccaaagaaacaggaggcaaggcaagcttggggactcaggaaccttctggtgctgctgaagcacagggaacacgtgggggaaatcaagcaaatgagtcatcaaaggtggggcggaaccatatatgggatggccttggatgctgggagagggtatggggagttcataccagctcaggtagcaattatgaacccttgggggttttagagcacaggtgtaacacagtctgagcggtgagagctagaaaccatgttaaggatggattctaaagggaagcgtaggcagatggctccactcaggaggctatggcaattatttcagcaagaggtcatgaaggctgaactaggaggacagggttgaaaacaggaagagtgctagaggcaaccagaaagacatgtgagtccagggagatatgtcttaggaaattccatctggaggaatttttcctggaggtatttgcagacaggtgtacacacatattcaagttttaatttcagcatctttcattgcaaaagattgcaaattacctcagtgctcaccaatagagaacttacaaataaattatggtacagccacatagtgaaatacttttgcagccgtttaaaatacacacacagctacaagactactgttgtcacatgttggtgataagcaccagattgctagtggtcaggaagtatgcctagaagagaagttttagacagagattcaatttatggcaaaggaaggaaaatattggggagtggaatgtgcatgggtggggacctcaggacttgtgtgttacccccatattggcacctgcgttccccaggaccaggacaacctagagctgtgcagtgtacaacctacgcaaatgtatatggtgtctctgcctacaaccactgactcaaaggtgccagaaatctgcctcatccagccttgatcaatttcataatcaaaagcccagaacctgtgtgcctgagccaatcagcattggaaaggaacaaacagcaacactacccatattggggacctaaaaatgcctttaagaattataccagatggcaaagcaaaaagcatgatgtctgaatcttctctctctctctctcttttttttttccaaattccagggcctaagaagccaattaaccattccaagcaatatctaggtgtaagtgcagtgaaagttcataaactgaacacagcaacaacaattaggacagatctgctggtcgtcagtcctgccatccttaagtgagggaccgatatttcaatcatcattccctttcttttcaatgacaggacatcttgaatgaccatatacaagaagcggagtccaagacaagctgtagtggctcacgtgcactcccaacactttgggagaccgaggtgggaggatcacttgagcccaggagttcaagaccaacctaggcaacacagagacaccctgtctccacacaaaaaaaataaaaattagccaggcatggcagcatgcacctggaattttagctattggggaggctgaggtgggaggatcacttgagcctaggaggtggaggctgcagtgagctgtgatcatgccactgcactccagtccagtgatagaccaagatcctgtcttgaaaaacaaacaaacaaacaaaaaaacagagtccagttccagcttcatgcacagagtgggtgtgcagcttcaacagcagacgctggggtcgacaacagccgcagtgttctttgaaggggcaaggtaggaaggatcctagaggcaataaatatggctccttggggactttgttttctttcttgcaaagagccaggtctattaaacatcagctctgcagaggggagagcacactgaggaagcagaacttactgcacatcaagggaggagcccttacaaagtagcaggttgcagacaatttgcaaattccggcaagagtaaatgaagaacacagtatttcacagccagtgagggcagtatgacttcatggataagagtgtgctccctttacagtgcaataaaaaaactgcacttaatgcccaaatgcctgaattgtaatcttggctctgacggtacaagctgtgtgaatttgaacaagttacttgcagtctctcattgttgactagataataatggtacacatcttagggttgttgcacagatttagtgcgttaatgtacataaaatgcttgccacagagcttagcataagcattcaatacatgctatcattccatagttagaatggaataaaacacaggtgatttaaaatataggtgattacgactacacttaaaagattgactttgattaaccacaaatcaagaaattaagaattctctgtaagaactgctaattgtattaatgcctgcaatttgaaatacttgagcaaatagggtgcgatattgtgtgttatttaacacttaggttaagcgatcctgcagatgctgctagcatctaatcaaccattcaaaatctggtagaccaacagtttagctggcattctaaagagggcacctccacatcagaatcggccatttcaagccctgttgttaccatttctccatttcttttggtcatatattttggtttagatcttggataccaagaaattcaccaatttcttgacataaaggaatgagaaaacaaaaactcactggaaatgtaccatacgttatttgcattatgctatgaatatcattataaatatgaaaatatagttattgtataggacaggatcattcctttttagtaaattatttttatcttcacaaagtgaaatcaaagaatatctaacacactctagtagctaataaaaaatctttaatatattattttaaaaatattttaaaataaaaatattacataaaacatgaaagatattaaaataaaaatattatttaaaatatcttttaaaaatattttaatgataccaaataatgctcattgaaaatatttaaataatgcagaagcatagcctaaaaaagtaaaagcctgtttttattcctaacttctaatttcacttgtctccttggaagtagtcactattaacagtttggtgtgtatccttccaaacttattatgcatatataacacacttgttatatatgtgggttttgatatctgtgatatcagacaccaagggggattggttccaggatccccacagatatcaaaatccacagattctcaagtccctgattcaaagtgggatagtatttgcatttaacctacatacatcctcctgtataccttaaatcatcactaaattacttataatacctagtacaatgtaaatgctatgtacacagttgttctactgtgtattgttgagggaataatgacaagggaaagaagtctgtacatgttcaatatagacacaatttttaaaataacatatttttcaattcccggttgaatctacagatttggaatccatggacagagagagctgactctgtgtgtgtgtgtgtgtgtgtatgtgtgtgtgtgtgtgtgtgtatgacacatattcatacacatatcttatgtatgtaaaatatacacatatgtctatacatacttgtacatatatacccatgttatacacccataagaattgcttttcactgaaacagaatcataatatatgtattattctcagacttactctgttcattggacaatatgtcttggagattttcaaataaacaaataagaaagctaataacaaattagctcagtggaaccccagtgactgttttagtcaaaagtgtggtttcaggggaccagaccaaggaaccagcaccactcagaagcatgccttttggggtggctcacctgtccccctgaagctgacagatttgtccctctgtacctctccaatagctttacatcccgagcagtgtggtagaaaagatgggtgagtgaacccgcacaaactcataaatgaaaacatttattaagtagaatttaagtgtcttacttcgtgaccaactgttcctttagcatatgtgcagatatccagagcatgcctgccttgttttctactcccattttaagcagaaaataaagccactttctactgttgaattattcttatttacagcaatagaaatgtcaacctttcagatttggacactgagttgcttgggcacactggcacccagagcctacatgagcagcaacatgtattaatcctcaggggtcctgcaggcaggtgtgggcaggtgcagatgtgcatgaggaggactctgggactttccagtctctagggtcatggagcctattttcaagtcgcaacttgaggttctcaggttctcaggctactacatatgcctccaactcaatttcactcgcaagcattccaggtaatgtggagaaccaaagaaactcatgtttatagtgtgtttgaaaaacaatctcttcgcaaaaccctttccagaattttacattcctaaacaggtatgacaatctgtcatctaatttctgctattattaaattgcctttctttttctgagaaaaaagttacctttccttataaaatgacacattttcacctttttgttagcaagtattgcttaaaaaggaaagttttgtcaaaccatcatgtttttagatcaaggcaacctaccccttatctctgctacgttcttgttttgaagcaaatcaaggcaatgtacttgctagttgagttattgaccctgattttttgaactccctttatccaaaaaggttccgtaagaaaaatcagacagtacatctgtaacatgagggctctgacaatgaactgtaacagtaatgccagctgggtacataaaattccaatgctaagaatttcattccacatcaggtacagtttgaaaatgtcggcaatgccttatctctgtggacatttcactgcacatataggatttctatgtcaatatttgtaaaattctaagagttatacactctggcttatattacccaaaaggagagggagagaaatgggggagaaaaaaaatcttgtcggcaaagagtcaaccatgcactggggagtcgtattgaaaacagaagacaaaatcatgtagtacaaaattaactatgttcacaagagaggctcagaaggacataagggataaacaaaatctccatcacatcagcatctttcctacaagtctgatgttccagagagtctgctctttgtttctgttgccaaggaatggaacctactctggctctctcgaggtagagaaagtatgtgaagttctggcattcaacagccgcagaccagggaaagtcaacagtgaggcagaaagcataaactacctgctggggcaagccaatttcatgcattgtgctcatggcaagacaagattggatttgcctcttgcaactggcactgctgttcttcaggattgattaccctaattctgtgcttatcttgtcctttcaccccaactgtctactaaccttttacctgtatatcaaagcttatactttaaattttcaatggtggtatctttaatcctgggcagagaaatccagaaatccttggtataacacttagcacagggcctgctttaattaagatgctaatgggcatcaacaaggaagctgcagtatggaaagaacaaagccccaggtcacgtggcaaggcaggctgatcactttctaagctggatttcttccactattttgaagattacttcacctctcccggcctcacccaaatcatatatacactagagttttcactttcattcggggttcgcatcacaagcgactgtgcgatgaaatattctaaaaatctagcatctcttttaaagttcactttgaaatttaaggagaaagcagacttaaagaggattctgaaagtgtaatgagcatcatctctttaaacctcacaaacaaaaagcacattcttcattttttggttttatatctgactgctttctaacaataactttacatgactgggttgaaataaacttaaaaaccaaacttggaggcatacttatctaaaaagtctaggaatcctaagctcctgagactgacttctcattttgctgcaaagcgtgggtggccacaagcattcctggcagctataaggcatttgctaacgtatttgacttttaaagttgttaatcacacttatcaacataggcaagcagcactggccacaaaagattagctgctctactataatgctcccagtaatccaaatgcaggaacatccgcgccgagtgataagtgcatctgccagctccacaacctttcagtgacttcagaacttattaaagaccttagcttttaataaatcccagattttcttttccatcaccttacacacaaacacacacatgcagatacacacacacatgcacacatacacacacacacacacacacacacacacacacacacacatcccctgcaatggtagctaaaaccaaatattcccagtgctgtgcagtgtatgagtttctaaaacaaccagaatgtgcttcaaaacaccacagacattgtgagtttcaagggggccatcactgacaagagattcagatgctactgatctcctttcacaggtgctcctgcaaaaaatgtgtacaaccagcaggaaaggacttggtttccagggaaacagaatcttgtttaagtcctttggaagcattaggttctactgtagtttttcccctcagacacatagactgttgctccttgcaaaataatttatttagtgaacaagaaaatgctttgcccagcttagaggtaagtgcatcagaaaattcaggaatagaatgagtacttgggggggggggtggggggaaataagcacctctcactgagcctgctagtctctgactggtgggatcttgctttcacataaggattcttccttacaagacctgaggtttcatctgcagacatgtttctgccttgttggagtcatgctgaaggccccatccttgcagcttgggctctgctctgcccagccggtcttaaccctcaaaggctaacaagtgctttacttctacaaaacaaagcaaaaacagtgaagatctatctcctatttcaacctctggcaactctccaaacagcatcccctcataacctataaacattctttcactttgtaatatagcaaatgacttattttttacactgaaaactttttttactctgttcttttgattatgatgtagttcagagtttggatccaggatgctcagacataataatgctcatgatattcaaggtcacttctatcacctggagatgtggctgcttcatggcttaaatgtgactgaagagttactggagtggggactagaacaagcagagaaatctcattttctaggcatcttaaaaggaaggcagagtatcatttccctgaagtatttgagtgcaggccattttaaaaccatagatagaacaggaaactttttgtgatcaaaaatatggttggtatcagaatggaagaaaatcttcacaatctatacatctgacaaagggctaatatccagaatctacaacaaactcaaacaagttagcaagaaaaaataaacaatcccaccaaaaagtgggctaaagacatgaatagacaattctcaaaagaagatatacaaatggccaacaaacgtatacaaaaatgctcaacatcactaatgatcagggaatgcaaatcttaaaaccacaacgtgattccaccttactcttgcaagaatggccataataaaaaaaataaaaaataaatagatgttggcgtggatgcgatgaaaagggaacacttttatgctgctggtgggaatgtaaactaatacaaccactctggaaaacagtgtggagattctttaaagaactaaaagtagaactgccatttgacccagcaatctcactactgggtatctactgagaggaaaagaagtcattatacgaaaaagatacttgcatatgcatgtttatagcagcaaaattcgcaattgcaaaaatgtggaaccaacccaaatgcccatcaatcaatgagtggataaagaaactgtggtatatatatacgatagaatactactcatccataaaacgaatgaattaatggcattcacagcaacctgggtgggattagagactattaatctaagtgaagtaactcaggaatggaaaaccaaacatcatatattcttacttataagtgggagctgagctatgaggatgcaaaggcataagaatgacacaatggactttggggactctgggggaaagggtgggaaggaggtgagggataaaagactgcaaattgggtttagtgtatactgctagggtgacaggtgcaccaaaatctcacaaatcaccactaaggaacttgctcatgtaaccaaacaccgcctattctccaaaaatctatggcaataaaaaatttaaataaatatatggttggtaacatttgaccatatgtataggagaggcacctgacaaccataactgaagcatgccctgagaatgaccgcattgtctaagaagaatgtgtgtttggagtcccaagctaaggaatctgagagtggccaacctggagtttcacttcttatccatgagggacattcgaatccctggcccatcccttggaacacaggccatacagggaatcaaggcctttagttttgggttaaatggaggttgccaggtggagggtgctaagtaaaaatgctatataactgcatgctttttataaacagtagtggtcttcctgtgtagtctgctatcactggactgccccatatgtaagtccccccaataaaccctatgtctcgttggctggcttcaggtctcttctttggcctctggacatggtactatccctgctggagtcaatagggatctggcatgacaccatatgacacctatcatagcccacaggacatgaaatttgaaagacatttctactcttgcagctcattgtttttgatggcatgtgccaactaagtactgacatgccacttggggatgagtgaggaggctgccccacccttgtgactccatggtgtgagcacctcctgcctcctgcctttcacctccactgcttggcctcttcaaaaccctctccatccaacctgctcctgtcaaatatgtctcttgtcagactgagcaatgtcagactgagagcatttatttcatgggcaggaagccagagtggctgctgtgatgtctgactgcacgtgtggtgcaagcacacaggggaagggggccttagattttctcaggtcaaggaggaccatgcggcctggccttctccacttagcgctgcatgagctcactgggctggcatcagaaagcccttccaaaacaggaagatacaagataaaacctccaagagagcaagggaggagagtgatgctccctctgggaagaatgcaccaagccagaaataaacaccttcatgaaaaatattttaaaagttaagctcaaaattgttttttaaatgcagctttactgaaaaaactataagctcagagtctctgctggggcaaggataaacaaagcacggttctttccaacaggaagccctcagtctagcaggacaggtaaatcaggcgagtgatttattttaaaagagaaagacaagggaaatgaacatttactgagtgtctacttcatggcaaagcttggagcagactatattacacacacatacacacacacacacaaattcacacacatctcattttattccactttacagaggagaaaacaaaagctcatagatttcaatggtgtcaaaagttacacggaagtagccaactttttactgtatggcaaacatacctgctagcaacagcttagcttgagcaacaccctgagagttaccctatggtttaagaggaatgcgtgttcagagttccaagctaaggaatccaggagtggccaaccagagattcattccttatctatgaggaacatctgagcccacggcctgtcccatggaatgtgggctgtcctggggagtcagaccctttgttttgggttaagtgaaggtttccaggtgaagggtaagtgaaaatggtacataaattgcatgctttctgaaggtggtctccgtgctcctgtccagcctgccaccactggaacactctgcatgtaagttcttctcaataaaccctatgtctcatttgctgactcttgagtctctccttcagcctcttgaacctggtgccatctctactgaagtgaataggggtctggtacgacaatattcaaatctagttctcactccaaagcatgtaattccaaagcccacactattcctacattatgatgcctatttcacttcatttgtctgactcataggaacctgtttaacctccttgttaaatagaacattataagaaatgctgccataccttaacacagcagagtactatataaattcagatggcattattgtaacatatctttcattcagttgtctgtgaagaacagatagtagtttatatatttgtgaaactcagcattaagattttgatattaaaaagacagggaaggatactctgtgataaatacgaattaggtcacatcattctatgcttggttatgctgaacaacacggcactgaaaaaacagagaatacctgtaagattatttcttctaaaggagaacctaaaggtaaacctagaacttggatgactctacaaataagggccctggaaatctacagggcgtcttccctttctaattttaaaaatataacaatcgtgtttactatatctattgtgaaatacaattacagggtactatgtaagatgctaaggggtggataaatctcagaataaataaataaaagtaactttccatggactgagggagacggtcaccatgcagtacgccacagttccagggcatgactgtagagcagggaaaagtactgcaaagacaccaatctttctttgatgtgtgtccctttcttccctttgagttgggttcctgctgatcctgagggaacccctcttgctgctcctctgcttgaccatctcagcgcctccttagagctccagctgactctcatcctgctcccccatgcagggctggttacatgatttgtggatcccagtgcaaaatgaaacaagtataaaaataggtcggatgcaggaggtggagcttgcagtgagctgagattgcaccactgcactccagcctgggcgacagagtgagactccttctcaaaaaaaaaaaaaaaaaaaaaaaaaaaaataggtcaggtgcagtggctcacagctgtaatcctaacactttgggatgcagaggcgggaggatcacttgaggccaggagtttgagtccagcatggataacatagcaagacccctgggcacggtggtgcatgcctgtagtcctagctacttgggaggccaaggcaggaggatcttgagcccaggagttcaaggttgcagtgagctatgatcacgccactgtactccaccatgggcgacaaagcaaaatcctgtctctaaaaacaaacaaaaaaaaaaaaagaaagaaagaaagaaagaagaaaagagaagaaaagtataaaaatagacaactgcagattccagactgaaatactgatgggtagaggaacgcttttccatgatatacccacagcaccttatcaaaaagttacaatcagacgcctgttcctgctttaacttttttcttccacagcacatttcaccttcacactggttgctcactttttggctttaatgcctgtcttttcctggattaaaaacttgatgaggcagggatgtttttctgttttggacattgatatatcttcagtgggtagagcactgctggcacataataggcattcaaatataaaacacctgaatcatacaaatggagaacacatgtgaaaactagctgatatagcaaactgaatggctagaaaactttacacaataataagggaatgaatttcctcagggtcatgaaacacattgatctgaaattcatggaaataactctaattatttattattttagattctagagaatgagtatcagctggttgtagacaatgaatattagctataagggtgaagatgatcccttataaaaatgactgcatttaggccaggcgtggtggctcacgcctgtaatcccagcactttgggaggctgaggcaggtggatcatgaggtcaggagttcgagaccagcctggccaacatagtgaaacctcgtctctactaaaaatacaaaaaattagccgggtgtggtggcgggtgcctgtagtcccagccacttgggaggctgaggcagaagaattgtttgaacctgggaggcggaggttgcagtgagccaagattgtgccactacactccagcctgggcaacagagcaagattccatctcaaaaaataaataaataaataaaataaaggctgcatttaatatttgatatctctagaaaacagttgactgaaagtcatccaggttctgattctaatggattacactatgtcattaattgtttccataattcagaacaacaaaagaatagcatttttatattaacagaaaatgtttgccttctataaaatgaatggagggatacaaagttatagagaactgcaagaacagatgagagatttactgaatatcgttggagcagttagaggagttcacaatagtccttacattcattacaatagttaacttacccccatatccatatagataagccctggaagagtattcagtagtagatggactactgaaatgaaaacactcgtcatcaacttaaaaaaaaattgtggtgaaataaacctaacaaaaattgtaccatgttaacaattttaaagtgtacatttcagtagcattaaatatatatttatgcaaccaatctccagaactttttcatcttgcaaaactgaaactgtatccactgaacaacaactccccctttccctattcgccagcccctggaaaccactgttggattttctgtctctataagtttgacttctccaggtgcctcatgtaagtgtttgtccatttgtgattggcttatttcacttagtataatgtcctcaagcttcacccatgttgtagcacggtaaacatttccttgctttttaaggcagactaacatcatcataaacttttgcaacttatgagaactgcaaactgacagtagcgcaaaagcatcagtcttactttgacatgcatccccctcttccctctgagttgggttcctgctgatcatctgagtggatccctcctcctgttcctctgttcggccaactcagctcctccttgggtctccagctaactctcgtcccattcctccatgcaggactggctataagacttgtggatcccagtgcaaaatgaaaacacaggcctcttgccaaaaaattattgataacttctgtctcaaagagatatttgtacattcacattcatagcagcattattctcaatacccaaaaggtagaagcaacccaagtacccatcagatgaatggataaaaaaatgtggtatatacatacaatgaaatattactcagctttaaaaagcaagggcattaggctgggtgcggtggctcccacctgtaatcccagcactttggggagccaaggcagacagatcacaaggtcaagagatcgagaccatcctggccaacatggtgaaaccctgtctcaactaaaaatataaaaattagctgggtgtggtggtgcacacctgcagtcctagctactcaggaggctgagacaggagaactgcttgaacccgggaggtagaggttgcagtgagccgagatcacaccactgcactccagcctggcaacagagcgagactccatctcaaaaaaaaaaggggcattctgacctatgctgcgacatgagtgaagcttgagaacattaggctaagtgaaaaataccagtcacaggaagatacactgcatgaggtacctagagaagtcaaactcattgaaacaaagtcagatggtgggtgccagaggttgcggaatggagattggagagttgtttaatgggcatagagtttcagttttgcaaggtgaaaaaagatctggagattgattgcaaaagaatgtgaatagatttaacactactgcactgtacacttaaaagtgatggagatggcaaactttatgttatgtgtattttgctacaattttacaaattattaataatttcaagacagcaacagcagaacattaagccaagctctggggccttctgaattccagaacctgtgcaatctacataagcatccaatatataatattagcagatagacaacatttcccaaagcaccttctgttgccttttcctacgacacacatcatgtctacttctcctgggtttccatttttctttttcttcacagccctctatgttagagatgaagaagaaataagatagctatatgttctatgcacataatgtgtaaatggcaaggccctaaagattctcagccatttgaaatgttcagcaaccagcaaaatgttcaaaattcctttttgtaacaaataatgtcacagagagaacagaagaaacatgtcctcgtgactaactgctgtaattcttatttgttcccaggctgacttttcctaagactggattaatttcttgttggaccactggcctgtgaagtgctgataaattaagtgattggtaaatacgataactttcaaaggaaaagaagggttaggaatccatctgctactcaggatcactgaagaatttcatttctgaaaacagaccacctgttaatttagttaagatctgatagtcagctgaacaactttggtggaagtcatccaacttgtcctagattacccagcctgtgctggcaggtctgagagtctggagaaagatgttaatgagttatctgaggacaacagctcaggcaatacatggttatagagaagtcccactttggtccttcaagaatgatgtttttacactgctgtcataaaacaaaactgaaagcaacctggagacattttagaagctcatatgtaagacacttctggttgtataggcgaaatacacttaaaaatacaattatggccaggcacggtggctcatgcctgtaatcccagcactttgggaggccgaggtgggtggatcacctgatgtcaggagttcgagaccagcctggccaatgcagtgaaaccccatctctactaaacatacaaaaattagccaggtgaggtggtgggtgcctgtaatcccagctactcgggaggctgaggcaggagaattgcttgaacctgggaggtggaggttgcagtgagctgagattgtgccactgcagtccagcctgggcaacaagagcaaaactccatctcaatatatatatatatataattctatgtatagtagttaaaagtgtgggctctggagccacactgccttgtgttcaaatcctgcctctatcttgtaagtatgccctgagcaatttacttagtttctttgtgcttcagtttgtacatttataaaatgagaataataataataatatttatgtcatatggtggttgccagagcaaataagttcacacatgtaagcacttagaacagtgcctactacatattaaatgatcactaaatattaaccattattctccctagctttaggaattccctagatcacaggtttggtgagtgatggccacagttgattacagtaggggaggacacctgatccaagaggccctaatataggcttgattgagccaatagattcctactctggggaacctgaattgggtgacccaaaacagtttgaatccctggtagggagaaaagagagcagttacacttgataatgtgcaggctgagaaagcagcttgactagttaagagtaatacacaacttgaggggagaaacaaaggtaggaaacaccaggtagccataggatggagataatgctctcatcttttcaggatttcatttcagttgccacaagccccagctgtattttctttcctagtcttagatttggggaatagtactgtatctttacaataaagtctgtattagtcaggataggctaagttatgcttcagtaacaaatagctcccaagtctcagcagcttcatacaacacaagtgtacttatcactctttgtggccactaagggttggcagtgaggctcagcccatattactccctcaaggacacagcgtgatggagacttcatctcaacagtctcaccacagttacaggaaggaaacatggcagtcacacactggcttttaaatcttctacctggatgtgattcatgtaacttctactcacatttcagcagccaaagctagtcacatagccatgcctcatatcaaagaggaaatataatctcaccacatgccaaaaagagttacattagaatattttgtcaatagctaattgactactacatccaccattagtacttcagccagtttgaatgggtctctgttccttcagaaaacaacatcagcaatattgactagaacacaaatgagatgtaaaacatcaccatctttgtacattttcctctcgtaactatgcttttctaagcataaccgacctttgattcagcagttggacagttgcctacatcatcccgttcttttcaggaacaaatgacagtaaaacctgaatatttcaggaatgaggtatttcaggataacaggattttgtgtgtgtgtgtgtacctaaaaatataacattagaatatctgaacttaaaaaaaaataacttttttggatgacaatattttaaaaatagatatatttctttctttctaaacggaatatacataaataatttaatatattcttaatcactgaagatcaacattatgaatatcagacactgtactgtgatgttcttggtaccaaataaaacattcattcattcaacaaacatataccaagtgctatgccagaaactgggaaatacatgggaaatagggccattcctgacctcaggcagctgtgcagggtctttgagccagactggttttttacagttattttcttctcctctattgctatcaacaagtcagtcaccacttctggccgccgtctgtacatctgcagtccccctgttccttctaacttttattttttaattctctaaagtcctagaaacaaagcttgttaggattacgtgtaaagtaagagtaaataaacctagttgtaaagatgccaggaactgtcctatgaataaaacagaagagctttggtacataatatttatgctgcttgtttttaggtcttttctgtatagctcatgctaccacagagcagaattttggataagcgaagtatcactgtatcataaacgtagaggtattaaacacctagctttctcatttccttggcacaatgatctttgatatattttttatgtttcataaaatactgctttgtgctctttaaatcttttccttaattaaaaaaaaaacaactcttcgtattaatatgtgatttccttctaatagtaacatttaattacaaatttagaaaactacataactgaagtaacacttgcaccaaatggattaagctctgatatggactgaagtgtgtctcctcctcaaattcatatgttaaagccttaatccccagtgtgactgcatccttaaagatgggatcttttggaggtaattagggttagatgaggtagggccctcatgatggggttagttaagtccttataagaagagacatcagagagcttgccctccctccaccatgtgagggcacagcaagaaggcggccatctgcaagccaggcatagagccctcaccagaacccaaccatgctggcatgctgatatcagacttccatcctccagaactgtgagaaaacaaatttctgttgtttaagccactcagtctatggcattttgttacggcagcctgagcaaactaatgcaagctccaagcagtttcttcttagagacaaactttatttgtgctttttcatttttttataaataagttgttcttttgccccaactaatcattccttcatttttggctcataaaagtacaggaagtctttagtaaaagtctactgccagctattgccataagtgttaggatacttgaacaatagctttcaaatttagttctttttttttttttttttttagatgaatattgttttgtcgcccaggctggagttcagtggcacgatcatggttcactgcaacctccacctcctgagttcaagtgattctgctgccttggcctcctgagtagctgggattatagtcatgcatcaccacacctcgctaatttttttatttttagtagagacagggtttcaccatgttggccaggctggtcttgaactcctgatctcaggtgatctgcccacctcgacctcccaaagtgctgggattacaggcatgggccaccacacccggcctcaaatttacttctattattcagataagaacatttcataaacagacaattggacaataaatgaaaatgtaatattcaggctagtccaagcgatgtttaggtaaaaagtctattaacttgactcatactataaaacatctatctttctcttaaaacagtacttcttaactgtttttaaagatttttagggatcttaacacatttctctccattaaacatatggcatatgtatattcattcgttcttataatttctgaagttttaaagagaagtcaccagattaagaacctctgccccagagaaaattaagcaaaaccaaactgagtgttttcagcaaagcaaacttcattcctaacctttaaatggccataacaaaatgcctcagtgaccagttgctttgaattggtctcatctacaacctgcgagctttgctcagccctctgatgtgaagtaacatcagatctctagccataaagccattcccttaaagttccatcgttagtcttttctatcttagttcaaggtctgctggcagtgatggactcatcagaatctcaatgtcctcatagatagctaaaatacgatcccaggtagttcaaccatatgtggatttaaacagatacctaatttgttccagaactactttccatatcaataccttgaaaatactttgtaagttaaatctaaaaggaggcatggaaacttcctctacaaatagtgaagctagtccaattcttagggaaaagagacagtcattaactctatatttagagctaggcattccattcccccaaactactctctcatcagcctaattgcttgaaattcctgttcttgtttaacactagggcaaagcatttcattttaaatttgagataaggtttatactccaaataccctgaaaaaggtaatttagggtattaggaccactttaacttggacatgactatggagggggtacaacagggaggcaagatgctggatgcaaacctagataccaaagacaaaatgaggcacacttccctcactcccattttttcctaggacaagcaccataaggagtatcagttaattgaaaaagtctttactagatgccaggagctgtgtcaggtactgaggttaaagtgatgaggagaatactgcaaagcacaacaccatcctgacaacatgtgagaagctcaaagcccatcagaagaaagagacaggccctttacaaatgaacataatgatagattgaatgtgcgatcgtaaaacgaaacaacgcagagcagtttttaacagttgcgtggtgggggaagggagatgcaaataaaaaagaacatttgacttggatttgtaaggacatgaagaattttgccaggtggggaagtggtggaagggaggagttatttcaggcaaaggcaacataaaagcatggcacagaagcatgaagagtacatggagtgctcatggaaaatcactgaaggctgggagggagccccagtggattctggtggattgcagcctctggcgaaggctgaggttgcctctggaccacattactcccccatgtatttctttatagagacatattattttcaactcttttgagaagaaacattcatactgattgtttcttatttaaactatgaatctattaaaatatcaggcattcttcataaaaatcattgataaaaaatgaattaagagtacagttcatttacagtgttttttttttggaagttaaaattgagctcctgttataaaacagagactgtgtggactccttagtgaaagaaactcagttcagaggacaacaggcgacagtggacaacctggtcatattctgtggttagtcaaccaagagtttgattccaccagtatccctatcttccttgcttccaagcatactatttatctttaaattaaatactaaatgaataacatgtttgtgattgctaattcggacatgggtcacaccacagttttacaccttcgaatacaagatttctgcagttccactacatgtccactagaggcctgtgaagagcttttttcccccatcacgtagagtctgataaccaaaaaggccagaattaaaacaaataagaaatattgattagacacgagtaagacaaggatctaattggtacgtaacctcacagtaagtatcataattgtggataaaataatcaaaatgcaacattgtttcaaaactccaagataccaaattgcaaaacttatgaaactactcatatgtaaccacaaaagcaaagttaaaagaagtagggctttgaagacttcagcaaccattccaaaaggccagcagactctggcaggctttgactaggtggaagactgcaccaagtggtgaagcagcctgaataaaaattgccagcagcctgtatgggcttctagatcttcaaatgcatactcaatctaaaaggcatgcaaccaacggagggaaaactccttggtgggaaagtaaacaatgcagtgatttaaggcagatgggctgaaaagggacttcctaaatagcgactccatggaagtaaacaggggaagacagttgagatacggccaggacactgagatgacacagaccaaaaccgaccctatggtgaagactgtggaaactctcaacttaagaggaaagagggcaacttaaagcaaaacacttaacatattcgatttgccaggacaaccgcaagactgcgtgagcactggaaaaattaccagaaggacaagatgccctgtaacatccctttatctcttgtcgaactcaaaacagactttcattcatttcatggtctgcttgaacaaacacaaacaaagacgaaaaatactaaaagtcacatcacccgtgccaggcatggacacgcgagtgcacgcgtgcacacacaccacacacacacactacttctagtctatttacagaaatggcctgtttttcactagctttggttaattagcaatcagaagagagttgtatggggttggaagaaagaaccctttgtttggaaaacctgtgaaaatattccctcagaagcttgtaactttccctacgcatcaccctggccctgaggacaagcccctgtgccagaagcctcagtgaggcacacagagctcacattcaaaggcagctctctttgttgtcccccaggagttaaaccttaatgggttcacaatttgcaggcttttttggagagtggcttagtggtggttgcctgctgccagaaatggagcagagacaaaccctagtgaatcccacagctgttgtggctgctccattggagagaagagcagttgcctgaggcatttcaaagacaagcaagaacacagggagacattatgaggcctggaagcgaatttgcaattattgggagcagatggtcagtccacatggggaagaaggagattgtagccatcgttctccagtgaagaccatggcaaatggtaattcactgagtcttatgtccccagataaatcttgtattggaaaagtattcagctgcaacataagatcatcatctgcagctagttagttttactgtcacgctcttgacttctaaacctaaacagccacaacttggacaggaaaaagccagtacatgcacatcctaccttggttagaaagaagaagaggcgtggctgctctggtagaaatagggagaatactcatcctggcaccctgggtttcctggaggcagcctgcctgaacactgcctccaacattactttgcccagccctttatttcagaaaaatcttcattttaaacaaacattcatgaatgctgggatactgctgaatgattttgagagtggagctttcataatcttcttttgtaagctatatccactttttttcatcaccctttccggtcaagggctgctttctgatgcacaagaattctcttttgctgaaatctcagcctatttcctgttatcctcatgttgattcatctgagaatcacattatctcttctaaaacactgtttacttagtccattatgacacgtaaggtcggtctttactcattttatgtttgaatgattaatttgttcagtttatgcaaagtactcttaagtacccctgatgtgcaaagtgccagcgaggcactgaggaggatggaagaaccataactgcaagatgctaagaacctggtgaaggaagcagaaacacttgggaaagaactctaatacctgtgaagtgccaagatacgggcatagtcagaatgttgtgggcatataaagaagagagaaaataatacttatttccaactggagagattgggacactagcttagaaggagatagagtttaagttgggctatatataggatgacctaccatcccagttttaaaacttaaagtcctgcatctcaggacactcctcagttggctgagtgagtgataaaggacagttgtaacttcaagtttatctcaagggtgagacacagtgaagaaagtctcaatggcaatgggctgggagtggagatgaggggctggtcaggccctcaagctgctgacttggcagccatcggtgcataaggccctggacagggtgaagattttcaggacagcagggccaggctctcactgtgccatacattgcacaaggcaccagggagacgaggctcaggcctggcacatgggtggtggctgagtggctttctttagactgggtatgagctctggtgcttcgtagtcctgggactcctataacacacatgagggcttactcaggctggcctcactgccctgcaggctagggcattagagaaccctacattatgaatgagggactggaggaggggcagatttgggggagttgtggtttgggccatgcgcatcatcttgagttgaaggtaacataataaaaacttgtggcatgcgttcacatttaccatctcactttggagctctatttagacccacatcttagaaaactaactgttaaagaatggccttggtcacatggccagcagggagaaagctggggcacaaactgcagtctctgtttctgactgcaggtccggggcattcccataacttttccagatgactaaggtttacctgaaactttaaagattttaacagtttcatgattcagtgtcattttagtatatagggtcatcccttggtatccacaggggattggttccaggctcccctcacccattctaaaatctgcagatgctcaagtccctgatataaaatggcatagtatttgcatgtaaccgagcacatcccgcatatattttaaatcatctttagattacatgtaatacttgcttcaatgtaaatgctatgtaaataggccaggcatggtggctcatgcctgtaatccaagcactttgggaggccaagatgggtggatcaccttaggtcaggagttcgaggccagcctggccaacatggtgaaaccctgtctatactaaaaatacaaaaattagttgggcatggtggtgtgtgcctgtaatcccagctacttggtaggctgaagcaggaggatcacttgaacccgggaggtggaggttgcagtgagccgagatcacgccactgcactccagccttggtgacagagcaagactctgtcttcaaaattaaataaataaataaataagctatgtaaataattcttgtatttaaaaatttcttttattgttgtacggttattcttttatttttaattttttttcaaatatttttatctgggatttgttgactcacaagtggggaagaaccctcagatacagagggatactgtactctgtttagtcatctagatcactggttagtgtattaaatcttatatatcccaggacaggtgaaaacacaatcactcaatttataatctctcatctcttctcttctcctccagaatcttgcagtcatgctccaaaaactttgacgacgtgtatctgaaaccagcccaattgtcccatagaaatgatatttgaatgtttttgaataaacatagaaattgaccctctgaattaaaactagaaacttacacttgtctattctgagtgccttcctcaggaaatcaaccctcactcaagggaatgaaactcactcaatcactacatccagacaatgagatacaagacccctcattcatcatgattgcttccttgttcctccctaattccctgttttcctgtataaacctcccaattttagtccattactgagatggatttgagactaaatctcccattctccttggctgcaacacctgattaaagccttcttctctggcaatacttgttgtctcagtgattgacattctgtgctgagaacagcaagacctagaccaaacccctggcacttcagtaacatatcaagcactgctcaatgtgatagcgacaggaggcagccaaatgcctcagcagataggggcaggtactgggtgaaaccccaactccaagccaaagagagtttaaagcctgaaagtcaagctacaagttaaatcctcggattggactgagagcttgtcttcctgtttggtgtgctttcctctgatggatccccacccttcatctattttacatatacctaccctttcctaattggttttctacactgtcaggcccacctttgagtggtatcttcgctttaaccttttttgcatactcacaaaccaatcagtatgcactccccatcctgtgcttataaagaccccagactcagtcattagaggagacgacagcctgactgcagggagagggacaacctgacttcagggaagacgacctgcccttcctgtcccttctccagttctcctctccacccagagccattttcagcccttaataaaaattctctgccttcaccatccttcagttgttcacatgatctcctttgtcttggatgctggacaagagctcaggacccatcaagtgcaggtactcagaaaggctgtaacaccagccctttgcccttgttggcagagcagccaccccacacgatgaggcaaggggccaactgagctgttaatacaagtctgcagatggcagaactaaaggagcactgtaacaccccctctggggcttagggttgcagtcatccttacctgggtgttgctgcattcccctcaaggtgacacacctggtctggatgcaggccctgcacagaagttgctcctgtgtcagcagccggagcagccagccggatcttgcacttgcttgctcacgtgctccctcctgcaaggggttgagcatggcagaccgaataggtggggtgccccttctatgagtctgttgaaggggccaagaaaaatcctgcatcaaatgcaccaggccctcactgtcccaggcactgtggatgagccaaagatatgtatgatcatatctgtgtacatatgtggcttatagcatacgtacaaatagaaaaatatgccagactggctgtgtctgaatagaccctcttgaacctcttggttccagcccccagtgaagtaatgatttcatcaaacagatgcagaacatctacccctcgagatggagaactactgactggtacccgcttttctggtcataagctgagttttctgcccctttgtcctcaagtgactttgaattttgttcttttgagaaaatgctcctgaggatacaggaacagagtcccagctattttcaaaggtaagaaccagccttcctcttcctgtaactctgtgtcttcacactcatcatgccatctgctctcttccactcatgggctctctcaaatgcttcactgacattccccttgcacaaggccgcaactggccatggagttctcattagtaaaatggtgctactcaatgttcatccaccttacatgattttcgtgaaaattaactatgaagtttgagggacttttttaatgttatgaaatgttagtctagtttcttataactttttttgatgaaagcaaaaatactgtgattttagcattctgcctccaacaaatctacctctctttggcctgaggcaagtcacctaatcttatatatcagtttcctgtgtgtaaagcatggaaaataattgttacctggctcactgggattgccaggtttaattagttatgactttagaaggttgtaaaaaattgctttgtaaactattcataacaatgatggcatacaactccttctgatatctttattccttctctgatttcttccatatccagttcttctgctatagaaataaaaagtcattagtggtgaatttgtatgtttttatctgcatttcttcctgttcaatattttaaggatcttatgtattatcacagaaaatgtaaaaatgttcagaaaactccttcctctggtctcttgaagccattagtacagtggttttcaaagtggcgtcttcaaactagcatcaggaatgcttgagtccccagttccccaaatgtgcaccagggcactctggggcactgtagcaaactcacacaggaggcttgggatattttttaaattcttgagaggctcacaagcaacactggacatctgtcagacactgagcaaactactagtccaaagtagttcctgctttcaacatgaggtcctgtcaacaacattcctttccatgaggccatatctagctggatttttggcagatgctgtgataaaaagcaggtgctatgtgaaaatcaatgtggaacagaaaataaggctggcaataacccatctgattcccaggtttgagaaactgtgcagtgtccagccagtgcagacatctcattattaagtaattgtggttattattaatgaaataaaatattatttttctttcaatttaagggtgtttttaaaaatagctgctaagttgttaggacataaatacttctccaggtgtttcggtctatgtacttaataaatgcaactgttaggtatttcttttggcctagaaacagagttaccagaaaagtctggtagccctgtcgaagggcactgtgcaaaaactactgaggccttgaggacaccaggagccaaggaagtctggaaacctctgacatgagaaattgctccaaatgcaaattcttgggtcccctccagacttcctaaatcggaaactctgtgggtggggcacagtgatctgtgctttggccaggcctccaggtgattctaatgcatgtgcacatttaagaaacattgcattagcagcttatgtcctaagagcagcaggtgtgcttgggcaggtggatgttccgttggtaaatgaacatcaggctaatctcacagtttgaatgagaaggtacagaaatgacccaactgggggcaaaaaatccaccccccaaatcagtttacataaatacataatgcatatatcttgctctcttaaagctcattctagcctcttaaaattatgaaaacgtactgtttttattacaaatcgtgagtaatttgtgctttctcttgggcattttggggaacccgaagtgccttttgatttttgaagattgaatcactctattattgaatgcttcagattgctgagaatgaatcatatcattcctttcagaagacagaatttatggctggccagtaaggcatgatccaaaatctttggcaggaatctgatttgcattctcttctgacttggtagcaagcaggaccctcctcaaacgccttgttagtgtttctgtggagaggaataaggaaggaccaggtgcgaggagttccctgggttcggtggaaacgcatggctgcgtgagtgttagagattttgaggaaaatctcctgtgctgaatagcagacctcagtttttcatcctggttaatcctcttaagcctttgtacatatgcaaagatttccaaactttggagtgctaaatcagaagctttcagcaacagtcttccttggcatccccctgtttccttagcaatatggtggtctaatgctgagcataaggaagccagttaggaaagtgcatctatgtggatacaggggaagagcaatccttattatcttgagtcctctgatgctgggatggcttcaatgcttgatcttgaggtaacagcaggaatcaactggtcttcaatcccttgcggacagtgaggacagtgcgttacaaccactctggctcacaatagctactcaatagctttcttcaacgttgttgcattactgaatgtattacttttagaaattaaattacagccatcttctgcagttggtataaattcattcctttctcttaaacatttcaatctcttcttcagagtttgatagtttttgaccactgattccttcctgaaattctttcttccctaggatatatacccttatggaattacttttggttttcactgctcaattttcttctttcttcctcttcttctatatgtactttccccaaagatctacacgttaactttttctcttttcttcctaaaccagccctctacaatcttgtccatgtcaaggaattcagctttctcctagtcatatcctaatctctttctgcactcagccccactcctggaacttcactcttgtcctctttcaaagtcctagttccagatttctaacttcttaaagaagccaccactcttccttaactaggaaaaataattaaataatgaagtcatgttgtaatccctgtttttccttggcctcactttcaatcggttcataaattcataaaacatctataaattgagtccctgccagcaagaaggcattgtgttagtgctgcaggtgtaagacttgggccctgccttcaagaatgtaaacgagcctcaatttataacatcttattcctcctttttgtttctgccattgacctgttttgcagtagtctcacttcccacatgaactattgcaatgaactatttttctggtcttcctgcctccagcatcttgcttctccagttaatcctaactttggtgctagaaaagacatttctggatcataccactcatcagtgtgatcccttgattaaaaacttcccatctcccccctcaccaccatcccctacacccatttgactacacttaccaaaaaattttaaggaaaagcttggcacaatctctactgatgttctgagaaacaccatatttcctctgaaatgatttttgcctttaaactataccaattgggttgagaagagtctttatggcttagaatcaaatgaaacattttacctggtgacaaaaaccaagagtatgttagattcaaagaactgtttcatcactgtctgaagaaatgtttcattagtgtcttcataaaaagagatagacaaaattatgtctttcaagaacacatcttatgtaaacgacacagagtaactgatcagtatcacttatgagtgggatagtattaagtagaaatatgttttgagattagctcttctactgagtagttacaggtgaccttggattactttccagctcagataatctaggactctctttcagatagcacttacctttcttttacttactcatccattaatacagcaccacataaagccctgagaattcaacattgaacacaacagacataatcctcactcacttgggtttttctttgttggtccaactccctggctagtttcaatggcaaaaccagatttcaagactaaagatttatttaatagttaaaacctaaacatctgcttgtcctaaggcactataatggactaagaacggctgcccaagagattggaataaggatggggtcaaataaggtgaaagatttggggaaaatgaatatatatcccccaaaaggtaaagtgagtgataaaaaagtttacattagaaaagcagcatagacttaaaagtagatcatctattttatatgtatgtttagtaagaaacagactagtgattttgaaattttggttggggatcccagggtgtaaatttttgccatatgaaagaaagtttcagttttaggaagcaaggaacagtagaaaatctatgagctctagagtgagaaaacctgacttgatggtcagtgctgccatttagtagttgtggaaccttgagaaagtcacttatcatccttaggcttgagttgattaatttgtagcaataataatagctaatgtggaagtgcatataatgagtcaagtgctttatatacattatctctgtaatcctatgatatccccatgaggtagcatgtttttttattgtggtaaaaaaacacaacataaaatttaccatcttaaccatttttaagtgataaaaaataacttcttaatgtgttaagaggtaacacattagtgttttttctatgtacatgttgtgtaatgggtctccacatctttttcatcttgcaaaactgaaattctatatcaattaagcaacaacctccccatttccccctcccccccagccactgacagtcatcattctactttctgtgactatgagtttgacttctttggatacctcatggaagtggaatcatgtcgaatttgtctttttgtgattggcttatttcacttagcataatgacctcaaggctcacacacgttgtagcatataacaagatttccttcttttttaaggctaaatagtattctactttatgtatataccacgttttcttcatgctttcactcatcatcaatggacatttaggttgcttttacctcttggctagtgtgactgacacaacaatgaacttggggtgcaaatctctttgagctcttggctttaatccttttagagatatactaagaagtagaattgctggattatatgacaattctatttataatcttttttaggaacttccattctgttttccatagcagctgcactgttttttattcccatcaacaatacacaagtgttccaatttctccacatcattgccaagacttcttgttttgttgtttgtttgtttgtttttggtaatgaccacccctatgaatatgaggtgatatctcattgtggtttttatttgcattttcctgataattagtgataccaagcatcttttcatatacttcttggccatttgtatatcttctttgaagaaatatctattcaagtcttttgcccatgtttttaaatcaggcaatttgtttgtgttgttgttgttaagttgtagaagttcttatatattctagatattaaccatttatctgatgtatggtttgcatatattttcttccatttcataggttgctttttcaatcttgacagtttcctttgctgtgtaggagtttttaagtttgatgtagtcccatttgtctatttttgctttgctgcctgtgttttgcatgtcatatcaaataaatttttgcaaatccaatgtcattaagcttttctcctgtttccttccagaaattttatagttttcaggtcttacattcagctattttatccattttgagttatttttatatgtggcataaggcaaggatccaacttcattcactggtatgtaaatatccagttttcccatttattgaggagactgtcgttttctcattatgtagtcttgatgagctcattgaagaccatctgaccgtatacacgaggatttgttccttggctctctattctgttccattgttccatatgtctgtcttcatgccggtaacatactgttttgattactgaagcttagtaacatgtttgaaatcaggaagtatgaagcctccaactttgtccttctttttcaagattgttttggctattcaggatcctttgagatcccacatccattttagaattttttctacttctgcaaaataaaaaaatcccattgggattttgataggtattgcactggatctctagatcactttgagtagtataaacattttaacaatcttgtcttctaatccatggtatgagatttccttccatttacttgtatctttaatttctttcagcaatgtctgcagttttcaatgtacaagtcttttgccttttggttaagtttatccttaagtatcttatccttaaggatccctaagtttatccttaagtattttatccttaagtatccttaagtttatccttaagtattttatccttaaggatccttaagtttatccttaagtattttatccttaaggatccttaagtttatccttaagtattttatccttaaggatccttaagtttatccttaagtatccttatttccttttgatagtactataagtagtattgttttcttaatttcattttcagattgataattgttcatgtatagcaatgcaactgatgttcgcatgttggttttgtatcatgcagctttgctgaatttgcttattagttctaaccattttttggtggagtctttattgttttctacatataagatcatgtcatctgcaaacagagatactttcatttatcacttcccaagttggatatcttgtgtagggtgccattattaagattgtattataaatgagtaaactgtgttctgtcatatttctgaatttgttgtgaggattccatgagcttacaggtatgaaattgttttgtaaactatttcagggccattgatttctacaatctattaagtgtcaaaacagacctctattcatagaaagtagatctaagttaattcttagcactaatggaggtcaataaagatagaaacaatggaatgagtaaaaggaacctagtgaatgtttaaaatctagctaagaaataacttgggtattcaacacaatagaataaaaccgtaattgatattaatgcagtttttgtattaataaaaactgcatttttattaatgttaaactacaacaaaagctatgataaagcagttttagttctgaatcaaaggtatttttctaggcaatttcagtcatgtatgtataaatggaaaataaaatttaattaaaaagtatgcccctccccctccccctccccctctcccctttgcacggtctccctctgatgccgagccgaggctggaccatactgccgccatctcaactcactgcaacctccctgcctgattctcctgcctcagcctgcccaatgcctgggattgcaggcgcgcgccgccacgcctgactggttttcgtattttttggtggagatggggtttcgcagtgttggccgggctggtctccagctcctgaccgcgagtgatctgccagcctcagcctcccgaggtgccgggatggcagacggagtcgcgctcactcagtgctcaatgttgcccaggctggagtgcaatggcctgatctaggctcactacaacctccacctcccagccgcctgccttggcctcccaaagtgcagagattgcagcctctgtccggccgccaccccgtctgggaagtgaggagcgtctctgcctggccgcccatggtctggggtgtggggagcccctctgccccgccgccccatctgggatgtagggagcgcctctgcctggccgcaacccagtctgggatctgaggagtgtctctgccccgccgccaccccatctggaaggtgaggagcgtctctgaccggccgccccgtctgagaagtgaggagcccctccgcccagcagccgccccatccgggaggtggggggcagcccccacccggccaccaccctgtctgggaggtgtacccaacagctcattgacaacgggccatgatgacgagggcagttttgtcaaatagaaaagggggcaatgtggggaaaagaaagagagatcagattgttactgtgtctgtgtagaaagaagtagacataggagactccattttgttctgtactaagaaaaattcttctgccttgggatgctgttaatctataaccttaccctcaaccccgtgctctccgaaacatgtgctgtgtccactaagggttaaatggattaagggcggtgcaagacgtgctttgttaaacagatgcttgaaggcagcatactccttaagagtcatcaccactccctaatctcaagtacccagggacacaaacactgcggaaggcggcagggccctctgcctaggaaaaccagagacctttgttcacatgtttatctgctgaccttccctccactattgtcctatgaccctgccaaatccccctctccaagaaacacccaagaatgatcagtaaatactaaaaaaaaaataaaaaataaaaaaagtatggagttaatagttttatggttaaaactattttcaaaacaccttttctttactatgtattgagtctgatatatttggaggcttagctggtgtgtctttgtctgtttttctgttcttagagcttcctagtaattcctctaagttagcaggtatatattacttctcactgtacaacaaaaacagtcccagtcttttccaaactgctggctcctgcaagcatgtattcagcctcagaaaacacctctccatcacaactctccttcctggatgatgtggctacaggaattcctattcctactctattgctgttttgccaaggaaggccccctcattccatccctaccgcccactccatagcacagtgcacctcctcttcttcctcatggtactctttggtggacacaaccatactcagctacccctcctttaaataccacaaacattcattcaacatttattgagcacttacatgttctaaagctctaaagtacaaaagtaaatagaaatgttggagtgtggaagggggaatggtaggcatcaaagagaggcatttcagagtaaagactttcctatagggaaggcacagattcctgccagtgtatgaccaatcccacaacctgtgaggagtgtagctcctcagggtgaagagtacctgggtgtgggaagggctacaccacagccaagagtgaagggcctcttatgccaccttaaggagttcagattttaatcctatgggtcatagggattttcaagtatggaattaatttttttttctcaaaaatgatacctctagcaacagtgtgaaggatgaaccataaaggacagagaatccgtgtggctgagacacttgtgacaggccagggataatggtgtcccggactcagcagggagtggtggagatgggtgggcaaaaacagggtccccgggcccttactgtttctcacaacattttgtttccttcatagaacttggagattctcatattatcagtggagtgcaagttccttggaactatgtcagcttcgtttacctgttaagcccaggtctggcacctgtaaggtatttaagcactggtttaaaggtggaaagcaggaaccaacggctaagagtgagatgagagtaagggagtatatggcttccaggtctctaacttgggcacttatttggatgggaatagaggttgagtatcccttacctgaaatgcttggaaccagaagtgtttcagattccggctcttttttttttttttttaatatttgcattatccaaaatgcttcaaaatctgaaagattttgaatgccaacatgatgctcaaaggaaatgctcactggagcatttcagattttggagttttggattagggatggtcaacttgtaccttcatctgggaatgccgataccatgaaagctgaaaatcaggatgtgggaggtgaaggaggagagttagtaagttctctgtggatgaggaattagtctcaagagataggaaactaaagcttggataggttaataatttttccaaagtcacattactgggaaatagtaaagcgacactggaatccaggtcctctgaacttcaaagttatcagtcaccctctcactcctttcaccacctgtcacctctcaccactcaccccaccagtcctctagcagactttttacatagactactgctgcgataattcctcacatccctgtatctctttgaaatttagccttgctgctcctcttatcaagaagagccctcaaatctgggtttggccatgccacttgttttgaccaacaaatcaagcagaagtgatgtgcaacttatgagcctagggctgaagaggtctttcagcttttatgcttaccctcttggaactctgagacaagaagcccaggctagcctccttggggataagagaccacatgtagagaaaggccaagctgacagctgaaaccaaccacgaggcatctgagggagacactattaggccacaaaactccatcaagttgccaatgaattgtaactgcacaagaaaggagaaaccagcagaagaactcaacagctgagccctgaccaaattgccaacatacagaactgtgaaccaataaatgactgttgttttcagccattaaatttgaattcggttgtcatgtagcaataggtaactgacacatccctacatccaaatacaacacattaagctgtctctgaagtgaggaagaaagaatctccttaacactggcaaggaggaaaaaactgtcaaatgttagggacagttccagacatgtccaattattagaaacataggctcccttgctcttagaaataaaaggaaactattaaaaccgcagagctgagtttcactgtgagttaaatacgtcattgtgggtcagctggaaactcaccatcctttactattggttctagcggaaaattttctcatttgaataaaataatttataaactcacttgctggcaaactgaggataatttgtcctaagacatgacactgcattttataaaatcagagtaaacagaaaaaagacaagaagaagacagaacacaatcttcatccgcacttacattctcgcaggaatgtttatgaaagaaaaaatatcctgtgaatgcaaaagactcgtgctttgggaagagaacaacttctagctgtaattgaatcatttggggccacattctgtgggtaccctaaggtgattatgctcagaatggaggctttcagaatgtcatttagcaaaagaaaacatggctggataccagtaataaactaatgcccttgagctacttattttttatggcaaactaattgaaacatacaaattgtataatgttccctgcttgtgagaaggggcaggactgaaatgcagatgattgattctgaaatggagccactaagataaggtttcttcttcaacagaaaatatgttactgatctaatttctgtgcagccaagataagtggaactgtcattctgtcctattggaaagaacctttgtcttccatgagaaaacaaagctgcacagatacatttttgtttctaaaatagattttcttttctttcattctcccccaaccttttttgtaaagtaatttatagggagttgattaaattaactggtaaactcaagaggccagattctacttttaaatgcatgcccatggttactgtgagcagaagaatgatatagcctaaggacaataaaattacattttattcaccgtacaagtaaggatatttgaagggtgcaggaagggatggggtgggcctgttatccagagaaacattgtaatgaataagctcaagcttggcaattttttaattcattttttagtgtgtgggtagaagggcaactgcactgtgttcatagacataaatgctttgtctgtctcttgaagcaaaagataataaatcccagggttataatttaagacatgcgcatcaaagagaggtaaggagaagtgacttaagatgaataagtggctgtgttgcttcacaaaagaggaaagcactaccatcaagtcagggttggctagaacgttacctattcattcactttctatgcacctaatgtaccccagacaggcacacacacatctctagtccacctgagcttctcagggctgtatctttgtctaagtctgtatgtctaggaacagacaagcatcttctaaaaccagccatttgtttcaacaatcacacctgcttaaatttaagtttcatatttcaataggtttcatacccctatcaacatctttttaaaaattttattaattctattgaataaatatttgttgagcactttctgtgcaaaacactgtgctaggtagatccaacgaggatccaaagatatagaagatattctaaaccttcactcaggttattagacaaataaaataataaaaatattgatgaccataaaacaaaaacaaaaactaagagagagagagagaggagagaataaaacactatgcggtgggatttcaaaagcaaaaagaattatctgttggcaagagaattaagattgcttcttggaagaagaccttgaaggatggataaaatttcaaaagacagtgacaagggtgtggttatggagagagttatagattggtccagtttaaaggaatggctgggctgggtgtggtggctcatgcctgtaatcccagcactttgggaggccgaggcaggtgggtcgcctgaggtcaggagttcgagaccagcctggccaacatggtgaaaccccgtctctagtaaaaatacaaaaattagctgagtgtggtgacacatgcctgtagtcctagctacttgggaggctgaggcaggagaatggcttgaaccctggaggcggaggttgcagtgagccaagatcacaccactgcactccagcctgggtgacagagtgagactctgtctcggataaataaataaataaataaattaaataaataaataaataaataaaacggctggaaaaaagtccagaagagaaagtgcggcttggtttgtctggagccaagataccaggcggcagagagtcagaatggagggacactctgagtggggacttagtactcaattcagcaggcgatgggggcaacgtgatgagcactgtgctcagatgatggacaagcagacacgaattcaacatgaggtctctgcaatgccgtcgccaggacaactgctccatatgaccagtgccctctcattttttggagctagtcttttcataacatgtttcagggtgcctaatatacgttatattagatataatatatatttctatcatatatttttgcaatttgctgtatatataacagacaccaaatataatatcaagtacaatatcaaatatattacatatctattgtattacaaattttcaatttgctatatattagatatcccagttatatatgtatatgaatggccctcacttgtaagtgctggaaccgtgattcactcactctactgctatcgcccaaaacgcacaattctcagcactggctgaacttcccatcacctgagatgcttacaaaatagtgggtgctgagaccccaattcaaaccactctcagttgaggtgcccagacaccccaggttttcatgaatggccaggtgattctgacgtgctaacaaggttggggaccactgacacaaagggcttttcatgtgggtgatttacctcatcttctggggggtccttatatactgcacttgaagactcaatgaggctaaaaatattaattttgaataaatgggcatataacattttaaacttacatttctattattgtcttgactttcgaatgagtcagggctatcgttaagaagaagaaggctgggcatggtggctcatgcctgtaatcctagcactttgggaggccaagacaggaggattgcttgagtccaggagttcaagaccagcctgggcaacatagtgagacctcatttctacaaaaaataaaaaattagctgggtgtggtggcaaccagctgtggtgagctataatcctgccactgcactccagcctgggcgacagagtgagaacttctctctctaaaaaaaagaagaagataaaaaaggaagaataaaggaatgtaatttaatagacttttaataacaaaggaatttttagtcactacttaaaactggaagtctatggcgatcctgggcatgtgagagcattaagagatttgtgagctgtagcttccagtgttacctaccagttggggtccagacttgaatgatgggtggggaaggagcagcagggcctctggccttaggtacagtgactcccactccacactgctcccccatccctctattcctcttccctgttttttgtctttcttttctccttcatttatcttcttttgttttggtattcctcccattcctttccccttttgcttcccatattttgatttttcttcttcctccacttctccagtcactttgtttctttctcaccattatcctttcccttattcagtgtttgggtgttcccaaaacacctgaattacataatattttaaattattagttgtatttattgaatgagcttgatactccctggtcttagattttagggtggcaagttgaacatatcatctagttttctttaaaacaataaattttaaataagctacttttcactaataagttgggaaatcatttctactaaagaagagaaaagaaaacaaaactcctttttccccttgccagatatttctgataaaggaagataaatgagtactatattttaaaggcagccattgcaaatgtgtttcatgaaaaataggtgacatgctacatgacattgaaatgactgctagctttatacattaaaatgaggaaaaaaaagttgggaacacgataacatcatttcctaaatggtaggaggatttcgaagcagggaaatcaacagacacacaaaggttatcactggccacaagcagctgtcaataaattccaatcctaagagaacacactaactcacgatgactcagttgaccaaaaagaaaacacaatagtatctacacaaggccttgaccttacttcttcattttgtcactgtttcttccgtctgtaatgggtttcttaatattcagtcagtctatgtctacgatttcttaagtatgaatctaaaaatgcatttcttccaagaattcgtctttgactccacctcctttctttgaatgatttcttttctcaaggtttccttagccacctacaatgtgccaggctttttggtcatgaatttgccaatattatttctaatccctgcaacaatcgtacaatgcagatattagtataccattttgcaattaaggaaactaagcctcagagagtgttaaataacctgtctgtatcaattaatacaggtatagttggtatttaaatctgcatgtttaattccaatgacagtatcctttccacttcctcaaactgtctccctttcgtttcttcctaatgccatcatacaccaattatctgttattatttatttatttatttattttgttagagacagggtcttactgtgtcacccaggccagagtgcagtggcgccatctcggctcactgcaacctctacctcccaggattaaacaatagtcccacctcagcctcctgggtagctgggactacaggcatttgccaccatgcttgcctaatttttttgattttttgtagagatcaggtctcactacgttgctcaggctggtcttgaactcccgggctcaagtgatccccccgtctcagccttccaagtgttgggattacaggcatgagacactgtgcccagcccccatcataaactaattatgttcttttacagcagctttacacacccttattttgtttcctcaatcagactaaaagagcaacaacaataaaaaaaaatctggaaaataattctctgaaaattctgagcagtagacattgctaggtattgttaaggaaagtcagttactttggggggccaattatctcctcctagttcatatctaccaagccaaaagttccctataggaaagctcattagcgcagaggaatgaataagaattaagtgtgtgtctctcaccttctaccaagggaaatatataattctggagaattttattctcgcaaaaacagtattcactgtcttgtaaccaatgtctcccttaaaacaagaaagccctgcagagagttgcagatgtggcatggaattacaagcaacttcattctggaacccatgctggtacagacacagcctaagactgcatccttttaaaggcattatttcatattgctgaggcttcaaacatcacttggaaccctatgaagtcatgtggtcccagttctgtatttatataatatgaaatggcagatttacatttattcctgtgtaatttcaaccagtgattttggcccattgacccatgctgttgaaatctttaaatattctcagtctgtctgtcaaccagtacacttgctctcttcctatgaagcatcccttccagatgtcttgcccctcctcccatgttccttagtctctatttgaacacacatctgttcttgtttgctagatcataaactgtatgaggacaagacttaagtctgtcttgttcattactggatcctggcatttatcatagggcatggcatggtgtagaagctcactatgctttgaataagtgaaagcatagaaggaggggagaaatgggaataggataaggaagggaagggaagggagacgttataggtagaggaagaagagagaacaagataagatcaaggaacagcaacacatatagtgtagaatctaagatgcctgagttgtaagttatttaactctctgaggctcatgtttttatttataaaatatcatcacatcaacctcacaggatttttgtgagcatggggggagatgatgctgcacaaacatctggtctacaggaggtaggacccactgaggttgacaggccgcctgggattctttcactttcaagcctgccaggatgatcaaatgacaagattctgtggctctgagccatttttgggctgctgaaggaagtatctgggccttatgctcgctgcattgcccctctttccaagtgaatcacttcattaaaatgaaaggtttactaaaacagtctgccaggttaggatgattcattccccagctgtggccatcatcagaaaaccatgtgcattcagtacagttatcaagcctgaatagccactaatttgcagagcttttggtctcagtgtcatttatttttgtattttaaaagaggaagtgcacaagacatcattatgtcagtcccacataagaggctggtagactcttagtaagtggatgcacatgtttgcatttccaaaagcttctcttttcatcaaaagaaaatacatatgtctaattggctgtttgtgtaaagtatgggcatatctatatgttgggttagttcctcccttgatggtaagctataatgaaatacatttttaatgttagatggggattttagaagtctactctgcaaacctcagatttaccaccctatttagcttgtcaagtaaggctgctacttacattaaatgagtaacacctaatcctgaacacaatttcaaagtaaattcccttcctttccaaaacagacaaactagcaaaaccttacttcttcagagttctggtaaaggctgaaaatcaaaacgataagctttattcatcctaaaaggctaaagatataaaatagatataaaaataatcacacgttaaataagatactcctatcattactacattaaatatttcctacatgataaatggccctctggcactaaaaaggaaagaccatcatcttctaattcaatttattctggttatgtatatgatgtatccaaaattgtgagcagcttttacagctcagaggctgccctttatttggaactccctgcctttaatccctctccggttgccacactcctacgtcctgcctatttttgacaacatggagaggagaacatggtgaggctgggatggcccaagggcctcaagaggctgccctgggagcagtgataacagagtgctagatgttccatttacaatactgaaatagctgcacaacagccctctgtcatttgtttctaaccacagtgagtgacggagaagattttcactctatgggccatattcaggtccctcccttccgcatactttcaaatggactaaacaaccagtttcagctttgaacagttctcactttatcaatcccaatctttaagatctacacatgcagggcttccaacataatgttgaagccgtcagagggaaaccaattttgtcactatcaatagtattgacccagcaggtatgtgtttcacttgaattacggaagaattgctcgaaatcacacaattgaagactgatccaggagaatgtttgcttagatatttttctaacttttcccacatcaaatcatttagcaagatttgtatctgaaagtacttttccaataaaattggatttgacgcaagttgcagaagttttacagtgccagtaggtggtacgacgagggttgtaaaggatgaaaatgtgttgcctttgcctgagaatgttagagagctggtgggttaaagaagacagtgagcacatcacccaccaagcgagcttccctaaggtactgaccttgggcccatgtcacagatgatctgacccagtcattttccgttttttggattattttagggacatataaaaaggtcaccaccaaacaattttcccatgatacttagatcctagtatcatgtggtatttccatgaaccagaaaagagccctaactttatgcctccagaacaccatgtgtgttctttgcctaccatcattgtagtcctgctaaaaggatagtttttatggtcttaaggcaatgactatggacagccagacttcctaaaagacttcttagacctcggtagaaagacaggtgctgtattcctcctttgaacatggatttgtgatgtgatgttcactattcttgcccttgagttcaaattctggcaattaagaataggtgttaacacacagaccattttaaaagctacattaagccaatggacagcgtaaacatgcctggaaataatatatgcagtacatgcttcatccaggaaaaacacaattaccccaaagaacacaattatccacacagaacttaagttgagcactaaatgaaggttccacctacaacaagggccgcagcgtgtatttataagatgaagcatgctgttgggctctagctgcagcactgctgggtgagggggacctccttgtgaaggccgaggctgccggtcagtgatgagggcagggatgccttctcggccacctctgctgacagctgtacagctgtgtctgcttcatgtggcccccgagaccacggtgacccccttcaatgtatggcgttgattctactgatttatgtcaagggtagctctgatttataagcgtatcatcaaagcctgaaattgaactttcaaaatagtacgatctaaagatgatgcctagactgaacgggataaaaataaaggcctctcttgaacggatacaaatttgatgagcaatgaacaaaacataaatgaaggtttttcaacaggcctgccacagaccatgggggaacaccctgtccaggtgtgctgtcaattggtgatcaaattgtaaaatgtattagtgctgcaattgaatatatgcactattgggatgcacagtctgacacacacagggtgatcagccatcccgctttgcctggagtgatcctcattttaacactgaaagcctaatgtctctggaaactattgaatctcagacaaagtgggctggttggtccccagcagataggacactaggctgatggggtagtgggtggcaaagcggactgaggtcagaggcacagcatgaggtcaagtcagcggcaaagaggataatttgtacacctcaacagagtggatatgccaaggggtagtcaggacaataggcttaacagtgttggagagagaacacgtgcgtgtgacacaggtgagcacctttacaggctctgtgagacagtgtcactgtgctgagttgtcattattgctgatttgttgagtattgttttaggcctctcaatcccttcatagctgttgcctatattctagcatttgaaagtattctgttgatatgggcaggaggcagggaaatattggataccagggggtgattccccgacaaaggccctaccatcaagcctgaagacccacagccctaagtgggaacagcatttctgttttcatgtccttttggcctgccatgcccccctatcctgtacccatataaatcccgaaacccaggctccagaagcagacctgtaggtgaggagacaagcacacgaactgtggaatgacgtggcagagaaagagagaagaggagggatgtctgaatgctgagatgagtttggctgggggtggtcagagaggagtttggctgctggacggccaggcttcaagggaagatcgtgttcccactccaacccctctttggctccccatccatcccactgagagccacctccatcactcagtaaaactcccacattcatcctttaagtctgtgtgtgacttgattcttccaggatgctggacaagagctcaggatacagaaagctgtcacactggccctctgcccttgagaaaaggcagagggtccactgagctggataacactcacactatctgcggacagcagggctaaaagggcacactgtaacacacgacaacttgggctcctatacctgtccatctgtgtgctcccccccccctcagaggcttgatcaggttcagagaccgagcaggtgagccacacccttgttgcacatcctacgagggggaccagggaactctcccgtttcactgtgaatacaacaaagttgaaagcctcatacagatgtgtaagctgatgtgtgtatcattcatactactcagagggaccccagtgtcacaacccttcttggcttatggtaagagatggataaatcctcacctttaggatgctgagagggactttcactattattatcaaagctaagaaaaatatttatccaggcccaccctctctaaagagaaccgctcacaactgggccaaactccatcctccagggcccgcacaccctgttgccatcaaccatacccctgtccaccctctcccagcctagtagatgtggtggtgaatgggaagggagagttttcatagtacagtgtgccttgatggtaagttttttcacagagatgattcctctcttcttactacaaaggccatacctactgaggctgctagagacagaaaaaaatcagactgaaccagagtgagccccaaaatgcctgttcctccccaacaaacaagggttgtgcataaagagatttccatccttaacttcatttctgccacactccctccagggcagggaggggacggctcatggcaaaggcacaaacccttgcttgcaactgtgcagggaagagacctccaggagttctatctactctgagttgaggagctaacactaattactggcccttctgctcatgttccccaaactgacacatatcatgatggtctacaggtagtataagactcttcataagcactaaagaaagagcacatgtatgcaggtcaatttttatatcaagtataaataaaaagcataaatatacatacataagttgattatcttcatctgaccactttccaaatgtgttcattaatgaagcctactgaaatactaaaggagccaagtatacactcaacaataacaaaggattcatcttcaaaatgaattttcaaatttggcttcgtggcgtcccaaattctgaacatgccttgaacctgtcaccagccctgggctgtgaccactctgatgtgcagatttttacaggcatgggaactaagaaatgatcctgggtcaatgatgtgcatttcattacctgcaccctcactggctcggccttcctgagagggctcctgctggccctggtgactaagaggctgctcctccagccctacagtcagcagtgttgccattgtgtccgcctcacttcctcccctcttgcaaatgatcaccaggtacccaggccccacagttttcacttgttctattatttactcctgttccttcagaacccatcagcacattgacagttcagcagctagcaaactattcatcccaagtccacaatgcagcacattttcttctctttaaaatttttttgaaacatctgcttttgtttccatggtaatcataggggtatttttttcttaatagaactttgaactgcttttaaattctgaatgaatactgctttgcatttaacaaaccagaatcagttcaaaatgactgcaaaaaaccttcctagtcaagcttaaacgagacaagcatgttaacaaacaagatggcagaaacaaaaatgttgactcattgctgctaaccccatctgtaggtgatgagcaggactgatgaagatttcaataaagtataatttgtttatatattaaatttttaaagttgaaagtaaatagacaagtttctgtatttgaaccacaatgtttgcagtggaaataaagaataatttaatctttatgccagatctcgaaggtagtccttacagactcactatatacagatacaaaagctacaaaataacacaaagtttcttatcaagaagataggcagagcaaatgaagctctaaccaaaacaggaaaagttttcagacataaaattaacatattcagttgttaaacttgttgattggaagagatcatgactatataattaaggatgttcaattaaggccatttgacatatagaactggaaaaaaggtgcaaagtctgacctgaagatgtagatctgggaattatccatgtaaatttggtgataagaccatgaatgggaactaaatcttgggaaacacagagctgggcagaggaataagagctgctaccaaggacatcagtaaaaatagtcaagagaagcagagaaatgagataccagtgaggtcaaggcaagaagacaagtagaaggggtcagcaactttgcaagactttttctcatttgatcccacatgtactgaatgccaagcatggtatataaaagtgtacctatatctatacctatatctttacctatctatctagggaatatagagggaatatgaatgacatcacagcagctgccttggagccctggagcctgaagacatttgagatggatacacctaaggagaggaggagaaggtggcaggcagatttgaaaaaaatgtggattaccattaaaaaaggatttgtaagcaatttcagaaatataatctccaagcctcaggaattattttacccttactttttaagaactggtattattatactcataatgagagtcataaattatgaacaagaagaaggttggttattattatttgtttagtattaccagccttttcaattccacacaagagggtaacagaaacaaagctgtgaggataccttgcagtttgaacatttctgggaatttgcatttaacaaggaaagatcatcactgtaaatatattttcaatttgtaacagctgagactcataaatggagattatatgacacataacaagtgacaggttatcagcatgtgttggcaagagccctttggctattaaaagataattaaaactcactataatcttccagctgcttcatttagtcattttgttttatatgaatgtgataaggctctgatgcattttaaatggacagctcccctttatcagcttcttgggttaagccagtgagagtcccctcatttgcaaatctccttctagctacacaatttacacaaagcatcttcctctggcttgatcgtcaatgattctggttgccatggagaattgggggtcatcttttatctggcgtagttaaagcaagcaattgcccacccatattatgtgattggagtgaatgcttccataaccattttcctaaaaaaatagatgtgctagagagcagttgttctatgttctcaatagaagaagagcaaaaaagaacaggtttcaactggatttcgattcaacttagaaatagtttaatggctatgaagaccagaaacacacaagacaccatgcaatcgtcaatgctggagattaggaagaaagaaaaaaaaaaaagagtggccttttcagtgtgtattgtttgcacgctctctagctggaaggcacgcagatggattacaaaacatttcaggctatttctaaatgcagagtagtggaatatttccgagaaccattcttgcaattattttcaattaaatctttatgtgtagtttttcttacacaaggacttaatagagccacaaacccttttatggtcaggctgatttggagaaggataacagggatcagtgcaatggaattctgcaatgcatgctcaactctggagccacagtgacctatctaggcctttgcttccatacagaaaacaaggtttctccttaatttgctcttcctagaacagaccatgctctctcactgtgcttgactacagcacatgagatctttctcctataagtgtctttctgttcttcaagtgttgtgccatactgttggaaaacaacatctttctgttctatctttgctgggctgtctctttcaaaagtcaacaggaacattgcctaatcttggaagccttccctaagcatttagtatggattctggagctccccttggatcctgcactaatgcctacccttgtacttctgtcctgtactatcattacctctctacctccctcccttcctcccctgcccccactagaatggaagctcctggagggtggggcccacatcttgtcttgcccagcatctaacagttgctgaataaatgttgaatgaataaatgcaggaatggatgagaaaaattatcttttgagaaacaaacttgtgagattgttacagtccttgttttcatagggactgacagtatcttctttctgagattttggtagaaattaaaaattaatagagaagcatatatcagtaaggaggatattgggcaagaatgtgcacaggaataaaaaggacctcttcaaaatgggactctcagcaatgcctccactcttaaacttcacactggctttggtgtcagttcccatgatctgatgcaatctcaaccctgggtagaggatgcttcctttcttttgacattgccagactccatcacatctacatagttgtcatgcaaagagagcactgaaagtggtttgtgcattcttattaggtctcaaaagatcaagagcaaaggaatcctctgtttatggttcagttgggcctaggaaatcgccaaaaagtgacaatacgcttgcttgagtttaaaaatcattaccaatattccaaatttaacctgaactgaaagcaaattaaaagctcaacttatatctatttatgcaggcacttcctaggcaatgatgaccttccatattaatatggtttggctgtatccctacccaaatctcatcttgaactgtagctcctataattcccacatgtcatgggagggacctgctactcaggaagctaaggcaggataatgctcgaactcaggaggtggaagttgcagtgagccgagatcgtgccactgcactccagcctgggtaagaaagtgagattccatctccaaaaaaaaaaaaaaaaaaaaaaattagacagttaaaatatctcctataattacctcataacaatcctttgaggtgggaaggattagtctaatttctacaaagaacctgaggcagcatggggttagataactggtccatggtcaaacatctaggcctggtggagcctgggttttaacccaggtctttctaactttccagctagtgttcttcatgattacatcacagtacctcccacatagttaaaacatacaaaggatttcaaatattcatttgccatagattcaaaaccttatcgtagcatctttcgcacttatttgcaatgaaagagaaaggggtggatttccagctggtggtctgggagctgtgctcgctgcagctcacagtgggcagccattgccaacgctgcttcaacagtggaggcaggtctatttctgtttcatcttactgccctctacattttacgggggaggtcatcaaatctgaagccccaggaagtgtaaacatccacttttgtctgttactgtgaacaaaggttcaaaattgtgacttcaaagcatggcagacactttcctaagacagagcctggacactgtccaagctcagggctcactcagccctttgaacagctgttacccaatccgttcattcagagcctttcatgtacatgttttgtacatcaactaatatctagatattgcgacttcttttatctacatttgaaaccaaaatttaccttaccaaaacatttacataaaagaattcataagtttgactttgaaactctctgtagtgtaatatcttaataaacaggatttttttcccttgaaaacgtaagtgtttctgaataaatggagaatcagaattttcaggaaatctgataagttcaagaagagttaacacttattcctctgaactcctaagccacgtccttcccgtcttcattagagggcattcctggtgtaattatttagattcatgcctgtcttctctccaagtccctatagggcaataactatgatctagtcatctctcaatttacaatcttcaaagaagactctggtacacagaagacatttaagagacatttgttaaaagattgaacaaaggaatgaattcatttgtatctatctagggatccttatttttatttagctcaatggttctcatctgcagggatttttgctcccctgagaacacagggcaatgtctggagacatgtttggttttcacaacttgtgggttagatctcttctggtatccagaggtaaaaactatggatgcctcttagcatcccacaatgcataggacagtccccacaaaaaacaattacctggcccccaaatgtcgatagtggggagattgagaaccccaatttagatagagagtaactacaaaaattccatacacagacaagagatctcagaaataagccagcgctccttttagagaaaatgcagtggcacccactcatatcatttatagaaactatttcacggaaacataaaccaaattggagatcccaggtggtcattttcatctcacagctcatttttgttctcccggcataagcctcaactagataacatctttggactttcagaggtcagcatttatatgctgaccccatagcccagaataacccaaagaacgagactttcattcaataacagtggcattattttttattgtgggtcatggctcataatacgcaattcagctaaaagggaaagatacaaaacatttgagatgactggcaggagaaaactctaaaaattctccagcacaaaaggggattaaaatgtcacaggaaatttttttcttgaaaatggaagggcttatgaatgcttcattctttccagaacagttaaaacactgtatgcacgggttgcttgggttcggaaggcagggcagcccattccttttgttctgttgctcaaccctagaaggctttccctggtgaactcgggcccacgagcagtgagaagttaggaggaggaagatgcttcatctaaatgaacaatctggattgtgttcatcctccctcttagaagtgaagagagactgccttaagctgagaagcaaaacagactaagcgggcaaagccaagtctttcactggagataacatttgcctgatattttaactgtcatctattacctgaagactcatttatccaaggccgaatgaagccagctcttgcactgacatggaattcaaagtgatgaataggtctatcagcaaggatgactcacagtgagacattctgcatcaggtggcatgaatcaggtgtcaatgggaagctgggccccgtctgcctgcctcggtcctgcctctgctagaggctccgtcctgttactctccagccaccagccagtggggggacctcgcacagaggtggcagccctgtgctgcagctgcacttttcagcctgcctgttagatatgatgggggctctaaggggataatgagtgtttctttcctgacaatctgcagatgattcgaactttctggggtttaaattaatttcctgtttggcatgtttgcaggaggagaaaacaattatctccaaaattacaagtaattagctgtttgcttattgttgtgggataagatcttacttccctcccacaccacacccagaacccccccccccacacacacacacaacacacacacacacacacacacacacaccctgtactctagtttttcagttgttatttacaagtctcgatctgggaggttagagtccagttcccacccaggccttaccgaaatcttcactctgctcatgtaagccctgcccctggatcctaatgagtaaagaaaactgcaggagcacaatgtccatcccagtgacttctgcttattagatgggtgtggtggatgcccagaattccaggaaagcaagaatacccactccccactccaagtcctctctctacaggcaggtggcaaggccagctcaagtaccataggaaataaagacatgagaccgaagatctcaagatgagagtctacattctggctcatcacttactagtcgtagaatcttaagcaagtcactcagcttctctgaaccccagtttcctcattttattagaaggattataaaaccccctgtaaagtagcgtttctcaacagtggcactattttgggccacataattctttggtgtgggggagcatcctgtacattacaggaagttcagcagcatcactggcctctgcccactagatgccagcagcacccaccccctagttgtgatcatcaacagtatctccagatattaccaaatgttccctggagggcaaaattgtacctgcttgcaagcctctgctgtaaaggagccccctctcctttaaatgtttaataaaacatcacccagaaactttaattctacctcccaaggattcaggagcagcaaagtaaacagctacaaatgaaatgagagaacttttggtggaaaaccaggtttgggataaaattgagtaccaattggccttgcttagagattctggattttgttttaatcttgggaagggagtgggagtatgttcttctttcctgtttcacggggtttgtaggggcttaaatgagcctaatgtatttgaaactgcacagaatgatgcctgcaactattcacacagtcacaaccaaagaattggtgcaatgcagctggcatacatggaatgtcacccgagcactctcttcatgttggggacaaaagaacatcgcgtgatgattctagttggagcattcagtcaaatgaatcagttaggtgccagccacatgccagaaaaaatgacaggaacccagcattactgaatgtgtcaaacatatatttttttaatctacaaattatttgacactcctccgattgaataatgggtctgctcttcttgaacctgagcagacctttatggctatgttgactaatagaatacagaaaaagtgaagaggcaacttccaagactagatcataaaaagtcacacaccttgccttgctcactcttgggatgcagtctccatgtggggaagaaggaagcctgggcaaccacatggacacatgtagatgcaccagctgccagtctcactgaggtcctgaccgagaggcagcatccactgccagtcatgcaagtgcccaaggcttcggatgttcctggagcccagtcactgagccaggcatagcccgcaggtcttgccagcctatgtcacagtcatcaaagaacagagacaagccatttccaccgtgtcttttccaaactcctgacccacagaatccatgagcataataacatggttgtttaataccactaagtttgggacagtttgttacatagcaacagtcatggatcacacttccatggagctcaaccactaattgcccaaacaatgtgctccctgaggaacttgggtcctgttggtttagctcagctggtggtaatgtcagaaacagccagggaatgagtctgccattggcatggagaggcaattagggtcacgtatttcatcagcagagtctagaggtctttcttgacacatagaagggttgcagaggttatgacctcttccatgccacccatgaacagaatggcttgatcagcaggaaagagagaattgcattgacatataaatacgggacaagaacactaagtgggagccttcaaagaagaaggctcctttgagaagcctggaaacttccggagctggttactgggtcaggagcagcctattctagagaacaacctggcattgactcagaggctgggcagtggcctctagttcttgcatgctgggagaagttacgggaatgggtgtgaccatgacctgccaagcagagagtctttgctgactcaacataacctctgcccatcttgacccctagagacaacccgtcttgatgaagagaaataaaagtggcctggatttgagggaaatagtgaaacattgctttccaaacaggagtcaagagactagagtgtgctgagagaatagcagaatgtgtgcaggggtgctaatgagcacagagatcattcaggatcatttgcgcattttcagagtaagccagttctccgaggtggcttcttcctccttgaagcacacaaactctgtttcctgaagcttccttactcatctcatttaatttggatttaacctgcagctagagattcagaatctgaactacaattcaggtggagaagttaaactctatattaatagctcttataaaatactctatgagtattttttattcagtatcagtggggcagctgcctgaggcaaatatgtgcaatttcctacttcattaaatatttaaacatctttacttctggaagagttcacatttgaaaatctccttcttgctaagatgctgacagaccacttaggaatttggtgtaaacaatatgaacaggtgtcctatagggacatttgtttattgagtttctttacaaattaatcttggggtttacagctatttcagacaacttgtaccaatttaactagtgttttggtttattcacatttctaaaatcaggcactaaattatgttgtatttgggcaaattttactctaagaattataaaatatgaaatagttcaagcaactataatgttagcagtttaaaattcaaatctccttgccactcatattaaattcatttaatgttcgtagtttattgtatttatcccttttcaatacatttttagtcatgccaaaagcaggaagaaaatgtatatgattccagtgaaatttctgttgtaaggtgacccagactttactgagtaagaattactgatgacacaaatcactgaagaggtgtcttgaagtagaataaaaatctcaagcagaaggtacagtaataaattcaaattaatgggttcttatcatggggagtggggagagaacatgaagagatacattaggaattgtaaacataaaaattttataaggcatgtaaacattgtccatcccgaaaagttatggagctatctcttgtatttataatttctttatcaccatagttaagatcctcatccctcatggtatttttctgagtagtcactgtaactgcagcagcagcagaagcaacaaccactctaaggagaagcctggagctgtggcagaacacagacagcaatagacagccttgggttcacctcctggctccgctagttatttgggtttaactggaacaagtgactttaacctctctgggttttcgtttcttaatctttaaaatgggaacatcaatggtacttcctcttctgaggattacatgacataattattgatcatgtttaggcagggcctgcataaaatacatgctcaaccacgatgactatatctttacattcagtctggccacttcaaacccatgtttatctattcatctttctaggctgctctttttgtcctatttctgctctacttaaaagccctcaggagctccctattacctatcaaataaatttcaaactcactgcagtctggcctcaaacttttttgccaaccttatcatctgtatttcctataacctccacatgtcactgaatttggactacattctaaattgctcaagtcatacttttccactcattctgttgccctgcttaggacaactctgcgattttgcccggtggaaatacagcttcttcccatggctcaggcccagtggtctcccctctttaccttaccactctgttgcctacacatacttctaagtgcctgttttgatagcctgtcagtcactaagccatacgctcccttgaattgtcaatatttatgacagtttatatgtcttatcacacttacttataatctccttgaaggcagtgatcatgttttatataatttttgcatcatacacaatcccagaaaagatcttgcacacaatcggctttgaacaaatatttgttgagatattgactaggctaggttctccaatagaagagctgatgcggaaaaagtggtctctgtttctgaaatgtagtctctcttaaatatttgtgataagttactgctatgttactaaagttgaattcatgagaaatttaccactatcttatcataatccttccaggtggaacacaaactcgagtgcagcagtgtcagcacacagctaaactctccgtagagggtgggccctggtttttcaaggacagcacactttcacaaaagggagagggttccctgttcccagactggaccacctattcaaatttgaaggaagacacataaaagggcaaaaactgatgaagtcataacctcatgattccccagacagctaacaagaaatcctccctcaatctcccagtaaagacaggcatggacactttctgaccaagggatagaagctgaagcaatggaacaataaaccttaaaacaacaacaacaacaacaacccaacagctatcatgagaactgaaaccttccattgtgcctccactctccccacacagatgtccgttcccgcacctatgacattcctcagagcctgtttaaggtccgcccatcaaactctggtgtgatattgtatttgaatgcgttgttatatcccaaggacctgagagcacctgacacagagtagctactttacaaacaatcttgtgagtgagtgagtgagtgaatggaagactagtttcccctgtacagaaatagaaagacaataaatgcacttcattttctgtaagccagtggagttacaacaaatgcaagatccaatgttttgagtttggcaaaacgtagttagattagaagacttaaaaggctgtctttgacaagaagctgaggggattctggccatggaagatatgttgtctctgctgctgggccgtctctttccctctcagctgtggaagaggctgcaaactagagggtgggatgaagggtactgtcccaggcttcttctgggcttatcttaccacatcttatgagaggagttgggaccatgtattattagtttccagttaactgtactgttaaggcaaatgtctgaaagattctgtgcttcgttttgggaagttggacttgaaatattaagagtaggcattatcaaaggttagacacgcttctgtcaacttcatgccagagatgaagttcatacactggacttctgggggttggtctcatttgttttaggacaaaacatattatctatcataccaagagttcgatagctatctgctttcaaaggtaaatacatttgatcagaaaactccctgctaaaattgcagtttctaagctgcccttgttatactttttcttcctctgaggatactttaaacactcatttcagattcactaggattgtggctgttctttagcttctactttatgtatttatctaagctcgggtattttcatcttccccataagtagttcatccatagcagaactggccgtgttgctgatggttaatatccttttttgttttccctttaaagtaacacacactgagccctgagtaagagccgggctctgtgataagcactttgcaggtgtgagaacacttcattcttaaaacaactgtaggcagaagatgttgttattattattattcccattttagacgaggaaataggcttatagagttcctggaacttacccaaggtcacacagcgcatcagtgctggaactaagatttgaacgtaggtccagctaacgccaaagccatgctttagagcaatgaacatggcctctacaactacaagtttcagaaaatgtacagcttctcagagccaaacaaaagaaacatctgaaagattctttctccaataaatcaaggatctgaagtcttaataactccatgtcagattattagcatcaatcacaaaacatggtaatttatttaagtggttgttcagtgagcagagccagctataaacaagaaatgtgttctgctaaaccaaaggctgccaggaagtttggaggcacgagaagttagtctcaccttcttgtgtaaggaagaagtcaatgtagagtctaagtttttgttggagcaaaaagttttgacaagccattccatgagctgggtactcctctgccacataagcgctttctttcctcattcacattcccctcaagctccactcagaagataaaaaaaagttaggatacccagactttccaaataatgaccaaatgggtagggtgtttaccaatttttgaagactttcacatgagtatcagcttagtaactacccttttccctaaaaactaccatcatcagcatactcaaatatttaaagcaaacaaaataatactgatatcaaaactatcaaacaaaacttaaacacgttaaggaatatgtttatacagtgtgtgtttccggcaactttcaccctactttcctaagactttccagctcaggctgtgctaggtaggatggcaggggaacaccaggcatccctcatcagataatgtgggcggtgtgacattggggtccttaagtctcttcagagtcagacagcccgctaagaccacaataagtacttggaagcctccagctagacacccacaccaggctcttctgcctaggaatagccagccacacaaaatcacggccttaggcagtaagcccaattgacatttggaaattcataactttgaaagctatgacttatgacacttggacttgtcagagtccctcagtctatggcacagtacctttcactttaaaaggttttattctcctcctgctgatgggaaattattaaaggtgaaacaatatttataagctgagtaaaaatacaaagtataattcttgacacttcagaatgaaggtgaaaaatgagaagaaagaaaaatgagagggaaaactagagtttgaaatgaccctaattaattatatacattcgctcacagtgcatcaaatatataaaaaatatttaaagtgaagctgagaattattcaagtaggtgttgcccatttgtgaaccgaataaaaacaaaacaaggctggacacagtggttcacacctgaaatccccgcactttgggaggccgaggtgggtggatcatctaaggtcaggagttcgagaccagcctggccaatctggtgaaaacccgtctgtactaaaaatacaaaaattagctgggcatggtggcaggtgcctgtaatcccagctacttgggaggctgaggcaggagagttgcttgaacctgggaggcagaggttgcggtgagctgagatcacgccattgcactctagcctgggcaacagagtgagactcggcctaaaacaaaacaaaaaaacaaaacaaaacagcacagagtggcacattattcccatatccttgaggagtggtatgaattattattcaaggaagagaagcaaatatagttatattttggtgcaactgaggacagcaaagagctgggtctggctttatatggcacctgtatgcaggcaagtttagtgacccctaacagatgccagcatccctcaggcactctagaactgagcaccacaccttccatttgaattgatttcacattgattactttttcctcaattatattacagaatagtaggagctaatagtattcccatttcatagattcaaaaactgaggcatgagaggttaacaaaaatatcgatgactaccatgttaggacaaacgtgctcgagaacccaggcctcccgtacccagatttcccaagcttgccatacaaattaggtctctccctctactgggaacataagtgttctacttaaggctcatattattcctttgttttcaaggttcattttctttccctgtggaagttttatagctgcatgtaatccatgtgtcaggttgtcttatccatagtttaggctgcttataatggagaagcaacaccatctatagtaaaggttgtctctggaaacccaattagtgaagaaaacctcaaatcacttgcaaccaaggaccccaaaattaaccttttctccttaaaaattcccttccctgcacactcccacaagcagagtcagttcatcaatctctttatgtaaatagcagtcaagaagccagggaggaggtctgtttattatttttgatcctgttttgcttctggcaaaatttcacaaacaccagaagttggcagaacattgatacttttttctgactggctactgttcactagctacaagtgcagaatacaactgtaactattctggtctacgggcctcagctatgactgaggacagaactgtaaaatctggaagaaaaaaatctccacccaagacttctctctgaaaatgtggaccctcctttaatacacacttttctctcactagaggatggctgagttccagatccactgtctagagaacaacacaggtcttacccaattcccacctcactccttgtactccctagtgtcagaaaaggtccactgtgaagtcacaagaggccctgagctctgtgggccccaggtgccccgggaaaacttgggggagaatgggcatcccaccccagcactttctaggaagaagggcagcattttgaagggctggaagtagaggaaggaggttgcgggtagaagactccatactttctgtgacgcctattccttaggtaggaacttaggaacctcaggtaggttcagcaacatgctggatcctgcccttgggaatcctgatgccttggacatttacttgggaagcagagttcttgataaagagcagccagccctcaagaggggagtgggagggtagttagtataggatgggcacacggctttgctgctggtggcacaatgaggtcctccagcaacatgaggggttggtgaggaagggagaaccaaccaggtctataatgatgggaaaaaaaaagcataaaacatacaaataaaaaaaaaacttcttggttccaagtaaacatgcctacgtataattatgaagatgacagggttgcacagtcaagaataacgtgggctcccagatcgtccagacttgagttcaaagccctgttccaactcccactcgctgtgtgactttgggaaagtttatttaactcctggagaatttgtttactcatctgttaggtcttactatgtttattttccagatgagtaaacttaactcttaggtctttatgaaaattaaataaaatagtaatataggtagtgctgaaaatagttcttggtacatcacagtgggtcctcaacaaaagtagctacaggtttagtaacccttatctgaaatgcttggcaccagaagtgtttcagatttgagatgtctaaaaattttggaatatttgcattatatcagttaagcatccttaatccccaaatccgaaatccaaaatactccaatgggcatttcctttcagtgtcacgtcagtgctcaagaagtttcagattctgaagcgtttcagactttgaattttctgattagggttactcaacctgcataagtatattgttactactttttaaaatgtaaacatttcaaaggctcaatattgtggtgagaaatataaaagtcaaatgaccaatccagacccaaatatttcatctaagtacatcttaaaggttaataaactctgctgacaacctgcctatccatgacaaaccctgagtcttttcatgggtgattcagtggaaatattctcccgtagtcagaggcatggcttgcctgggcctctgggtgcagctgcacagattcaagcagcctgaaggaaaggtgactgacagctaatgatctgaaaagaacttgtctcaactcaacgtcattcctggcattatcgaacaaagcaataaacctcacagaatggaagctacagtgtccagggccagctctgctaaggtaaccaaagacagagaaggaggcaaaagtgacagaagaaactcatgggaaaccaacagaaatataatggctttggcagaaatgcaattatcaattgggaggtgaggaagtaattttactctaaatgggggttggggaggagggaaaattggactctgaaacaatctctcttttaccggttaatgttttacaattgcagctgcatgccgccaagtttccttattatatcaagtcagtctccacttattgatagcgccctcttggacaaatgtgtttttccatacaacaaaactcgattccaaaggaatgattcaggaaaatgaaatcagaaacatgtcaaagtaggaaaacttgtctatgcatttttcagttctctgaaagatttcagaggacagagattcctaatacaagactataatttcattggacacctgtcttcaaaatgacaatgcatgtggaattgctccacaaagtgtcatgcactacactggtgaaggaattaatatgacaaccgtttttcagggtttccaagataccatatgcagacagccaatattttatcctacaaaacaaggtttttgcaaggctcaagattaacatgtaacttatgatgtataagactgtactaaaggatgtttctattctttctggaggaatttctaaatagagggggacttaagagtatacatattccataaaatcaataacgcaaaagaatccacaatgtttaattgttaagattttagtccattaaactctaagaataaatttcaacaaattgatagtgatcagatttgtaggcagtctttcatagctgagggattcaacaaatatgaagaatattcctcaatcaaaaggaatgaaatccttagaggaaatgggcaattaaagtttcttaaataattcatttgaattagtacgagagcttagtttttaagttgtcaagtgggcattagaaaatttacatgcattgtacagcactttttttctgtttctctccacaaagatatgtaaaactggaaaggtttacaaaattaacaaaaatctcaaagttaacctcagtttagaaaaatcacaagaatttgagagagttgaaatttttttaaatatatactcttattctttcattcattttctttcagcttgtgatgaatgttttctcagtatcctatgctgaaaacaggtagatactaatatcgatcttcaagggagggctgttgagtattgaataagacaaaaacatggaagcaatcagcaccatgctggtaagcagaggcatatcataaaaatcagtctgtcttttttttttttgatgtaacaaataaaattgggaaataaatatttgattcatgtagtgggggctgaattgcatctcctcaaattcatgtgttgaagtccttgctcccaataccttagagtgtgagtatatttgaagatagggcccttaaagaggtcattaagataaaagtagatcatatggatgggccccaatccaatacgactggtgtctttacaagaggagattaagacacagacacacacagaaggaagaccaggtgaagatagcaagaaggcagctgtcagcaagcccaggagagaggcctccaaaggaacaaaccctgccggcaccttgttctcaacttccaacctccagaactgtgaaacatatttttgggattaagtcacccagtctctggcactttattactgcagccccagcaaactaagacagtcattcaaagcattaccatgttttataatttttaagttgttttccatgacgaatgtagcactagcctttgggcaaattggctttccagaacctcagttacagattgatccgttcaccccttacatgatagaagagaaaatgtagaaccggaagacttaggtgacttatctaagatcaccccaacctgggtttggtggcctcctgctgccatcactggaggatcaaaaatagatattggattgctttgaaaagatggctgttaaacggatatttgggttctaaggaatacagttttaaacccaaatgtcccatctattaccagttaatgatgtttgcctcagacttcattcccacccgcttacccccaccaagaacctcccggcccttcggtttaatgtgaggcacagccctttcctccagcactcctgccctctcagctcagtatttaccaccaagtgattccgagagctaggaacacttcctgccaaggactgtctctttcactgctacaaggtaaagttcaacgggctttactatttatctataagacctgaagcctggcctaaacccaccatttcaggccagttcagggcaacttgagagagagcaactggtgtccacaggaaaccacaattggaaaaggcaatggttttcattacagtttaagaaaaaaaacctcttttgtttcaaattttctggaagacatgaggacacacacaaaaaatgtggcattatatatgtctgccataataaacatgatacaaagtgtataacttactcaaacataatttactcttcagttgatgatgcagcagtttgaagggtcatatgtacatggatgtttaataatcattttgtcttaaattgagcacttagtatgtgccagacactgtgatctgtgtttaattatagtctctcatttaatccttgcaataactctgagactgttgctcttttaatgccattttacccacagaggaacaaaagctaagaaacattaagtgactcgtccaaggtcactctatggggatgatgtagagctagagttcaaattcacgtgtacatgactccaaagccctgaaagtgctctaaattagagttatagtaagtttggagtttgggttgatggacaacatccctaagacattcttgatcccacaggaatcaaggctatctgtaatcacagggctatttgaaaaagagaagaaaaggtgtcttgaaattcaaccaacatgtttcaattatttgctcctaagaacaacagaagtttcaacattctgccaacagagtaactcctggaagattggcacagaagaaggcacaaggtaaatacccatctctgtacaccccgtgctaccatgtcatgtgctgctccaggcaactccaatggattggccaccctggccagtgataacacataaaaattccactcagtattgggaccaatagataatgaacacagtcagtggaattccttcgcaggcttcttcaagatattctgcaagactgatttcccttcttcttgccaagattttttcctccttcttctaggaagtcagtgataaaaatatttaagcagctttgtctgccttagaccttccaactaaaagtacagcaagtggaatggaatgctaatatgaggatccaaattttcagggaaggaggtcagtagactttcctatctgaaagagaccaatggtgaaaatgaaggtggtttgatgattaagaacctgttaaacataacgcatgggtttacagaagtccagacagtaagggccttgcgatggatttcacactctattttgagaaatgcatgtagtgggaaatgtgttgtgtccctcaaagcatctggagaagattctttaattttctcaaataagaactccgtctatttgagtgagaatcgttggaatatcattaacgcaggatttgtgaatcgttcttatttcttataataattttacatattatacataatttcagggtggtataactctcagaggaaaatgtgattttatgactatacatactttttgtatccagtgtgtcgtttggtgaatataaatgtatatgaaatgctactgttcactcatagagattgaatactaatcaaaggttcctgctgtccatatgtatgattttcagaagtaagcaggaaggggagagttggaatgcaggaagagaatgcctacttcagctcgaaatcctgacatgtaaattaggtacttggtgactgccaagttcctttccaatctctctgcattgtttcgcccttgtgttttatccaactgttaggaggcaaagcaacacaaatcatttgtattttagtaagctctgcctctgtcagacctttaaaattctcaggattcctatgctgtgtgaggaaaatcatttgacagtctagccagacactgtagatctatttctattgattttcttttgctaacagcattagcattttctgtaattttgaagttattttccaagttctccatttagattattttagatcctaagcttctgaaaaaaaaaaaagagagagaattcatgtcttttcaaacagtagtatataaattttcatggtacttggtccttccctagactgcaccagtccagaatgaccaccatggtcttgagtgacttcacagtgtggcggcttgggctaggcagtatggtaattccctatgcattctgttggagtttttggatgttgtgtgatttctctccagaagcgtcattcataatgtgaatgctaatgtgtatctctttgccagcaggaggaaaaacatctgaagaatatatttgtagacttcctggaaattgataagttgtctccataactaaagcaagcagattttactaattagaattatctacataattttacttcattcacttctttctgtcatactaggagagcctttatataaccaaagatatttttggaccatgaattcagaaattctcggagccacccatcagtgcctgagcttcagtgagtccatatcccatgtcacccacggcaaaggagactctaagacttctgaagagtttcttgcttctttcctgtggggcagtgactccacttcccagcagtaatggaatatcctgaattagctacattaatgttagaaccatttggacctcacccaggacttcaactacattatggtaagacaaagccagagctagaaggcaataatttcttccttctggctcaacagtacctatcttgtagagttatttgaggaatggttgtattcttgatgttataattattaactctacccatataccgactcagctttctgttctgcctacccaagatagaatctttgtgtggttgttaattttcataaaaagatggtcatctggcctttactcagttgacttttaaagtatttgtggctggcctttttggaaaacatagaatacttgcaatgttcctctccaaaacacaacttcaaagtatctactgccaaatctatgcaagaagtatattcagagagaattatctaagggaagcgtaggccacatactctcctagatcagcatttccaaaatgtgttccccagggaaagctggttttgcaatatgtgacttcccagtatcctgtgaaaagtggtttcaagatgaaatataccagtttaaacacagttaaactactttgtgcaagattttcctgagcctttcataagtctgaatttccaagggaaagggaatgtagcatttccaaaaatgacttaaccacagaaatgttttctcccttgaatatctgtctaatgggcctagtgttctgtgaagcagacttatagaaattgcctgtggataatctccatgctatttctaggttaagacagagaatctgaagactgcatacctgacctctcgtttttacctacccacccacccacacccaaatatttctactggactataatttattgtgacgcccccatttccactgcaggatgttataagaaatgagactcactactgaattcacagcaggcatggttgaaggcaccattcactatagcttgcagtgttccctttatgagatttgtatgagaaattcctctcataggtcaagttcttgggagaaaattctcccaaagagcaagtcccaggaaaatcttggctggtaagttcttaccttaagaacagggaaaatcttcccttggttgtgttttcctctttgcttagatcagggaagctcaagccaaatttgcagcccatttttgattattattcaaggccttacattttatatttccatgtgatatatcttcctagttttacctcattaattggccaacatttctcttttcatcagatttatcttttttgcaatctttagttatatattcttctataaatgacctcaaatcctctaggtaatgaggtggaatgtaaattaatatatagtatctttccccataccaaaatcatatttcaattgctccaagggagacggcaaatattttttatgtggtctttagatcattcaaatatctggtgtgcaatgcatgttcaggttctcctatcttcttaagtcttcttgattgcctcactaccctgttgtcatagctaatgaaacacagagaaagtgtgtactcttgttaatgacatgtctccactaaatctccatctatttatgtccctttatataagagttttgccaaaacccacttatcatttgttctctttttaaatctgttttaggtcatcaattgatactattaagaccactagcagtgactgttttttctaacttgtgtttctgtgttcatgattaatttgctaatgaaatgaggaattttgcattgtaagagttgaccattgtccaaaatttgctaagaattaaagcactgatgattggggaaggtgggagagggaaagacattttaaaaaatgaatttttatttacttaagctaaagttacagaacccaaatttggcaactgtctgcatctgaacaacagaagtttcaacattctgccaacagagtaactcctggacgattggcacagaagaaggcacaaggcaaatacccatctctgtacaccctgtgctactgtgtcatgtgctgctccaggcaactccaatggattggccaccctggccaatgtgtgagttataaagcaatgatgtgtagctattgaacctacaatttggttaaagttaaactctcaagttttatatgtttacaagcatattgtccttttgttaatttcctcccagtactcatttcttgacttcttttagttttactatgtagtaatttttaaaatgttagtcaaagttagttaatttaattcacttagcagattttcctgtaattttggttaaacagtatcctttctgtacaggccctccaaacaccagcactgagtagaaagaggctctgattcatgaaatgtgaatttatgacagttgccactcttaaaaaaaaaaacaaacagacagaacttgagcaatacatgactgatgcattctcagcctgcttcctgtgttccatctgtctttctgccagtgcattcaccctccaggtttgaaagtagtcgggcaagaaagtactaaacatagagaaagggcaattccaaaagaacaaatgattgcttaatttaggctgacattacccagttgctgggggtatgggccatggggatgggccatgttcaccacttaggttgggcaaattcccaagatgccttttgacatagtaatgagggggaatacatcactcatgcccactggcattctctggggaaatttttaaaaggcagtatatcccactccagttgagttcaaatcaggtgccatatctacttaaaaatagcctcagatagaatggcaactcaaatgacagtttaactttcactactttctcggtagtgaaactttctacattccacattttctatcaagaaaagaaagaggttgtattgtgaggtaagaggcacacacacggacttccttcagtagctgcaatccttgctataggtcaggcatcaagacaattccactttacaggcctggattttggagaaagaaaggtgtttacaagtttctgtataattatagttatactgacatttaaatagttcaacagactggacttcctaacattcctattacatcgatattaatgaaagcatgacacaggtttcaaggaagcatgtccaggtatatgctgaatgacataataagaaaaatgtaaatatgcattgcttttgtcttaaggtaatacttgtgattgcagaatcctagaatgtagagatgatggggacttcagagattctttaatccaaaccctttatttaatggaagaagggaaaaaggtctagagaagctgtgacttctctcagatcacacaataaattagttgctgaggtagaacaaaaacctaacttccactttaccatttccttgagaaactgtagaacaattgtaagccactgatatattccacataataaagccgctctgttgcctttttaggttctagtatgttacgtttatgttcccctgctttctacaatcctgttcaaagagttgctgacttaaccacagagaggattccagaacctgagacacagaataaacttgagcaatcatagtccatccacttcattgtctcatcaaaaaccaaaggtccagtgaagctctggaactcaacgctgtaaaggagcgaaggagcttctatacagagcctggatgcctgtctccttatcctacttcagtggacttgactgcaatccggattatgctgttttctaagcatttaaaataaaataaaaagtataatagtgtgataagttctttcacaaagcaagcaatcacatttatgtttctacttacatttgggttttccaaatatgtgtgtgtgtgtgtgtgtgtgtgtgtgtgtgtgtatgtagactttaaacatggtgcatccatcatgttgcactaaatcaaaaccaccaaataatgatgtagaactaataaatcaaaaccatcaaataatgacatagaaatccaattctcccaccttacacccattaagatggctactaataaaaaaacagaaagtgaaatgtagtatagatatacaatggaatattatccagccttaaaaaggaaggcaatcctgccatgtgctataacatggatgaacctcaaagacattgtacaaagtgaaataagccagtcacacaaagtgaatcactgtatgatttcacttatatgaggtacttaaagtagtcaaattcatagagacagaaagttgaatggtggttgccaaaggccgagaggaggaggaatgaggaattcttgtttaatgggtatggagtttcagttttgcaagatgaaaagagttctggagatggatggcggtgatggttggatattatgaattatgaatgtattaagtaccactgaaccatacatttaaaaatggttaagatggcaaaattaatgtattgtgtattttaccacaataaaaaaaattagaaaaaaatccaattctccctttccttggcctaacatggtcttccaccacccccagcatcctctctcctatccactcccaagcgccagtcagtgaggcaaataaggaccattcttatttccattctctctctctacaacaatttccctattgattcaagcaagaatgtggggtagggattatgggcagtatgacttatgataaactttcactctgcaaaacaacaccctcttttaaacatctcctctcttttgaaatggaattgcaaccccagaactaaaaaacaggctagagaaatgatgcatgtatgttttgatgtgtaccctaagatgagcaagtttagattcatcctgggtttggataatgaattctgattctatgcatcatcaaagattcctttatttctcctccttgtttttcctccccatgagtgtatctgctattgaatcatgtgcacgccattcaatgattatctcactataatgaggtcagtggggagcaacttacttgtttccactgttcccaacaaccatgagaaattataagtaatgatgtcttaaatcaaattaacataattctaaatcttaaagctctaaagtagaataatgcaaacaattttagtgatgtggctgtcactttaagatactaacctgtaaactacagaaaataatgctgtcattaattttatttgcacatgattaatggaatgattaaaagctgttagtgacagggcacaatggctcacatttgtaatccccgcactttgtgaggctgaggtaggaagatcacttgagcccaggagtttgagaccagcctgcgcaatatagtgagaccctgtctctataaaaaagttttaaaaattagccaggcatggtggcacactcctgtaagtctcagctactgaggaggctgaggtggaaggatcgcttgagcccaggaggtcaatgctacagtgaactatgatcacaccactgcactccagcctcggcgacagagtaagactctgtctcaaaaacaaaaagaaaacaaagcttttagtaaaataacttgacatcctgtgttattgggtagtaactggttaaagagaataaaacatgtagcactttgtttccactagagaaatataacctgacaggaaatttcataatgagtgaccaattctggtcctataatatagtgtattgctgtatcctgagtagaaaagtctaaaaagtctctagtatattatataatctgaaactcaatcataggttcagtactttagcactcattataaaaactaaaaaatagtctagtgtattgcagagcatggactgtcaagctgtattcaagtatcagttcctactgggtgaccttggataagatgcttgaaatctgtgtgcctctgttttctcatctgtaaaatgggcataataaaaaaaattaactacaatgattttggtatgctgtaactgtttaatccacattctctgaaattacagtaaaccaatcttctaatacaataaactcaataaaattgtttcacattgctttctcattgtcttactaaagagttgtatgatgttaacacataatgatttctgaatcacaagactgttggaaatctttattgcttccctgtgatcttaactgtcagttttaagtgttaggcattcattgacttcaaacactccattgcccagtataaaaaagagggaattctcaaattacctaattagacaaaaatgaaacataaactgagggtgcccatatgtctgtgtgacagggcacgttcagtgatagtgcatgtgttcacaacttcaaatcttgaatggaaaaataaccctcattccaaaaagaacataaataatatttaaataaaataaattattgtaaatacatctaaggaggtctgcaaagcaatttcagctagttctctgcaatatttctcatatgatatgcatgctgaggaacatttatatcttgtagatgatagcgcatcattaagcctcggtgttcataaagatgatggcatttggaaaggcaccattgtcagaaatttctaaaaccaaagtggagctggtttttattctaagcctaaagtatttttaaatctagccacagggaaataattacttttgtttctattcaatcaagacctggacacagagtttatgcaatgacataatatccttcctgaaatcagaccagcatgtaggaaggaccagcatccttcacacataactagttcctgaacctttacaaacaaatcctaatttccaaggaaacaatctcatcaaatgctgcccgctagaatacatattgttctttctggaaacattacaataagattttcatgattacaaaccccaacttcctctttaatattcaatataatcttaaactcatttatttaagtggaaactgtatttttataatggctctaaaaattcctggttaacttatttagcaccaatataataatttctttttttgttgtgtaggaggagggtgatcattaactgactgtcaacgtgtgttaggggcttcttaggaacggctctaaaaattcctggttaacttatttagcaccaatataataatttcttttttgtagtctaggaggagggtgatcattaactgactgtaaacgtgtgtgttaggggcttcttaggaatgttcgtctttctgctttctactgatataccctataaggagcatgttttaaattttttttttttttgagactggtaaattttagtaatgtccagacttccaggctggtattttgaggggctgggaataaaaagaatatcaagcagcttataatcaatattctcttctctttgcattaggaagctggagttttgtgtgcaggttacgggatttgttttgagatgaacgaacaccttaattctctaccaggaaaacaatattaacacatctgtggcaactgctgacataaacatacaaacaggaagagaatgcgattctagtgcttagcctggtggcctttagaacagaattcttgctttcctcctcttcactaaggatattcgaaatactctgggcagggtggacattagtccctcgcctcctccctaatgaaataaacaagtgtccacattttaaatgtgacggagtgtgaggaaactgcagaaaagctcctaagatacacactgagtaacagttctcatctgttctgtagacacacgtcagtttgggaatttatgattcactgtcccaccgtgaagttttttgtgcactttatgttgagctatgtggcagctaaggactgtcctgtttgctgaaaactgcagcctaaagttatttttcaaagttacgggtagtgtggcatagaaatccatatgttataaagtggaaacaaacaaacaaaaaaaactgggttagcatgaaatagagccaacagaaatcagaatgagcaacagccttccactgccggccactcaccttgttgaattttagtcactagctgatggcgtgctagaatccggctcatcctgtaaggagagcgtcttgtagtctgatcaaatcgcaagtacatctcctggccctcaggtgtcatggaatttaggtagtagcagcctgaggctggggtcctgggcacctgactgaacatctcggcagatttcctattgccacctcagtctgcctgtggctgttgccgtctgtctccagtctcagtcaaagagcaaggcacccagcccaggacagctcaacagacccagcgatttttaaaaagaaagaggagtgccaaagccacaactcagaattccaacccccggggccctcacgtgacctcgggaaccaatgagaggaagagaggaaaatgggaacgtttgcagtcagccctaagccccgaccagaggcagttccagccgccagggtccctcacacaacgctgaaagcaaaatacacgtatttgacgtgcctcagagctgacgaagcacccaaaagcagccctcactaaaggagtcgaaagaaaaagagagagggaagggcaaaacaagtagaagacaaacaagtccagggctcaggaaacttttcagcctgtcaaagttagagaaagctccttcgctttctacagggcagcagcagccaggtaaaagatggacctgataaatctcttaaatttaaaaaacacaacacaacaaaaaaaaactacttcaaacaagcatcaacagctgagcgtaagccaccaccttcattatcaagaaacaactcaaataaaaacttttccagtgaaaaataaacttcaagggctttaacaccaggagtgaatacaccacagatcctgaccctcacgtgatgggaattggagggctcttacagataagactcagagaggcaaagtacacacgcgttacgtattaagcatcctttcctctttgatttctctacttccccaatttttaatcacctagaggtaaaatacttagaaggtgcctatcacatttaagacactgaatcatttaagacaagaatcactgcagaagttgcaaaggtacttcaaagatactgtcatcaacctgctaaggacccattgagaagttatacaaaagcttctaacatgaggccatatatatgtctcaaaaaggacgcaaacacaatgctaggtgagcaatattatttttgactggggtgatgattgcaagccagatagagaaagagacatttggataggctttttaaaatggggggaattctgataggcagaggctggggagggctttgcaagagactgtaggtacccatgtgtgcagatccagaaccagagtatatggtttaagcaaactgctagtaattcagtttggccatatctgagtgtgtgtgtatatatatacgtgtatatatatatgtgtgtatatatatgtgtatatatgtgtgtatatatatacatacacacactgagtgacatatatgtatatgtcattataattttccctgtttttcttctttaacattgtttgatgtgaagagaaaaagtccacagaaaacatgttatcaaattctgagcctggggctgaaagaataaagttctttgatacaaaaagtatatgaccaagttgcttctacatttggctgacggaaacatagcctggctgggaatttatagtctaataatgagaaattatttctacattatttccaaattaaaagtttaacaggatttaaattaggactttgattcttcttactctggctctccgaggcccataagccttaacaactttccctgagggaattgttgctagcctgattctgagaagcagctcgtcttgtataactgtcccgctatgagaataaacaagttaagcacgatctctgcagcccagcatgtgacaattgcctactacctcacgtagttggtaattgtcagcctcttcgggtggttacacaagagtcatcatgtctttgttttcaggttggcttcatggcaggaagggaaagaaagatctatggggccatactgtgcactttccattcttatttaggatttgagcagcagtttttctgttccatagcatcgtctgtggaaggtgaaagggatctgagacctaaggaactgctcggcagaagctcgaatggagaaaggtcgagcaccatattgcaaagttggctgcctggaaggttcatgagcccagctcagtccgcaccggtggccgtccaattaaggtgcttgcatcagctgctttgtgcacgtgctttcggcttgatggtccaacactgggagcatctgtgtcataactttttgttcaaggcagacacttggtggttatcacttttttactggaagagaatggaaggagggtggagagagaaagaagaggggagcatgggacttgagaacattgaacatgttctgggaaaccaagtaaaggtgaggaaaaggtaaaaaggtaaaggtgaggaaaaaatacgtagctttttatagctttggagagcacttaaagatagaccggccatttccaatgccaaccttgcagttcattgctgacttggctgcattctattatgaaaacaagtggaatgattcttcctgagaaggattgcagtgtgtcaaggcgaggttactagataaaacaataacaacgacaataaaacttacattgtctcctttttgcatagtcatgaatgtgttgaaagtgctggggtgtctggttctgaaaacattaagatcataagtttgtatttatgactacatataatatttcattaaaataatcttagcaataaagagcaagaattgaatttatttatttatttttaagatggtgcctcactctgtctcccaggctggattgcagtggcgcaatcatagttcactgtagtctccaactcctgggctcaagtgattctcttgcctcagcctcccaagtagctgagactccaggtgcacaccatcacacctggccaattaaaaaaaaaaaagttgtagagatgggggtctctctttgcttcctaagctgatggcaaactcctggcttccagcatttctcctgcctcagcttcccaaagtggtaggattacaggcgtgaccaatcacacttggccctacatttttttttttaaaaaaagggaatttttattccctaattaaaaaaaaaaagccaacttagaatgaagcctcattttttcaaaaaatcagccagcattttaataaggggctctaggaaggatcacatatcaacatttggttttctgtatgcatatacagggccgctaaagttttatttcatagttcaagtagtatctataaattcatgtacctgctcaccatgtttttgtcattttgtatttccaaggtactatatttaaagcaaatatgtaacattattttctcattagcatgtcattagtaccttgttttatgctaaagtattgccattgctatgaaacttgtattttttaaataaattcttttttgtgatcatatagtccccgtgttagaagaattaccactggggtagacaggtctgttgtattagaatcaagaagtggctagttctctctctggcttttcctttacaggcaactgagagagctggtcctcttctccagtgagtgcatgaagtcctatggaatcaaagagggagagagtgcccaaatcacaagcatcttccaggactgacaccatatctcttcctctctaattcctttaaaaatgaggaaaacagatggcacttgtgttcagttttcacctacttttcttccctcctaatctgctcatcaattgtgatcttcagtaagactatttcaggagtgagataaacagatggttactgagaaccaaagacagcaaaagagaagggaaaggaaagaggagagaagggaacagcattgagcacctactatgtgccaggtctgaagccttcatggcttcacattttaggttttttaacattaatctccacagctatcactggaggtatctgattggatggaaaggaggctaagattcacagaagtcacaaagcaagcaagtgcagagcctttgtgcatctccaagctgatgctattttcactcttttcactattacacaggagagacagggaaggaaaaacacggcaccgaaaaggcactccggaaattggaaaggggagagcattttggaagaagagcctgaaaatcatcctaatcctatttaactgcctgcgatactggaatgcctacatggaaatatgggtatggggcggctaaaatcccgtggtgattgagagttggtgtcttcaagtaagaagtacagatcccagagcccttagtcaatcaatagaagccacaagccctcttaggagtaacccataggtgaggactagagactctccccacccccccaaccctcaaatgaataagcagctcagcttgaccctctttgccaatcctttccagggtagtttattctctgcattctgtccgtcctcaaggctaatgctgcgtatgccttgagtttctcatagcattcactgtcaatgcaaacactccaaatacagtcaaaactctgaaatttgacctctaagcaaaacttttggtatttggaattttcaagtattttgatagatgatcccagattagcgctcaatggaatcttgtatacacagggcagaacgctaaggagtgcttttacagaagccaggaatggctcactgtctgctgccctttctactccttcacacacattccagcctcctcatcagtctgttcagagggagccaaggtagttctgccaactgggaaaatgtttgagatacaagtggcaggcagaaaaatgcagagctgatttggaaggctgctttcgaaattacatgaacccaaagattgtgggttgatgtcaaagccttcctgtgggctctgaaggccagcatttgaggattttcaccgattgatttgtgatgtgtgtgcccaactctgtgccaattaactttcccaatctgcatgcaccccatgtcccatgcccagtgcagacaagctggtgacactaacactggcagctttgaccaggactccatgaaagagcttggtccagatcagctttcctagctccagaccacagctctcatctggagtccagatcctgccgcaaacacttgtaagtggtaatagatttcctttactttgtctctcagccctccctactgtctggtgcattcccatctatgggcctccaggagcatgtgctctcccgtatgccattccctggggatgcaaccatcagctccagcccatatgacagtaacctggtctgtcctgtcctgggaccattactacacccacgcactccagccaaaccagaattctttcattttctcagttgtttcacagatctagaattgtgtgattcccttctcttccacccatgagactcagttaaaacctattgcctccagaaacactttcatgactaatacaaagctctttggtcttaccagtcatattaatacctgtaaaccactgttatgtggcacattaattagattggcttgttacatgttcatatggaatctgtttgttactgcaactactacaggcataaagttttgacatcttgaatttagaaggaatattaaacattttctaatccaaccactcaactactgcagtagttaattctctacctgcatatacagagtgtattatcccacagaggaccccaagctattgaagaatgttcttctttttaatttccatccactagctctgattctgccattttgaatcaggcaggacaaatctatgctttcttccacaagctgtccttcagatgtttgtcaaaagcccttgtaagaatgtttttgtgtagtctcacgtttttttccatcgaaccacatgactttagccattcatccagctgactgctctcttttggatctgctccagtctgtcagtatccctttaaaaatatgtgggtatctactctaagcttagagctctagacttggccaagcacagtagtacatggtacactgtgtgcatatttcctgcattcagggcattgtacttttgctgatgcagtctgagattatgggaggctttattttttataatctatattcactcattcataaatttaacatgggatgcctgaaaaacagggcagtaagtatagtagatacaaaggtgagtatgatgtggcccctgttctcaagggactgtctgccagggaagacagaaaagaaatttaccactataccccacgttaagtgaagtgtgggaggctagaggctatctgttgtctcgtgctatttgttatatatgatctaaatgttttagatcatatataagcacatatattagatcatatatatctaagtgcataaatagctggatgctatctttgttattttcataaaatctgctgttatgtgactgttctctattctttacttaccaaaagatcttttgaacttaagaagaggtctttaatcttattgcagtagttgagttttgttcaattcctgactttctcctccagctatttatttctgccttgttatttctagtagctaacaacccctaccccaatattataaaagtaaaaaataaacaactaactgaatttgggggaaaggtaaagtaagggcaggaaaataataaagctaggggtaaaatccattcacagatatgcaagccatgaagtcctgcacatttgctggaagtgggtgagaatgtggcttaagatgcctctctgacaaagcaaaaacccagttacaaaattcaacatatccgtaagatgaaaaacaaaacagtggtcaagataaatacagatcaccaggtatgctgaccccagggaagattttcccaggccctcataaagaatcagcaggcctgtaatcccaacactttgggtgcatcacttgagctcaggagtttgaaaccagcctgggcaacatggcaaaaacccatctctacaaaaaaaaaaaaaaattacaaaacttagccaggcatggttgtgagggcctgtagtcccatctaattggaaggctgaggtaggagcatgacttgagcctgggaggtcaaggctccagtaagccatgagtgtgccactgcattctagcctgggcaacagagcaagaccccatttcaaaaaaaaaaaaatcaccaccctcaaaaatattggatatggtagcaaaatttagttcacagtttcttaactgtatccttcacaaattatttagggaaagtagcaaaatttagttcacagtttcttaactgtatccttcacaaattatttagggaaagtaatttctgtgagggtcttcgaaaaccgtggttcaagtacactattgtctgtgatcttttaaaccatgtctcagaccatgtcagcactttccagcttaaaatattctagagttttccattgcaccgagaatgaaagtgaaactccttacttgaaccaccaggtcctgcacaatctagtccctgccaacccctcccctatcaactccagctccccgttagcctcctccacgttgctgcctcagttgcctttctgcacgtgctactcctcagctgcagtgttgcatggagccttcctatggctggctctttctcagcctccaagtatcagcttaactgatgcatcctcaggcaagccatccctgctgacttcctctaagtgaaggcagtatccccttattggttcctatagcccctctcccaatttataattacatatgtattcgctcatggacctgtgtgttgctaatttttcccagtagactgctttgggtggtctgtgtctatttcattcacattctatacttgatgcctattgtaagtcctggcacagagtgggaggacatcagtagcgattggttgaacaaattgattgaataaataattgaataaatgattatatgaatttccccaaagataaaatttaggatgtctagaggaatagatgcatatttttttaggcaatcattataggtattattcttgttgctgatgatacaacttggattgaacaaggattggacagcagataattctaggttttattctctgggaagagccttaaatactgtgatggttaatactgagtgtcaacttgactggatttaaggatacaaaatattgatcctgggtgtgtctgcaaggatgttgccaaaggagattaacgtttgatttagtgggctgggaaggcagacccacccttaatctgggtgtgcaccatctaatcagctgccagcacagctagaatataaagcaggcagaaaaacgtgaaaggaaaaggcgagactggcctagcctcccagcctacatctttctcctgtgctggatgtttcctgccctcaaacattggactctaagttcttcagttttgggcttcagactggctctccttgctcctcagcttgcagacagccaattgtgggatgctgtgattgagtgggtcaatacttaataaatttccctttatatctatctatcctattaattctttccctctagagaaccctgactaatgcaaagacatgtatttcactttgttggctagtgacaaaagtatatgctttgaccatcaaacaggacagtttaaggtcccttgtgaaaattagggagcctggagggatgagcaaacctcttgctccacaaagaggggataaagggcataagaaaattttagtaatatctaccttatctttgtatcagttacaaattgtataggcatgcttgccgtgcctttaactaaacagtacagcggcactgagccagctacattcagctgaccctacagatacctcttctgagggacttcagtccactggtctgtattttgtgggaacagctatccaaccagatgcagtgctccaagctgccttcttttctagcttatattttttccaaagggatatgatggcagaatcttctgagttgatcacccactaactgtgtctatgaccttcctctgatgggccagtcttgctaccttaccaaagtgggagactgtgttcatgtagcttcatttgctcttcgtggactcaaactgcatctgggttatcaaccatctctgtttcttcatgctcatacttatctctttaatagttcattcaataattttactggagattttaacaaatttactatctggtattttctagaacctacttatttttgtcctcaatgaaaataaaagcaattgcttatttttattttcaatgaattgcttagattactagaggggaatttttagtcttttaggtagaatttgtctgcacttagaggattaccttcatttacttcaggtaggattctataacctcctcccatcttgaacaacagtgaatatattttcttaatgttgactcaaattataatttgaatatgaaatgaacacttgctcattgaagaaatcctatgatgaatcctttggaaaatcttctgatcatctgttttgtaaatatttgggattacccagtgagaggcacaccattattacgattgtctgctgacctgttgccctggattctgtctccattcttatatacaatccctttcttcatggtgtcaagcagcagttgggaattgagtatggcccacgactgtggaggaataaaggcgcgggaggaataatgcaattgcatttcttagatatgccttgttggataaatccagcccagtataccaaaaaatatgaaaaatatgatagaatgctttccttccatattcctaatataagaccaccaatctgtacttgaaagtggtgcagagaagagtagcaacattttaaaaatcctgtaaagagaagagcactacaaatttgagagagtagcaaaatatccctctagaggtctagatttaggtgtcatgtagctctgaagtgactggaagacacattttagggtaatagcagggcagcaaggggaggctcctcttttgagttaagagaaataatttaaccaaaagtgatcctggtgtaataaaaagatttttttctgacgtctcgtttgtcatcaacagagacaaagtccctaactcaccttaccatttcctttacccttttttattcagatatttctaatgtattcttcatgccaggcacagggctagactgtgatggtacagagaagaataagacactgtctctcttctcaacaataatttatcatgacaaaagaggaggacagttacaattataggactgcgttgctggtgctatgacagaggtgtgcagagggtgcccggggggggcagaggagagacgactaagtcagaacagaatagaggtattctgcatggcagaaaggtgttgcaggtgcctagagggatgcatacctgggcgagaaggctaggaagactatatgggggaaaagatgcccatgaagagaaaaaaactgcataaatactttcctatgtgatacccctccttcaattaataagacagattagtattcaaatcaccatgacaggccaggcacagtggttcacgcttataatcccagcagtttgggatgtcaaggtgggtggatcacctgaggtcaggtaggtcaggagttcaagaccagcctggccaacatggcgaaacctcgtctctacttaaaaaaaaaaaaagaaaaagttagttgggcatggtggctcgttactgtaatcccagctgctcacgaggttgaggcacaagaatcgcttgaacccaggagacagagtttgcagtgagctgagatggtgccactgcactccagcctgggtgacagagcaagacttcatctcaaaaaaaaaaaaaatcaccatgacataggggatctcagggacagcatgaatggtgatgcgtgtgttaattccactgcagacatcatcacgcaatgtatctctatctcaaatcatcttgcataccttgaagatatacaatctttatcagtcaattaaatattttaaaatttaaaaatcatcatgatacaacacctcacatagtgacacgtgtgtgtgtgtgtgtgtggtgacagttgagatctactccctcattaagtattcaatagagtcttattaattatagtcaccatcctgtacattaaatccccagaacttagcatctcccccattccgcatcccctatccctgggcccagcccctggcaaccaccattctactctctgcttctgtgagttcaacttttttttgagatggagttttgctcttgtcatccaggctggagtgcaatggtataatctcagctcactgcaacctccgcctcccagattcaagcaattctcctgcctcagcctcccaagtagctgggattacaggggccccccaccacgcccagctaatttttgtatttttagtagagacagggtttcaccatgttggccaggctggtcttgaactcctgacctcaggtgatctgcctgcctcagcctcccaaagtgctgggattataggcatgagccactgcgcccggccgagttcaactttttaaaattccacatgtaaatgagatcatgcgtcattggtctttctctgtctggctgattgcacttagcataatgtcctccaggttcatttatttttgtgcctgttttgtacagactttctggaggagttctttcccattagagaatatgtgtgtatgcatgaagatacagagactcctgagattttttaaccatttatctttacagcgtgatgcttatcacagcacgcagtggcctctggccagtctcccagagcaccaccataatcacactgtgtcttatagttcagacctgtttaaacagatctggtataacacagatagccagccatggttaccttctccttagtggctccgccaaaatgactcaacactaatcaatcacaagagaatatttactgagcaccaaaaatgtattgctgcacagaaagatagaacttgctatcttttgtaacaaaagctcctcacaatcttcaatgaccttaaaaccctctctttcattccctgactttgggaatctcaagggctgtccttggccttggcttgtttattaatatggcttgctttggaaaatccagtcccagcactctgttaatcagccagtgcattgctgtatgtgaaaaaatgtaagaccaaaattgtgtggtatagactatgattataatgttttgaaaattaaaaaaaaaaaagcatgctaaagaaaagtttagaagaaactgcaccaaaaagataatcatgaccatttttaggatggtgaaatgatgggtgataattcttaaatctccatttttaaaatattctattgtatgactaggggatgaagcctaaccaatgatatatgatacgggtatggagaaggaacctcagtcttagtttatttccagttgcctctgtgtattgcagatataagacagacagacaagaaaaatctgcacaacaatgacagatacggtcttacatggcttgaacttcccagtgtctcatacagttatgcaaaactccagtgttcaaaataatttcatctaagaaagagaaaacaaaaaaagtttactgattcctctttcaaaatgcctctcaaatccattccttattacatgatgtgtcctgtacacagggacctgccctcctgcctggagcaccctgacagttttacttgtgtctctatgtctagtctggccccatcccatctacagttttttttttttttttttttttttttgagatagagtctcactctgtcacccaggctggagtgcagtggcgccatctcagctcactgcaacctctgcctcccaggttcaagcaattctcctgccttagcctcccaagtagctgggactacaggcatatgccaccatgctcagctaattttttttttttttttgtatttttagtagagacagggtttcaccatgttggtccagtctagaactcctgacctcaaatgatccacccacctcggcctcccaaagtgctgggattacaggcgtgagccactgtgcccaatccccatctacacttaatgccacagaacgttcagcttctcaggagaccactgcagtcataccaccctcctgccacaaaacaccaaaccacgcaccacctttacggcttactatgtaagtcatttagcttcttaggggctctctttccatatcttaaaaaaaaaggtttataagtatatgtgcatatacatgtatatatgcacacatacacacacgcatctcatatgaatgtatataaacagaccaagtctatatgattatcaattccttttctattatttgagtcaactagatcacaatctaagccaagcaaaagcaaactagttgaatgaaggattttgtgtcctttcttgcatgtagctttttggagaaagattgaatgggcatggcaagagctgtccactgcacagatccaatctccagacgtaggaaactctctttatagctatccctggttttaaaacctgagataaattccatagaatagccttacaatattttctgaagagctgatatttacttcagctttaaaaatacagtcttacaccacataacgttttgcttaatgacagtggtcccataagattataatagcatacgtttaccgtactttttctatgcttagatatgtttagatacataaatgcttaccattgtgttacaattgcctgcagaattcagtacagtaacatgctgtgcaggtttgtagcctaggagcaataggccaccccacatagcctaggtgtgttgtaggatttgtgtgagtacattctataatgttcacacaacaacaaaatcaccgaatgatgaatttctcagaacatgtccccatcattaagcaatgcatgactatacacttaggcatattaaagctctagcctcacaacaatgagcaaaatctatttaaataacacaatggtgacactgggaaccatttgcataaagcagtctaaacactttttatccaaacacttcctaagaaattactcagaagtgctatttccactaatgcacctcaaattcaaattttaaaaggaactattaaagacattattcttttctcaggatgaagaggaagtgactttaaagtaaaaaagccaaacataatgaaacacaacaaaacaaaatttggcccataatttctcaaacctgggcctgggaggtcccttgaggtcctgtgtgctcagatttgagaagttatcctgtggttttgttgaattccgtacagagacactccatctgcactgtccttttaccatcgtgttctaaggaggtaggtgaatgggcccaggcacttggaatcactttcatttaacaatgatttcatgaatgcctactctgtgccaggcaaagttcttggtgcttggaatgcatcaatgcataaaacagacatcatctctgtcgtaataaagcttaagatttaaccaatgaacacagtaacttgaaagttattaacctgtgatggatgggccactggaactctacaactgcatgcaatatgttgggtgtatattcacttttctagaacatgaggcttttagatttcatcagatcttcaaaggatgctggaacactcaaaatattttttaaatggctctaaagtatgatttcaagaacacctagaaatgtggctttggagtcgagttaacttttaaccaaagtcaggctctgttatttatttattaactacataagcttggacaaatcaaattagttcatttttctgcatctcagtttcctcatctataaaattgaagttaagcctcataaagctcttgtaagggttaaattagcttatgtatatgaagcactgagatatcgtaatattagtgctctccttcccatcacttcatcctgcaggttttgaccaaaaatatgggtgagaactttgaagcaagttcaaagtatagagatagaataggcctccttccatagctagatgttttcaattttatgtggtcaactgaatcagaaatgtcataggttagcagggaaggtcccttccaaactaagagtttatgagtctgtgaaatcgccaacttcgtatgaattaaaagggtggatgcctagacttttctctggagagtattttatgactgcaggatcagtccaaccttgttcattgattccttgagtgaaataaatgcttactttacgtgaaatgcttattttaaagctatgctatgttacttggtaaaattctcttagtataactcagaaagacaatactcatgatgataatgaaatttgccttctatttgtttagtatagttttcaagatttaaaagttataaatataagcccttcattttattgattatggaaattaccatttaaatcaaccttttaaaagggcccgcaggtccctaatcggttttgctcctacttcctcttgcagcctcaaattcacagcctccttcttggtctctgtattctagggacactggcatttcccttccagaggctttgaacatgcgcttccctcgtactgagctaaaatgctaaccatccctgcagtggcataatgaacactgctcaacgctcatttcctaaaggatgctttccatcttcctaagcagcaccctgtacatctccattgtagtctctgtcatacttgcattgtgatattttggggacatgattatttgattaatatctgtctattcccctagcttgtacaatccatgaaggtagggaccatgtgtctttctgctcattattgtatcacagcatttagtccagtgcctggtacataggaatggacaataaactttgatagaatgaaatgctgggtgaaagacaggtaggaaggatggtattttcacttggcatgtgtgaattgcacaagggcatctgattactcagcacagatggagcatgaggaccagtgccctgatggttactttattcctcttcctccatgctgcctcctgtcttctctctcttcttctggatatgactttctgtcctaattaatgatgtctaatatgccttttacttcattatgttaagtctttgtgtatagagggggctaacgtatgaagactcaaagctgctggtatacaccaaatgccataaccaatcaagttcttctgcaggaaatttccaccttgagtttctttttctttttttttctttttttttttttttttgagacggagtctcgctctgttgaccaggctggagtaccgtggcgtgatcttggctcactgcaagctcagcctcccaggttcatgccattctcctgcctcagcctcctgagtagctgggactaccggcacccgccaccatgcctggctaatatttttgtatttttggtagagacagggtttcaccgtgttagccaggatggtctcgatctcctaacctcgtgatccacccgcctcagcctcccaatgtgctgggattacaggtgtgagccaccgcgcccggcctccaccttgagtttctttttttagaaagactggacttgcccatttcttcttaaatttttctcagaattatagcccttccttcatatacttgtgcctgcaggcaggaagcatgttcagaaaggcttctcatggataattggagtagaattaaaggaggaaggactgatacaagcaatgaggcaacattaaggcaaaggaaagtcattgtacccctgataataattaaagtcagagaagagatgaaacaaattcatacctacctggaggaagagtgcaagagggaaataatgatgataacagcaacactacctgatgctgagtaacttccatggcctggaactgtactaagagactctaaaatgaagaactgacaataatatttgttaaatgtaaataaatacagaatttgggctcattcaccatcatgactagaatgctgaagtaatgatagctcacatttttgaacatgtatgtgtcaggcactattctaagggctttacatacatatatctcacctaattcttttctttcaaatttttacatttaatttaatttttctgttttttgagacaaggtctcactctgttgcccagaatggagtgcagtggcgtgatcatggctcactgaagccttgacctccctgggcccaggtgatcttcccacttcagcctcccaagtagctgggaccacaggcgtgtgccacccccaccatacctagctaatgtttgtatttttggccatgttgcccactctggtcttgaactcctacactcaagcaatcctcccacctcggcctcccaaaatgttggaattacgggcatgagttgctgtgcctggctttatctcatctaattctacaaacaaacctatgaggtagttactgttttttcttcaatttacagatgaggaaactaacctcctgtcttcctgctctagttgtttgcatatatagctctcagattaatctcctaaagtatagttctgatatattgttccttctacaatatcattctgatactattttaaaatatcaagagcttcccccactggtaaaaggacaatgtccagattcttcagtctggcattaaaggcccatcatggtagcctttcttgttgtcaccttaaaaacctttgaaatcattcatgtttggaaggagagtccacccctgctctcacagcctgtgaggctctcttctcactccttcaattcccactcatttttcaagacctgactcagaggcccccttctctaggataccttcccaggcccctcatgtgtacgccacctactccttcctcctcattcccatgaaacttatttctggcatagtcattgggcctttcactctgtgttgcttttttgtcatctcttattgctcttatatgataaacttcttgaaacccacaatatcccacgcacatctttgaacctttctcttgatccagcctagtgtctccctcagagaggcagtgtggtatatcagaaagaccaaagcttggacaccagtgagactatgattcaaaacctggctcctcttcatggctgggtgaccctagacttcactttatctatcttagcttcagtgtcctcatctgcaaaataaatgatagtgacacataccttgcattatacagagagcctctgacatatggtagggctcagtaaattatcagaagttttgattgacagatgatgtaacaagtactgaccaggttcctcaaagagcctgaagtcacacaaggtatattctgttatatactggaatttaagtaccactatattctggcacttaaacagagggagatgaagggagtaggctgtatgtcaaagacaatcagggagattattccttcaagctgaagtggtaaaggaatgaaaagcactgtgcacactcagtgagaaggtcttatagacaccttctgtagttgaaccatcatcccagttgatgtctgatgacaaggtcttcatactagaaccctggaaacctcacctaggaccctggggcagcaggactcttaggagacttcaaattctatattactcaaggtgaggtcaagaaccagcagtgtgacatcaccaggagcttcttggaaatgcagaatctcaggccccaccctagacctactcaatcagagcctacattttaacaagatttgcagatgacttggcacaatgaaagacaattttctaatgtagctcattttttcatcaacaaggaagaaaactgtgtggactttcccacgttgtgaaatccactcactgcagacacaccacaggccgaaggcccttacttctgaggttttagatcttgttactgagccatagatgtctacatggttagcaaatgttttaggaattgctttgatggtttctattttatttacatcatatattaaatataattattgttaaaagtaaaattatttttcttaaagattttattcatttagagggcttttagttctgaaaagacatagggtctattttcagataccaaaacactttaaactcttgtaggaatgtgttttagtgctttacattaatttcatataattaaattttgaagcccttcacttctaaatcttgaaaagaaacatctgtcaacattccatgtaataaaaaccccttaaaatactggattttccccgtggacatacagataagaattctatgtaatttttaaactccacatctctgaatcaaagaattctgtaactttaatgcatgagttttaaaaatatataagttaatgtcctccctgatagccacaccttctgacattctaagatctaccctaaataatataaaaattgatacattttatttacaagtatattgtacccccacgagacattgccttgcccacaagtgaaccccctaaaacactttgttttacttctctttaactctttattttccatcatagttatttgtttacttttagcatctcctctatataggctaaaaaggaaacattaacaacttcattcatctgacaaagatttactgatcatctaccatgggtttgaggctgagaatgcaatggtgaacaaaatccataatgttagtacctgcttcagggatctatgctgcagttaaatattaagagtgttgaacacaactggctgaggaaacagcctgtgagaggttggaggatttcattcatacagtgagagatattagccccaagcttttgttgttgttgtagagatgaggtctcattatgttgcccaggctagtcttgaacacctggcttcaagtgatcttcttgccccagcctcccaaagtactgggattataggcatgagccacagcagtcccaagcttttgatgtcaaattaatcaagactgccaggtaggtacatttcttcattccttcaccatacatttaatgagcacttactttactgccgtcactaagcacacgaagaactgacagataaagatccagaatgagttaagcagaagtgttccatataaggctggagataaatcttggattaggtagagcctcatatcttttacatctccgtgtcctccacggtaactagcaggacactttatacagaataagcatataccttctgaatcaagatttgtttattattagcaagtacctactatgtgctatgaactatactaaatactgagcataaagaaacaaagggcatagactctccctgcatggagtagacaagaaataacagcaattataataccctctgtaagtcttaagacatattaaagcacagggttctatggaaacctgcaggcaggccttgccatccatttggcaagtaagcagtaaggtatttggggagccttatgatccagtttaaaagttggcacacattctctccatctgcatcttggaggtagatcctatatctactaaagtctgagatatgtgttaagatcatagattttatattaatccttctgtgcttatcttatacccatcacttcttcctttgggaagcacacataaaaatgagaatcttctaatcaatattgtgaaaatggccatactgcttaaagcaatttatagattcaatgctattcccattaaactaccattgacattcttcacagaattagaaaaaactgctttaaaatttgtatggagccaaaaaagagcatgtatagtgaagacaatcctaagcagaaagaacaaagctggagacagcaagctacctgacttcaaactatactacaaggctacagtaaccaaaacagcatggtactggtacaaaaacagatacatagaccaatggaacaggataaagatcccagaaataagaccgcacatctacaaccatatgatcttcaacaaagctgacaaaaacaagcaatggggaaaggattccctacttaataaatggtgctgggaaaagtgactagctatacgcagaaaattaatactgaaccccttccttatatcttatacaaaaattaactcaatatgaattaaatacttaaatgtaaaacccaaaactataaaaaccctagaagaaaatctaggcaataacattcaagacatagccatgggcaaagatttcatgacaaaaacatcaaaaacaattgcaacaaaagcaaaaattaacaaatggtatctaattaaactaaagagcttctgcacagcaaaataaactatcatcaaagtgaccagacaaactacagaatgggagaaaatttttgcaatctatccatctgacaaaggtctaatatccagaatctacaaggaacttaaacaaatttacaagaaaaaaacaaacaaccccactaaaaagtgagcaaaggactgggcatggtggcttacgcctgtaatcacagaattttgggaggccaaggtgggcggatctcttgaggtcaggagttcgagaccagcctggccaacatggtgaaactctgtctctactaaaaatacaaaaattagccaggagtggtggtacatgcctgcagtcccagctactcgggaggctgaggcaggagaatcactcaaacccgggaggtggaggttgtagtgcgccaagattgtgccactgcactccagcctgtgcgacagagtgagactccttctcaaaaaagaaacaaaaaaaaaaagaaagaagaaaaaagtgggcaaaggacatgaacagacatttctcaaaagaagacatttatgctgccagcaaacatatgaaaaaaagctcaacatcactgatccttaaagaaatgcaaatcaaaaccacaatgagataccatctcatgccactcagaatagcaattattaaaaagtcaagaaacaacagatgttggtgaggttgcagaaaaaaagaaatgcctttacacggtcggtggggatgcaaattagttcaatcattgtggaagacagtgtggcaattcctcaaagacctaaaagcagaactaccatttgaccgagcaatcccattactaggttatatatacccaaaggaatacgaatcattctgttataaagatacatgcatgtgtatgttcactgcagcactgttcacaatagcaaagacatggaattaacccaaatgtccatcaaggttacaatggataaagaaaatgtggtacatatacaccatggaatagtatgcagccataaaaagaaacgagatcatgtcctttgcagggacatagatggagctggaagacattatcctcagcaaactaatgcaggaacagaaaaccaaacaagcatgctctcacttatgagtgggagctggacaatgagaacacatggacacagggagggaaacaacacaccggggcctgtcagggagttggggagagggaagggagaacatcaggataaatagctaatgcatgtggggcttaatacctaggtgatgggttcatagctgcagcaaacctccatggtacacatttacccatataacaaatctacatatcctacgcatgtatcctggaacttaaaataaaataaaataaaatttaaaaaataaatgagaatagtcttggtcacagactaccatgtgttgttcatttataatcaaatgtcttaaacaattactgctaaaagagcaattgtggtttccttactagtcaatttttatcaaagggatcattatttacaaaagtttctgggcagaattccattgtttcattccatcattggatttcttggccttcaacacaaaggggctatatttggagagacaggagtcctgctccacgtggagctttgtagtagcatttgcttcaggacacctggcaaaacactccactggtagtttctggaaaaagaacaattaaatcatggctatctcctctgaaaatgatcatcatcatggttttagaatgtctgtttcccaattagctgttgcttatttcttcctttgactatttcttctaactaaaatgttcctttgcatataagcggtgtacagacagtgcatggcgaaaatagagctgaagactgttttgaggccagtatgcctgaaatagacacaagtatagggtttatagtatatatatattttttaagtgttagaaaagcatctatcaatatgcgtatctgcatttcttccatgagataaacttgagccccactaattacttgtttattttatttttctaatttctttttcttttcttccttttttctttttctttttctttcttttttttttttttttttttgagtttgagtttcgctcttatcgcccaggctggagagcaatggcatgatttcagctcactgcaacccttacctcctgggttcaagtggttctcctgcctcagactactgagtagctggtattacaggtacccaccaccacgtccagctaatttttgtgtttttagtagagacaacgtttcaccatgttggtcagcctggtctcgaactcctgacctcaggtgatccacccgccttggcctcccgaagtgctgggattacaggcatgagccaccacgcccagcctgttttctaatttctagtcagatgtcttggcaaagcatgatttgtctcatgggaatacccatttcctcccatagcatacctgatcattgtctgcccacagtaagtgcatgctatgagcttcttccaagctctgaggtcagcaagagccccagtgaacctgatgggcactttgcctcttagtaggctctctcataaactacattattctgtgattctctaacaagcacaactttctgtggacttaatactgacctcagattagcaattcagatttaatgagaaacactggatgtgtacaaggcatgacactaaattccaataactcaatacattttcttaatataaaagctctagccaggttgatagagaaaaacctaacacgacagctccagccctgcctcctccatgagccctcctgggatcatacaaccactcttccttctctgaactcataatgagtttgaagtgaaattagcgagttgaggacgcaagcaatatatccagggcccagagaaagcggcagagctggaagtagggaagtcaaagccttcacaatcagggtgataatgaaaattggagttgtgggtcagctcttagctctatgcaaggagacacctgaccaactaatgtctcaggatgaaggtcaagatcaagagaaggcaggagagaagctggtgcaatggtaacactttcaaagcacagagttcgctattgaggcagaaggtttgcaaggaggagagaggagagagaacagccgtattcaactactgtttcattcaaatactgtacactgaatgagaaccctataaagcactggtaatctgtaacaactgccctgtgttcaggatttcctagtcccactcaggacatttgccacagttttgtagaatttgcaacgtttcttagactgcacataatattatagcagaaaagacagcaggaaatactgataatctccactgggaatgaatgtatggtacagaaagagtctcttctgagtcaaaggtttacctccaagagagggattggggatggggaaaatatgtgttcttaagctctgacccacctgttcctgtgtgtttttccttcatatggaatcacatttctagatctagctctgtgaatgatctatctctgattcattttttacaacttttatgtagggtctattgacatcatgctctcctaagagaagaaagtggatgtatatatagagaataatgacttgcaaaggctttcttcttcccagtgtttggatagttaggaatacagggccacactgagttcttttcaactgcaagttagacggcagcaggcagctgttgctcacttggttcttgggagaccacgttgctgacaccctcctggatgcattgatggccctaattccccctttgctagcaaaggtgctggtggttcttccggctgtcaatgagtttaagacaagactgcaggaaaagaaataattaggggattgcaaaagggaaacatattttacaaaatattttcataggattataatagaatattttgcaccctccagccttcttctttataagtgaaagttacacaactctaggctgtaattcaggaaaactgcacagactgataaatagcagtaattatatcattgaaggcaactgagcaggaaggttaataaaacactgccaactctcttgcgatataaaacttgcattgctggttcttctcctttattataaaaaaataacaaactaaatgaatgtgggcattcatgaaatatcattaatattctgaactttttgaaaacagactgctttcttattcaccttgaataaaattcaatatatatattgaattttaatatataatcttttcaccttctactcattgtgtataatacttctcagaggcagcaggatgtagtagaaagtagtcatgcatcacttaatgatggggacatgttctgagaaatgtgtccttaggcaatttcatcattgtgcgagcatcacagtttgcaaacaaacctagatggtagaacctatgacacacccaggctatctggtatggcctattgctcctaggctacaaacctgcacagcatgttactgtactgaatactgcaggcaactgtaacccaatggtaagtatttgtgtatctaagtccatctagacatagaaaaggtacagtaaaaatacagtataaaagataggctgggtgaggtcgctcacccctttgatcccagcactttggaaggtcaaggcaggatcacttaagcccagaagtttgagacccacctgggcaacataataagacaccatttcttaaaaaaaaaaaaaaaaaaatagttgggtgtggtagcatgcacctgtggtcccagctactcgggaggctgaggcgggatgatctcttgagccagagaggtcaaggctgctgtgagtcatgattgcaccactgcactccagcctgggcaacagagtgagaccctgtctcaaaaaaataaaactaaaaataaaaagataaaaagagtgcacctgtatagggcagctccattataatcttatggaaacactatcatatatgtggtccattgttgaccaaaacatcattttatggcatatgacatggatttttaggaaagaactgggttcaaatcccaactcgccaacttcatcagctgtgctcttgggaagcctacttaatctctctgagcttctgtttctttatttgcaaaatgcagataggagatgtttaccttataccatgattttgagtataaatcagattattaaaagtgctttgtaaactatatattttagttgtaatcttatttacgtatttcatcacttgtagtctgaagttatccatctctctgttcattgagtcaaaacggaatatttagtgggctcctttttggttctgggatacagagatgaaagcacaaaggctgagacattcaagagctcatggctcagaggaggcaggcagccgtgagagaagatgaggccaagggcagggccaagtcctttctcagcataggtgggaagcaccttggtaggcaagagatgcttttcttgcatgtggattatccagtaagttctatgttaaagcagggggcagagaggtagggaaagtgtaattctttcatttcccaaaaaacacttaatgctgtttctataagaaaaaaagttaatgctacaggatttgtcacctattggatatgcagttcgtgtcagaacaaatggttgtttctccttagaaagttgtgcttgaagcatttcatgaaatatccatgttttgttttacacaatatacataaaagctgcagtaacatgtaatcaacaaacatttttactgtttatcttagggtttcatttgctttgactataaaatacaaggttccatatttaaacccatgcatttattaaagagaaacaagtcattgtgtcctagggacaaaacgttatgttcctgttcctcttattttctttttccttttctctgaatggcaatcctgggttctagatgccacctagctggggaagatagtctttcaagttgaaattcccttgtcaggggtgttttgtgcctatattcctatctagagaaactaacccatgcctttcctgctccaccccttttctccggccttttctgccctcaccccacccccatcctctcattttgcgtgactctacatttccacatttgtgcttgactcgggatgcaggtaaaagtcaaaagatggtatcattaaaacaaggagaaaaatgagacatttgttcattctcaatgtgtttggcatgaatactttctaatatatattataatttttgctttgtggacttgctccttctaaatgagtcagtgtagatggtggtggtaatttatttgagtagacatgtggcaacatggctttcctttgcaaatcaaaacaaacagaaactctgctgattgagtatgccaggacctgttgttggacacagagacaaattttattttagaacatcttattcagatcaaagtaacaacaacatttgtaataataaacaacaaaaattccataaagcacggtccatttgttgagccagatttaccagggttctacttgaactcttttcctaagtaataacattgttcctaggtgataacaattctaagccaactgtgatgagttccagaacatttggatcctagttagcggaactgaagttctgaatccaagcccataatttgcttttaatctcttcagagaatggccagttttgctgttggatatgaaagactgtagattgttggggacacacacaaatagaaattgtataagcatccagtaaaagtaaacattatttaaagtattactgatgggaatttttaaaatttatcatgagtgcattgctgtagatatctgcttttagtaaacaggatatttggaatgaaaaaaatgtgttatccaaggggaaattttattacaatgtagcattaattaatgcttgctttattaattaaaaattaacaggaactcaataagcagaagccaccaatcccattaaatatttccatttgtatgtccttcagccaccctgatttggcatccatggtcctaattctttctcttccaacttgctaatctttcatgcctgaaagttcgcatatgatgctgacccttgccagagcatcttcccttttctccattctctggtgaatttctacctagatttaaacattctcttgagaatcctcttttctggaaagcatcccacaatccacttgtcccaactccacctttctctaatttgttggctcccacagaaccccaagctgatgtttttcagctgcatgtagcacaattccactccttcactttattaaatgagtaatacaactgatgttgacagactagaaatgaccaagatcataatgataataaatagcagagccaatactctaatccaagtcctcttactctagggcaatcattaaactctccttagctgactgacttcatagctacctgaccttttttgaaacctcttacttttgcctagcaaaacaactcatcatcgtcttttcccaagcatttacagataccatgttgcacccccttaaaatactctctgaccttctttgggctaatctccatcttttctataattatatttttgatatgatagttaggtactttcatccttttccatgtatctccatcacacacatggctgtggtcacatgccatctgtaactgccatcagtaagtcaaccctgccatcagtgcgtgaatccttagagctagatgtggcatagttaactgtgacattaggaggaataccggtaagggctggcacctggagagagacccctctccaaggaatgagataagagcaaatctaattatggtagctgtcaggccaagcccaagctgagggataagaactggataggtacccaaagtccagcagagatagtggcatcagagaaactccatagtgggcaaaacccagtgatggctaactcaagggcaacagacaaagcaggcaagagtcaacagttactcctgggcaccaatagtgatttggagcaggactacagccacggtggtaggaatgtcatgggcaatgacgaaatgcttagatgtgttatcaggataaggactttggcataagggattatagcagaaggccagttatctgaatcaagacatggaagaaaagccaaaataattgcaactgcgattaaataccatattctaggctctttgttaagtatttttatgcatatagcagacatttcataaatatttgataagtgaatgaaaccaatgtctcatttaattcttataacaaccaataacacaaccgagcacctaatgagatcagtattattatccctatgctacagacaaagaaatgaccagaaaactaagcagtagagccagaattcaaacccatgtctgttagaacaccacagctgggttccttccccagtactagcttgcattggtgctttattccacctatttaataatgagcaatcaagttcttaagactggaagtgatgtattttataatctctgtacctgataatataatctatggagagtacatgtggttgactaagaattatttaggttatagaatgagacaaagccaaaacaaatgacacacaaacactttttttaaaaaaaagttaggaagagtgcactttttcattggaagttataatgtacataagatctggatgatgtgtgtcctctgtaacatccttggagagaaataacagaaaacactttgcaaaatactttgtcaaggaacagacagatgctcatcttcagtaatgtaaactaaaatgagcttactgtcattaaaacacagttcccctcagatacctgtctttgtagcacaaatgtgaagtaaaaactatagaaatttgattcagcacgtgaaagctcctggcaaaatctcacttttccacttcatcaaattcatcaaatccttccactgaagagagaaagattagcaggaatattcagtatgctctgatctgagcatctggtcaatctctttcagcagaggttgggattcaaaattaaagagcacagctgtgaatttatttgcatataccagaccttacatttttgtgcatatatagaaactttctttagggacatttgaatggccacccccagagtgagaagacccttaagacccttaattggcagagttagcatccactgacagcaatggtaaatagaaactctttgtgaggccttcttaattgagtgaaccaatatttacagacatcaggtttcatgtaccttaagacagaagatcccagactttagaattttacagatgagaataatttcaaaacaaagttcaagagtaacactagagtttaactaccttttaattttgctaggtcaaagcattcaacatcatcaccatttcattaaaataaatgacattttaaacatcaaaaagtaaaaaggtaaaaatctcataataaacaaaaatgtcagttggaaatcctacacaacatttttttcatatgtaatcatgagttttatctgattgctatccaagaaccagcattttgggagcagtggttgatgctcccaaaatgttataaatttacctttaaggtgcgcacaggggttactgtgttgtcgtgcattctacttaccaagtggttcttctagctggtaaattctaaaactcagatctatggaagcattgagctctgataataaaatggaaatcactgtcgtgatgtacaatttatcttttaaagattacataaagatcacatttactttagcatggtttataagggtcttcagactctaccttctgccttcctctccaacctaatcttctctaattctcttcaggcagccttctgacacacctgttatctctcacatgtggtttcctctatcagaaatatgccttcacttcttctttaccaaaaaaacttccattcagccttcaaaacacagaaatgactcctcctgttttgtgaagtgttcccagtcatctggttacaaagcctatggattcatctataataagcaatgtagaaataagcaatcttggttctgattagtaaataaataaatttagtaatataagatttccactttgtagtgtgactatcacatgccagaagctgtcccaggataggttattcgttatctataatcttcatggcaatgttgtgtgattggtattataatctctattttataaatgtgggaaaataaggcccagagactcaggaagtgatttgcctgctgtcacacagcaagtaggtgatattgctaggagctgaactcaaagcttgtgctctttccaagctattgtgctgcctctgaattcgatctccaattatatgctttaataatatttcttgagcatgtactacagcaccttgctaggacttatccactgcattcatttcttcatctccctctctatcctgaaccccgttcatcaggcatttgtccccaccgttcatcaggcatttgtccccaccactcctgtgcaaccacattcatcaagggtgccagtgacatctgtcttgacaaactcatgataatttcttggccattttctttctcgacctctcagaagttttttgacacttgtgatcagtctctccttcctgaaattttgtcttcagttgtcttctgggatatcaggctttcctgattttcctgccatctcagtctcctttgagacattcttcccttgctgacctctgaggtggtggtgcctcagggctcattccctgtcctcctctcttctctgtatatactcatttactgggtgatctcatacattcctgactttaaacactaaatatatcctggtcattctaaaaatcccatctctcatctgaactccagacttgtatccacctgaatctctaatatgtcccaaagagaactctgtgcccatccaacccaacatgctctttgccaggcttctccaactcatttaatagcatcttcattcagccagtttcttaaactaaatctttaagagtcatccaacaatgaagcatcctacaatcaacacctgatggtcttcccttcaaatgcactccaatcacaccatgtctcattacttcctgtttcaagcactattctctcacctactgactactgcagcagccctgctttcattcttgccctctactgtcaattctccactttctctttgtctggaacactcatccccctgatctaagaggccaattacctcctttcatctagatctctcctcaaatatcaccatccttgagaagtcttcctcaatatcttatctataagaaccctacactcactttctattttgtaaaatctgcttgatttttcttctcatatacttatctgtacttgatactatgttatatatttattgatttatttgcttattatctgtgtccccaggacaaagtaaactctatgagagcacggactttgtctattcaatttattttagcttttttaagcactccgtaagtttttccagaatgaatggatggacggatggatgaataaatgaatgaataaatctcagtaattttgtcaaatatttttatacattatcctattcaatcctcacaataaaccagttcccaagaactaacttgctcaaggtcacgcagttagtaagtaatggagtcaagatttggatctatgttggtcagactcaaaagtctttcaaccacattggcatcaattagaggtttacaattaaggctagtgtccaatctattgggaggtaatacgatctagccctctgccttcagcaagatattttacaccttaaattatgctaccaaaaagtagtatcaccctcagtttatagatgaaacaacagagacatttttatgatctactcagttttaaaagcaatacaacaaacttacaattgactcactcattctgactcacagagaatacgtatttattttaatataagaatgaatgtgtcaacaggataccaagaaaattcagtgaagaaagaacagtcttttcagcaaacggttttggggcaattagatatccacatgcaaaagaatgaagttaaacccctaccttatagcatatacacaaataaactcaaaatgaatcaaagccctaagtgtaagagttaaagctataaaactcttagaagaaaacattcatgaccttggattagatgtcattttttagaaatgacatgtaaagcaataagcaatcaaagaaaaatagattaattggaattcattaaaattaaaaacttgaactttaaagaacactgccaaggaactgaagagacaacccacagaatgggaaaaaatacttgcaaatcatgtatctgataagagtctagtatccagaaataaaaagaactcttaaaaatcaatgataaaaagacaaaaaaaaagtaagaatggtcagagatttgaatatacatcttcccaaagaagatatacaaatgcacatgaaaagatgctcaatatcattagtcattaagagtatgcatgtcaaaaccacgatgagataccatttcacaatgactaggataattacaataaaaaagttggacaataacaagtgttgattaggagtagagaaatttgaacctgttgctggcaggaatgtaaaatggtgcaaccactttggaaaaccatttggcagttcctcaagaagttagacacagagttaccaatgaccaagcaattccactcatagatctacacccaagaaaattaaaaacatttgtttatagaaaaattgtatgtgaatgctcacagcattattcatcgtagctaaaatgtgaagacaacccaaatgtccatctactgataaacagataaacaaaatgtagaatatccatacaatggaatattattcagtaataaaaaggaatgaagtactgatgcatgttacaatatggatggaccttgaaaacatgctaagtgaaagatgccagacaccaaaggccacctattttatgattctatgtatatgaaatgtgcagaagagatgaattcacagagacagaaagttgctaactgttggagggaggggaaatacagcataattgcaaataggcatgggttgctttctgcggtgataaaaatattctggaattaaatagtgatgatggttgcacaaatttgtgaatatactaaaaactactgaagtgtgcattttataagggtgtattttatgtgaattttatctaaaaatttattttaaaatgaatgtgattttaacagtaagttaaattatctcctgtaaagctagagaagttacacagtggaatgggacaagcactgaatcaggagacctgccacatccctgttaccaagatctctgtcttggtgtgggtcaatcatttatcctgtccagtcgttagtgaggtcttggcaaaataaggggttggactcatagattatctctaaggcacctttagtttcatagctcaatatttataagcctggacaaaaacttaaaacttggataaaaccctaaaaggaaccagatgcatacttgtgtactccttgctgtattttggatatagatgaggctctatagcatgatacggaaccataccatccaagttcaaagccctgcttggctgcttgctaaatgcctgctcttagacaagttatttcacctcattccatctcaacatcctcctctgtaaacttggataataggattgcctactgttgtaaatgttaagtgagtttgtgtattgaaagcactaattatagagtacactcataaaggatgaaaacaaagcaaaggtgatcacagcctttggctactgctagaatgaatgtctagattgcagatagagatgtgttttgtcacttttgcaaatgttatttctcctgctccttacagaaagtctaaaggtagctatttaacaggagaatacagagttggaactattgagtgacttgagccaggagctgagggctgtccagctcaaactctagggcccttttcttccttcccagagaccacactccaggattccaggggactgttctgacatcaaggcattgcagggtctctaggagtagtatgtggagggattagctaactagcataagaaaatggtttggaaatttgataggattagctatgtagtatgtattatgtggagggattagctagctagctaactagcatggaaaatggcatttgaaattcttctgaagatgactcctatgttttcagtcctcctctcaggtgtactcagatgattttttcagaacctgcaatttttcaaaatatacttagattatataccttatgtatatttctctaaatcatatttctacccacagatattttttaaatgaataaaaaaagattggccaggtatggtatcttgcactggtactcccagctacactggatactgaggaggggaggactgcttgaggccaggaatctgagaccagcttgggcaacacagggagaccccatctctagaaaacaaacaaaatcaacttccgatgtgtaccattctaaatggaaaactatattgacacattttcagtagaagttgtcataccctccctctatgcaagtaaacacaagctcgttctttcactattaacatatcattgaaggttagccatgagttctggatgtatattaataatttctagatttcagagactattataagtcacacagtcaactttatggagatcattcaatattgtatgtttaaaataacattgaatgtattgtatttgctagaaataacattattattgcttaaaactgactgaatatttctgagacagatttgtcgccccctttgttcttttgtagacagcattccctccacctagtaaacctgatttctgtaatttctattaatgaataataataataaataggccaggtgtggtggcttacctgaggtaaccccagcactttaggaggccaaggccggtggatcacctgaggtcaggagtttgagacctgcctgaccaacatggtgaaaccccgtctctactaaaaatacaaaaattagccagacatggtggtaggtgtttgtaatcccagctactcagaaggctgaggcacgagaatcgcttgaacctgggagacggaggttgcagtcagctgagatcatgccactgcactccagccagagcaacagagagactccgtctcagggaaaaaaaaaaaaaggcaataaataataaaagccaacactttaagcactgactctgtgccatcattgttctcttacatatattatcttatttaatactcattcaaaaatgattattaactccattttatagatgagaaaactgaggtcgagtggtgaagtatcttgcctaaagccacagagctaggaggtggtagcatcaaagaacggggctttcctgctctctggatcttattgctgaacatcagtccacattgcttatttctctctccacccaagcccaaattcatctcctctgagaagagttccataagtgatccttgctcataggagtttttcttctctattctttcagcacttacacactcagtttgcagagcattcatgcgtaatttttggaaaattttgttactttttcagtgttatcaagaatgcataatttgtgcatcaggctaaggctaaactaaaaatcagagtctgcgtcctctaatttttttgaattcttctgctatgacttgtgagtaaaacaatgttctgaataaagtagtgttcagcagatactatcaattcacagctcattaatcacagtgttgagattcgcatatatgtaactgctaacaagtattatagctcatttccaaatcgatttcatttaccaatgttatatactgcaactactcaccctcgtatctaataccttcagttatacaacttttcaaatctgatgatgacaacaagaatggcttggatgtcctcagaacgtacacgatgtacaaataaacagcccaaagtcttactaacatgagccttccaaacaatgcaatcagtaaatcttgtcctacaggctcaaggagctctctgttttcactgtcgtttgtaccgttctccacgcagtttagctgagaagttaaatccagcataagtacattaaaaaatgtatctgatattttcatttcctaacaaatgaagcagaaattatattttgcaagtaggaaaggcatgttttctccaaatgaaacttaaaatcttacatctgctcataaaaatgttgaacatctgaaaatatgaacaaatgctggagttgcaggaatgacctaacagctgttgcacgcgcagtgacgtaaaaagctgcagacgcattattcagctattcagaaataggatctggaaagcattctattttggtacacagcaaaaatttatttttctcttgataagccaggacttcagaagttaaaaagaagagactgctatctttaaaaacctaagtcgatatttgctacaatcatgcaatctagttctcctttctaccaatttaaactaatagtccagtttttgaaagatacacaacctaaacaatgtccctgtggatgttgaattaattaaaattggcagggcattatgaacaagcagtagtataattttcttgggagaaatttttaaaaacactcttttttcttttttataggcatctaaacatggagatagagacataggtaagaactgtaacagaataagagaagaaatttgaaatctccatattttttcctccggccagaaaatgagtagcaacaaccagagccaccatgctgggcagcacaggttgtaatgtgacgaggcccctaccagggttgtgccacactgtgttaacagtgcctgccagcctggctcccactgattctctgagctccagccatattaggtgcctccaatccctgctctagtccaagtgcttgcctgattctgagcctttgcatatgctgttcccactgccttgtacgcccttcctaaccctttctcctatggaatttacactaccctccagaactcagctcaaacgctattcctcaaggaagcattctctaacctacagatgctgttagcctccctgctatactctgatcgcacccttctcccactcagcccttcccacaactgtaattaaataattacatgggcaatttgtcacataagtgtgatctaccccctagacggcaggcaagttttatgagagttgtttttcagctgaattcccagcacccagcaaagtgacttgcccaaaaaagacactcaatgtaacggtacatacatggtacttagcttctcattttactacctcaaacaaagcactgtctctgatcttctgctttcccatttttctatactttaaacttgattctctggccttcaattaacttaatgccagaagaaaatggattctggcagaaaacatagccagaaatatgcatcatgctcttaaaagaccacttggctccacaaaatggctcaggtaagaaacgccaacttgctccttggtccagtctaatttctattctggtgttattcccttttggtctggtttcacagtctctactgagggaaacaaaaacacgaaacacaccgtcaggatcttgcgctcctcttggggatttcataaggctatttccacagctgattatcactctgactttgggcagggagaggttaagaaaaaaaatgcaatattctgcaacagctgaaataattctctgccaaagcctggttttaaattcaaagtatgttttctctgtatgtagaaggcagtaaaaggtctaaagttataatgtgacatataaatttagcactctaagatgcaaaaacagagcagatatttttatgcactactcataataataattactattgactctaaagtaagcaaatccatatttgttttcaagttaagtgtgttacttgagaatattcgaaaacatttgctaaggggtgtgaacggtgcagactctcatcaaaatccatctgtctgaatctattaactggcatttccccagctggggcattcctcaagtcctacataacaaaagctccttatgccaggagtgagggctgatactgaacttagaaactggatttattttatccagaattaaaagttctaaatggattttgtaatcgtgtatctttaggacccaactctatcaaacacaaaaccaacagctgatgtcaaatagaaaattagagtttgagcttcaaagtcaaggtagctatcactgcttttctattttaaaaaacaatttgaaaatactcatgtaaattattcagggtaaggggtgtttagcgtttcatgtcttttctatccccccaatggacttcattgctttctgtttttcactcaatgttaatgaagagatgttatcttcaatttttagcatttgtatgtttttgaaggactataatatttagattatcccaaatcaagaaaaccactttcatcatctataaaaagactgcatgtgttttctgagtacatggaaggccgcaacaaatgcctgcagattgattgtgatatgttggtcttccacatccttgtcaagtttatccctaacaccttcctttctgaaaatgggtgctgctcctccagactgtaccggaaatgtcatttctattgccctgtgtttacaaatcctggaatctctattttactgccactcatcttttctctttcatgtatatcaaaagtatatatgctatattgtgcatgtgtgcatatatatatatataaataatcttttgaggacgtaaactgaaaagcttcagaacctacacatcaaaaagtttgtcacagtttgcttgtttatcacaggcagcttgtcattttccccccaaatcctcactggcacaacggtgtttttagtgtagccaacactacttcctactgatgctgagtaagtgaaggctcagtttaactcttctctagccttcatcaaatcctaaaatggctggcatgtgaggcctcagtagctccaaaaggaaacaggatgagggcctttctcagatactctgcttcctgttatcaaccaacagttctgcccaccaatatctcctgattattctatacacagagaggaaaaaaatgaataaagaaaattcaaaatgaacataaagtcttggtataacctaggattttgagtccttttcttcacaaaacctttttatctgaggtactttaaagaatttttttttatccccttccctttggtcctattatgggctgaataaaactatccaaatgttacactccaaaggcgaagaaaagatttttttcaaaaagagtaaaaaaatgcatacactgcatccccaaatcaccttagaaagtcatcttgagtcctgtgaagcccaacattgtctctgttactaagaagcagaaaagtggccgggcgcggtggctcacgcctgtaatcccagcacttggggaggccgaggcggacggatcacgaggtcaggagatcgagaccatcctggctaacatggtaaaaccccgtctctacaaaaaattagccgggcatggtggcgggcgcctgtagtcccagctacttgggagactgaggcaggagaatggcgtgaacccgggaggcggagcttgcagtgagccgaaatagcgccactgcactccagcctgggcgacagagcgagactccgtttaaaaaaaaaaaaaaaaaaaaaaagagcagaaaagtgaagctgaaagaatatataattcatcaaccggtgaaacgtgcagaggtgatttatccccatctccctctctctctcctccagaaacacaagcactgcacttcagtggagttaaaaatcagcgcttcctttcagaacaactgtaaaaatcacaggatgtagagaatcattttaaataggtagcacaaataaacaggaaatcccctcttccccacctggccttcctcacccactccctatgctaggaaagccctaaagagatttatcagccagagatttctgccagagctgttttcacttagttaaacaccacttttgtgcactagagttttacaaagaggccattaaggtaagaagctaaatttgaaatgaaattttcttttagtgtacgtcaataaagtaatgtaaaccaaacacaataccctatgtactaagttccctgtttaaaactattgtctttggtttcttcctgtactccgacattaaggggagaaaaaggaaactgtattcagagcatctgctgagtgatataatggtgttttcgaagtggggttcacacatcaacagcctcacaattccctgaaatggttcttaaaaatgcaggttcctggacccccatctgttcaatctgattttctgacaggtggaccccaaattatgtatactgaaaaacacctcaaagtgattcttttgtattaaaacttgggaattaataaaatgactgcttctaatgctttcacataggttatcttatgtattaggttaagaatatatctcacctcagttctagtaatccattcacactcaagtggtgctcttataatttgttgtagatgtttatccccctttaagcagcaaaaaccatgctgttcttccatcttggacacttcacggtcacatgcctgagccacgtgactttgttcaagttcctaagcctgtgtgaactgtggttgtatgctatgaaaactgagcataattctgaccttctaggactgttttatgtattaatttcaatcacaagtgtgcctggcacatggttagcactcaaaaagctgtattttaatttcccttgagaaaaatggtgcacctaagaaatagttgtacatttatccacaattagtgcttcaatcttagaataccacactagaaatgtgatgataaaccaatgttaccatttaaaatatacatgtaatacctacatatcttctgtctccattaaataagttctcttgagagacgatattcattttttaaatgctggccagcttgaaatattttccaaatgctattttgagtacactttagacgtatgtgattattatatttggtaatttttattttgcatttatatttacttttttttaaaatttttagagacagggactcactgtcacccaggctggagtgcagtggcacaatcatagctcactgcagcctcaaactcctggggtcaagcgatccttctgcctcagcttcccaagtagctgggactacaggcatgggccaccacatctggctaatttattaaattttttgtagagatggggtcttgctatgttgcccaggttggtcttgaactcctggcctcaagggatcctctgggttcagcctccgatagcactgggattacaggcatgagccattgtgctggtccctttggtgatttttataatcagtattattttttatcattgtaagtaaataagtataatttaaaaagagggtgaaatttgtcctttcaaatacatggtaaaggtgctacatttatgcactttgaaaatggatttgctctttaaaatagttaagtttttcatggtcaaacctgatgaaaagaaggtgattgatcttcaggaatccaaaactgaaacctgaacaaagaagagacttgttttcttgtgcggttcaaaagttgacaattcccaagaagagcttcaagtgttgctgagataaggtggcaggccactaatatcatttgaatgtaaatatttcagtctatgtatatttttaaagtctgtcttattttggcttaatcatacctaaaacatcatatgacatttgtttttcgtatactgtctctccacagggttcttgaattaatatacttgagtgtgaaaattgtttttccaatgataacaatttccatctatggcttctagattaagcaggatccaggtataatggtgatagaggctgtgatatgaagtagtttattctaaaccaatatgttcagaggtttgagggctctggaaacagatcatgtggttcttaatgtttacttcagagttctctttagctttgagaacccaggccagaatcagctaacattttagagtcaaaatgtcctcattataaaatgggtatgttaatagtactaaccctatgggccactagaatgaaataaaataatgcacgagacgtgcttagcacagtctctgtgctaaaacatagcaaggactccatcactgctaactattgtcggtttttctagaatctccatgatggcaagcaaccatttcaaccagagtgcaggaaatgcatttttctttttgaaagattgaccaagaaagggtaagagggatggggtcatgggatacatggaagtttttctctaagcagcacaactatctctctaatttagctcataattcctttgtggtcttataaatacagtattaatatttcccacatgccaaataggggcccttgagtcacaacaagagttctaagggtgccagtgagttatcagtggaggtaggcatcaaattcagcattgtttcagctgggttctctaacagttcactgcctttcatatgcagatgatttgttatgcaataatttaattcaatggttttcataaagaatgccacagagggcctgcttcatgtgtgttactttattgttgccctggtgacatttgaagagccctcaggcaactacagctatctgaggattccagagagcaacttcatgtgaacaaaaaggctaagtgttacggtgcagctgttcaatgcatattctcaagttctgcaccatgaattaatacttttcttctggcttattttcttgcctctagtcagtatgttaaataaattcagcttttcatgagaggttgaacttatacataatcaaataactcaaaaacttttaatgaaattttgtgaaaccttttaaactatgtacccctaaaatcattctgtaaatatactaaagtcatggaattacaggatttttttttgtcttttaaattctttgtgacaatttagtttttatgacatataaaaaattgtatatatttaaggtgtacaacgggatgtcttcatatacattgtgaaatgactatcacattccaactaattaacatatctattccctgtatataattaccattttggcaccctttgaccaaaatcactccattttcccctcttccccgctccaggcaaccaccatcctactttctacttctatagtttgactattttagattctacgtaaaagggagatcatgcagtatttctctttctgtgtcttgcctactattttgcttagcataacttcctccagcttcatccatgttgtcacaaatgacaggattttcttcttttttaaacctgaataatattccattgtgtgtgtgtatgtgtgtgtgtgtgtgtgtgtgtgtgattgtataaaatcactttctttctttttttttttttttttgagacagaatctggctttgtcacgcaggctgtagagcaatgatgcaatctcggctcactgcaacctccacctcccgggtcccagtgattctcctgcctcagcctcctgcgtagctgggattacaggtgcctgccaccatgcctggctaatttttgtatttttagtagagacacggtttcaccatattggccaggctggtcttgaactcctaacctcaagtgatccgcccccatcagcctcccaaagtgctgggattacaggcgtgagccaccgctcctggccaaaatcacattttctttatctgttcactgcaggacatttaggttgtttccatatgttgactatcgtgtaaaatgctgcagtgaacatgggaatgcagagagctctttacaatcctgtaggactgcttgatcatatgttccattctgaattttgggggaaccttcctactttttccataatggttgtataaagttatattcctaacaacagtgaacaagggttctactttctccacatctttgccgacatttgctatcttttatcttttttacaatagtcaccctaaaaggtatgaagtgatatctcattatggttttgacctgcatttacctgataattacagatgtggagcaccttttcacatgtttattggcattctgaatttccttttctaagaagtgtctattttggtcccttgcccattttttaatccagttgtttgtatttttggtattgatttgtatgagttccttatatattttggatattaagagttttaagtagtcattaatagctgtgagctctttgaaatcttgcataaagcaggtcatcaagaaatgctatgaacaaataaatatagccttttacgtccatttcagatttcttttcaagagggtgcttctaaagtaactattgcgcaaaagtcctctgaaaaaataggtcaagaagtgatatcagttccactatggaaattattggctacaaagtgtctgtaatcaccacacgtatttctgacacttactttaactctaaacttgcaaatccaagtaagggcaccgaggcttggagtgaagacgcccccagagaccggaaacccagaatttccaggagctctggtaggttctgctaattcaacaaaagccttctttaaaagccatggaggacttcatgctctttgcaacatccatgcaagaaaagaggctctcatgattatgctataaagttgtagagcaaagtaatttagacagaatggatataaaaataaacgggcttgtgatgctcatgagagagaaaagaaaatggattcacatatttttgtcatcctggagtcagaaaataatttgcagactatccaatagagcaccaaaggatgagctttgcaagctcctcatctggctctgaccccccttgctagtcttctcttcactggctctttttcttgcacttcaggtcccagcaacatcaaataattcctcatgctgctccgtgcatctgtttctttgcctgtgctctgtacttccttctccttccagtgtaatttctctcctttaaggctcaactcagagacctcctctgtgacaagccactccaccctctgatctctccctacatcttcattcttgttttcttgttttgttttgttttgaggtggggttttgctctttgttgtccaggctggagtgcaatggtgcaagctcggctcactgcaatccctgcctcccaggttcaagtgattctcctgcctcagcctcccaagtagctgggattacaggcatgcgccaccatgcctggctgattttgtatttttttttttttttttttagtagagaacaggtttcgccatgttggtcaggctagtctcgaactcctgaccttaggtggtccacctgcctcaggctcccaaagtgctgggattacaggtgtgtgccaccacacctggtctgttcttcattcttctactaccatacttgtcctaagttccttgagtgttagttaaaattagggtctttttcatcttttttctcagtgcagagcatagcagagtgtctgacacatgatgttcactcaataaatgtttttcatggatgaatgaatgtagctaatttctcccatttgcataaaaaaaccaagggccagaggttatttgctccttcctcttaattatgtgatggtctttacgtaattagcaactaagtattttttgtataattgagacattaactaaatttgaataatcaaggaggcctgtaaaaggtctcactgcttccactcttggcctgtattgtcttttccttccacattttacatcataaaccaggtgaattgctcacagcaaatcataccccaaagcatatccagactctctcccaggcataaagctgcagaggagctggctacctgtcgaccccattccctaaacctctccctgtagctcactgcattccagccctgcccacctccccacctatccacagacacttccacaggctcctgcttcaggactcattcccgtccttttccttctgcctagaacattctttctcccagatctctgaatgtccctgcttcaacaccacttctccagagagttcttttgcaacgaactgaatgtctgtgtccccctcaaatttcatatgttgaagtcccaacccccagtttgatggtattgggagatggggcttttaggaggtaattaggtcatgagaggagagctctggtaaatgggattagtgaccttataaaagggaccacagagagatttctcactctctttctgccaggtggggatacaaccagaaaacggttgtctgcagactgcaaaatggtcctttttagaatccaaccatgctggcaccctgatctcggacttccagcctccagaactctgagaaatacgtctgcggtttaagccaccagtctatgatattctgtcagagcagcccacaccacctgagacaccttttctgttcattgtatcccaaatagcaccccctttcagtctccagcttctctacattttttgttttttcttcataatatgctaattacaacacttacatatagttattattgtttccaccacttgaatagaagctcagtaaggctgctgattttgtcagttgtgttcaacactgaatcctcagtgctgtgagtgtttagcatagtaggtccttaagaaatatttgttgaataaattaagtgaatgagaaccttgcaatcttcgtaaaaataaaatcatataatttgggaaattactcaagaaattcatttttttcttaaactctataataataatgataataataataataattttaagtggccaaaagggacatttccattttaaacagatgacaaacatatttttaaatttcagctatgctggctgggtacggtggctcaagcttgtaatcccagcactttgggaggccaagatgggcagatcctttgaggtcaggagttcgagacaagcctggccaacatgatgaaaccccatctctactaaaaatacaaaaattagctgggcttggtggcgggcaccaaatcccagctactcaggaggctgaggcatgacaatagcttgaacctgggaggcggaggttgcagtgagccaagatcatgccactgcactccagcttgggcaacagagtgagactcagcctcaaaaaataaaataaaaaataaatttcaactatgccttctccatttccctcctccctccaacatgcaataacaacagcagtattaggttcctttagctgtaaaatgaaaatttccaattgcaccttagaaggaggctggagggtaggagtttatctggcacaagtctacaaagctgacaggtgcaccaaacacctgaggttgggatcatggcaggacaggtggggtttggggtcatcagaggtaaactgaggaggaactcacttaggagggagcaagtcaatgcctttcatgtccttcagtctttcctttaatcagtcactgagtcagttaggctgccaagaaacacttatgaaacatgggaaaggctttgctcttgaaggtaagtaaggtaccatcttttctcctgaaaagttggtactctagagactaatttcagaaacaggcatcttgctcaggaatgagtggccaagtatgatttcacttataatcacaagagtcagtgtgacttgaagttgggctgtaatctcaaacttgtcactaaggagataggtgacctgcaacaggtgaatttaacctctctgaagttccatcagctcttctaaaatgaatgacttggacaagatcatctataagacatccatgtgctctaatacttcatgactctgaaaagaaagaagaggtaaaaatactggctggaattcccttgtcatattaaaaagcttgaagaaaaataagtcatataatctatcaacaattcaccttttagaagtttgctaggcactgatttgcaagagaagtaagagaaggcatccattcttgtatttcctcaacaattaggttattttactatgtggattatacagcagagggtgaaagacttttttattgcaagacaaagtttctctattctactacaaaagaaatcttgctggtgagacaaggaccagattgaaatactcagcagagtggatggaaaagggggaaacttgaagccagatgagaccccagtctgcacttcactacctgcactgaacttggccaagctccttcacttacctcatctttaaagtaatgatcgggacctcagtgtcatggaaggatgacatacggaaaaacccttaatcagggcctgacacacagcggacccttgtcagggccggtcctcctgccctctcacccccaagacataaaaggagagaccctcaagaggtgggagtgggcatcactagaatggaattggcaaggaaaccatgaagggcttgagccagctctttaaaagtgggcaggatctaggtaggcagagagagagataaaggtatctgacctggaaaacattccatggcataagccatgagcctgaaatagagtttagagccatttccaataactgatggaaggacagcgccaggcaggcggtaaactaacacctggaaaggttgttatgaaataaatacacacacactcctacaccccccacccccccgcagcgcacacacacaccacacactcacacattttaaaacacagcctgtattttaaaaagcttttctggtaattccgatgctccgtgaggtttgggtgtcactggctggatggaggaaacagcagctgactgacctggacaggatagagctcacactgggcagcaggaaagtgacgggaaaggtcagcactggagtaggagcctggactcaaatcccccctgccacgcccctgccatggagccctgggaagccacatgatgtttcctatcctcatttgtctcattaatgcaatagagatcacggcaccagctttgtctcctgtgagggacttttgttacaatctgttgattttaaaccactgttatattacattcatagactaacacttagctgtaatgcgctagagaaaaaatcaggatcaccattaatccccatcattatcattgagactctgggatgctggaacgtcacagccagctccctctgtgacaccctgtgtgaggcaacagtggggcaggactccgaaaatggttccatgctgtcactacgacacccatgaactgtgatgccttcctaagtgctagactgtgattagggtggaggtcctgcagtcactggggtctcataagtcatgagagtcatgctgctctctcaaacctacatagctacaagtagtgggtatgtgccttgcacacgccacttaacctctcccagccttggaggtctcttccgcctaaagtaggttagtaacggtaagcatagtcaacacgtaccattatgtagtctgtgccatacgcacagcaagcaaccaacgaggtgtgtggaggctgaaattcagccccagctacattcgccaagcctcacaactacggggctgcattgtcactgaagaggcaactttttctaattcatcatcccagagaggactgatgtgaattttctaaatcacagcaaggtgctgtttgtgttaacagtgaccttggtagtacctgctgagaagcctgggcattaagtacgaacatacacggagtccttagcacagtgccaggaatacaacagagtccaatactgggtagctgttaatgttaaaatattattcattcattcattcattcattcattaattcattcactcagcaagcattcattgtgcacctcctgtatacgagctacatgctagggcagctggcatgtctgcaatgaataagacattaccctttccctggatgagcttgtggtttaagggtaaacagagacacaagtaaatcattatattcaagtatggatacaggagggcttctccagagtgatcttatagcttaaatttctgaatactaatgactgtgctattaaggtttaatttatttatacaaattcagcatttcatatctggaaagtaaaacttgttataactctttgataaagctgcttacacatcttatacttccctatgttcagattagacacacaaaacagcgtaatcaagccactgttacaggaccaccacctgtgtccacttgggtgccaggaccctgctgtcaaagacaggtccacttccttacaacatggcctagaattggctgattataagctgcctgctggccatgttcggtggctcacacctgtaatctcaacatttggggaagccgaggtggaaggattgcttgagccggagagtttgaggccagcccaggcaacatggcgagactctgtctcttcaaaaaattttaaaaaattagctgggcatggtagcatgtatctgtagtcccagctactcaggaggctgaagtgggaggatggcttgagccacagaagttgaggtttcagtgaaccaagatcacaccactgcactccatcctgggtgacacagcaagaccctgtatcagaaaaaaaaaaaaaaaaattctccttacttgtgttcctgttcagaactactcaaatatattattggatgaagtagcctaagaacaagtgaaaacgcatggatgcactcttattttcaattgtccagaaatatcaggttggtgaaaaagtaattgtggtttttgccattgaaagtaatagcaaagactgcaattatttttgcaccaacataatacttcacattaaataataatttttaaacaaaagaaatatatatatacatatatgtgtgtatattttacaaggttaaatgtaaaatatttacatttgcattagcaaaggaggatttaacctatgcaattttataagactagactccagtcagctttagtgtttttcccagagacaaatgggaataatgacaaaataaaatgttggcagatataaaatccctgatgataaatgataggctttattactacctctcctaatttccttttctgagtaagtaccctaggtgaaacctacacaagaaatagctttaatggttttaatagtagtggtttaatgaactaatctattatgagcattgtaaatatttaattaagacacagcttaattaagacatttaaaaaaaagatctgcaagtctatcatatcaagaattgtaccttgtcccaatttcctattattcctcagtaccacaatactttttaaaaaactaattaaaatatttgcttcaatatatgtcataaggaaatacactcactgtatcagtaactctgcaaacatcaagggtcatattattgccttactttataatgctgttgtcagaatcaataaacaataaaataaaataaacactttcttttttgggggttcaccttccccaaaagcaaggggcacagaggatgtggactgtagattgtagatactcaagggactgtttccaaggtcctttcagtgatttacacatggctgttgtcttacgtatataacaccaagtcaccagtgaaggtgaattcacaaagcaagtcatggctctacaaggaactggcttcccctgagtgcaggaccagctacatcatttgcagggtccaagacagaatgaaaatgtgggccttccattcaataattattaggaatttcaagatggtaacagcagaacattaaaccaaatgaggggcccttctatgcatggggccctgtgtgactgcagaggtcacatgaccctgcagtcagccctgccggggtgtagtgcaaagactgttgagatcttagaggagtttgcaggctccggactcctgacttgtcccctcttgtcccttcttcaattctggtagatgtagttccaatagcagaaggtaccagttataagttgctggtataagttgctaagtagccaaagcttcatgggagtgacactggtaggtttcctagggtacacttatgggcttctgccctttctctcaactatcagaccaacccatgaaatccagacagaaaaggtactaaaagactgaggacattaaggttcttttagactcacggtctagttttacggactcattgatctttaaagttaaatgggaccttagagattatctagtccaatttctctcattttaattaggtctccatcaaattccatttaggccaaaagcatgcagatgaattctcatttgcatagctctacagctgatggtgattttgatgatgaaatcatagttgacagtctttcagaaagacaaaatgttagtataatgaaagattcatgatataacactaatggatcgatacgagatgctgccagccatgctaacaatatatttagcatttgattttttaaaaaatcccagtcagagcaaggagagtgagctgaatgtcttagttcttggaattccctggacatgggatctagaatgagtttataagatataggagatcgagaccatcctggctaacatggtgaaaccctgtctctactaaaaatacaaaaaattagccaggcgtggtggcatgtgcctgtagtcccagctactcagggatgctgaggcaggagaattgtttgaacccgggaggcagagcttgcagtgagctgagatcgcggcactgcactccagcctgggcgacagaacgagactccgtctcaaaaaaaaaaaaaaaaaaaaagaaagaaagatacaggaacaaagcatatgaatctagaagtgaaggaaatgggtggtttcgggtgggggttaaaggatctcctttatcaggaacacatgcctctgctcctctattccctacttatatgtatgttgtcttcaataatcccttacatagggtttattatgggccagacactgtgctaagttctttgcaaatattaactcatttaatcctcataacaaccctctaaggtaagtactatgcttatcctcctctttaaagatgaagaaactgacaaacattgagattaattatcttgcccaagggcccactggtttaactggtggaggcaggattcaaactcatgtagctttgactccagtagctgttcttaaccactagatcgtgatgctgtgccagtcatcttccatcatgccctaataccaccaacgctaccctctactacacagctataggtaccaaaagttaaaggacatgcatttaagacactgtacaatctatgcttctagcactgtagttgtgacaaatatttatgtcaccatatgactaaactgatgctaacttcacagatgttaatacccattttttgatgggttttgattttatatgtatgatatcccaaatagcttccacccctttcccacctttatggtgctactctaaaggctacacatacacttttcatttgtcattgctttgttttagatctaagagctagaaatcaaacacttagcacaaagcctctcttctttctgtctagaaagaataaaaccttctataagataatacttgaaatatgcaaaagcttttttgacttatgttcattgtaacaataagttctcttttatatctactgcttaggaaatcttttcttggcactaaaagaaagacacaatggctgggcacggtggctcatgcctgtaatcccagcactttgggaggccaaggcaggtggatcacgaagtcaggagttcaagaccagcgagactctgtctcaaagaaaaaaaaaaaaggaaaatactatttattaccaagactatgaggacaacaccttgtggccaggaaaggtgcaatccatcattgttttctagttggttgttaagatttctgtgatgaatacaactcaacatcaggtaagggagggaagcactatcttgccatctttgtagtgtcattgtgacaacatgtatgctcccacaaaggggtagattagcataatttgttacgctttttatgatattcaaacattcatacttttagattgttcttctaataataaatatttatttccaatggaaaaacacttcttttttgagataggttctcacactgtcacccaagttggagtgcagtggtgcaatcatggctcactgcagcctcaacttccagggctcaaacaatcctcccacctcagcctcccaagtaggagtagctaggacaggcacgtgacaccatgttcagctaattttctttatcttttgtagagactgtgtctccctgtttcccagtgtggaaaaacactttcaaagatgcttcaagaaatttgaaatgtttccattttatccagatgcagagagaataagaagcataagaccttccagtttaatatcattgcaagcaaatgtatgaatttttatggattgcataattgtctctcttgttcattgaatttcctatataggaaggagaaaggagcattcaacaaacacaatatgccatgatgcactatagataatgaagcctctattgtacaaaaaaccagaaacataagattctgaaaattttattttggagaaaaatgttactaaagaaagatactgcctgagagtgtaagatgtcttgacacagcagatttgcaaataaaatattgtgtagtcatgctacattctatactgctcttgtgcaatttctggaagcttgcttcatttctggtcagatagatgagttaagtgatttgggcagcatagtaaaatttatgtgcctcaccaagatacagccatggtactgaattaatatcctgcactactgtcccaacatgctttgacaaggatgctatttcatggctcaataaatacttatggactaactacaaacgtgacaaaaatgtttgtccttcaactcaactcttttaggactaaacattcaaggactctgaaaaaagcccagaaatgttgtaagacttttaaaaccacttttattttaattttacaagcttgctaaacttgcaaaaggacagaatagaaatatactgttggataaacccctaggaaacttcacaaagtcttaaagcaaaattttctccatatgtgctttgttcaacataagatgtaaaaagcacaaaagagaagtagatattaatttcattagacatgctctatgtctaaatgatcaagttggtggcttacaaaaaatcatattctgcggtcctctcaagaaatttccgtgaacggcatggcgcggtgcctcaagcctgtaatcccagcactttgagaggccgaggtgggcggatcacaaggtcaggatatcaagaccaacctcgctaacatggtgaaatcctgtctctactaaaaatacaaaaaaattagccgggtgtggtggcttcaactcgggaggtggaggttgcagtgagtcaagatcgtgccactgcactccagcctgggcgacagagcgagactccgtctccaaaaaaaaaaaaaaagaagaagaaaaaaagaaatttcagcgaaccagctgggcttgtgcctcttattcagagcagccaccagcaattaatgaatatggtctttcttttttccaattcaaggaggacgctgtattgccccccagggtgggccagcatattgcagataggttaggccaaggttaagttacaccctttacaaatgcaaactttttttttttttgagatggaagctctgtggcccaggctggagtgcactggtacaatctcagctcactgcaacctcctcctcttgggttcaagtgattcccctgcctcagcctctggagtagctggaattacaggcatatccccaccatacccggctaatttttgtatttttagtagatacgaggtttcaccatgttggccaggctggtcttaaactcttgacctcaagggatctgcccgccacggacagcttccctaagtgctgggattacaggcataagccactctgccaggccacaaatacaaacatttaagacattggttatctatttatatgctctgaaaaattttaccttaaccagtggtgtcagaggcaaagcataacccttaaaggtcagtaaatggatgctatattggaaaaatcaatatgcacagcctttcctaagagctaagctttgtttgatcagactattcctgggtatcaggacactggccaagtcctgccaaaagtaaagctcttatcccattatacgtaggcccaaccagttatagtaaccagaggagtgctcatgctaaaaacattttttatttaataaactgtgtttttcttttttgtgcatatgcaggcaacttgagaagtattttccttaaaaaaagtttgtttgcttttttactttgcaatataatttttaaattaaaaaggcatttgatcagtgagggtttttttatagtttgtttttttttttttaagacatggggtctcactgtgccacccaggctgaagggcagtcgcatgatcatagcttactgaatctttgaattcctgggcaagagctatcttcccgcctcagcctcctgagtagctgggagcacagaggcacgagccaccatgcccatcaatgattatttttgtccatcaacagttctaggaccaaatttgtaactctatcacaaaagattatgtaatatagcagtactattgtgatagaagaatgttgaatttagaaataatgttgctctctttctattttcctgaaaatttagtacgtgcgtatgtactaatagtacttgcatatggacatatttatgtccaaatattgcactctaaccaaagagccccccaggacttggcccttggccccttccccttatctgcaatctcttctaagtagctccacccagttcccaagttttataaagtagtcatatgccaataattcccacattatatctctggctctgactttcctacaaagccgatacttatgcatccaattccttgacttttacttttggatgtctagtaggcattccaaagctaatggagccaacagagaacctttgagtcctttttctctcccatgcaaatctgccagttatcctcatcttggccaacattgctacactccacttagctgctcagatcaaaaccctaaaacttaaagtataataatagtaaaattaaaaaaaattattaattaaaaaaaaaaatctggctgggctcggtggctcatgcctatcatcccagcaccttgggaggtggaggtgggaacattgtttgagcccaggagtttgagaccagactggtctgggcaacatgaagaaaccccatctctacaaaaatgcaaaaattagccaggagtggtgacgcaagcctgtagtcccagctactcggaaggctgatgtgggaggacgcttgagtcttcaaggttgaggctgcactgagccatgattccatcaccgtactccagactgggcaacagattgagaccctgtcttaaaaaaaaaaaaaaaaaaaacaaatctacaaatctagtagtccctctccctagcttccaacaaccaacctgttattgtctctatttcaagacacactccaaatctgttcctttctctccatttctatcactatcaccctagtccatgtcactgtttatctctcacctagaccatcactggtagtaatttattcaggtcttgtcactcctctgcttgaagccctttgttcttatctcctgtagaaccaaatcaaaacttcttttcctgccaacaaagcctaactttatcttataacctgaccctctgtctacacttctgacatccactcttaccacctatttcattattctccaggcacgactgatctttttttttctgtccctgtgataggacaagttccttctgacctcaattaagcaaaacttttcttagggcttagaatataaccctgtattcgccccagaattctgcaagttattatgtgggaattaaggtaagtcagtggttctcaacctggactgcacagtgaaatcttctgcagggcttttaaaaatatggataccaagaccccatctgaattgaatcagaatctccgggaggaggtcagagaattagtacttctgaaaggctccaaatgagtctatgtggctaaagttgacaaccctgatataagtgatgtgctcttcttttctaattttaattgtatattttcttgacttagatttttttgttattgttaatataaatagcatctaaacgtagtatcatctcaaaagatgtttaaaaaacaaacaaaaaatgctgacagaatagaatggtcaattctacacagaaaagtgatgataaaacggatataaaatacatgaaaagaatagttgagtatcatcctgtacttttgatattatagaacacatttagatgttaagaggaagtttttgtggctcatgttttattcttgatcttgctttgcattgaagtcccaatcttgtgtttatatcacttcacaggatgctactgttgactttgagaatgaatgaacctgttttaacatgacaagaactcacggaaatttggtggaattaatgtttctaacaaaacttgaacttttcactgttttaagtcagaatatttttggcagcaatataacttcctgtgtctatgataaatgatttaaaatgagactataaagaagatcaaaagacttagacatcaattagctcacaggctacctaaatattgttatatgagtataatggaatcaaacatatggattacatttccattaaaatagagtagggttttaaagcagagaatcagaaagctttaggaaagtcatttgaatgttcttagactttaacagctaaaaagtaattcaagctgcttacaaacaccaaaagctaacgggtatgcttctgcctaaagaatttaatgatgccataaaagtttagaattgtcaccagcagtggttgattagggaactggggaagccaaaataacctgtcactctcccaccttgaagaaacctgctgtgcatgtagggtttacaacagcatctcattcttgtagctctcccaatggttgtgggcagaatgaaccacagaggggccctgacaagctagatgtatggctgtttgtttgtttcaaatccctataagcccatacactaaagagtgcaatgggatgattaggggacaagctactttaggtgcacagggttattcttgttactccaggagggaagaaagagtacttttccagttctttttgttgttcttttgtaattgaactgcaagtgacagagggtcttagaaaggatttggtggtccacaggtctccacaaagtccagggaggaggccatgtggtacaataggaaataggcacagatggcttttgacttctgatgacctgaatttgaatcctgctttgaacactaacaactaaacaattaccatcattattgtaataatggatactgagatgacagtgagaaaaacttgctgggccccatgaggagcataattttagaaaattaagaagtatgcatggacaacaattccacaatctagtggaaatttagcaactgccacggaattggaaagcccaataagagctcccaatataagttcttctttaacaataactccttttcatatttttgcaatgaagtgaatatatttgaacatcattcatatcttatctttccattggtttcattatttgtgtcactgtgacctacgttaagaaatgcttttcccaggctatttgttcaagcagaaaaaaaaaggtcttgctttggggcttccttgttaggaagatttcagatttgacctggcatgtgctaaggacaatcttaaatgcttttgtacctgtggtatccagcctccagtttggccctcagtcatccccacctcctggtagccacttcgtatgtagtcagttccctcccacatgatatgtcacttctgagatcaggttacaaacactgcaatttctgtcttgagtgcatgctctcttctctcagatctctgccatattgtgtgtcaggcacacagggcaagaaattgaagctgccagccaacagccagagagaaaccaaggcctgccaacaactaggtgagcgagcttggaagcagatccatcagacccagtcaagccttcagatgactgccaccccagctgacagcttgaaggccatcttatgagataccctaagacaaaaccacccagctaaactccccaggccccagaaactctaggataataactggtttagttcggtttggtttggcatttttcaagtatgtatgatcccctccttcctaaatatggtcacatggcacagaaacccataggctttaatatgcttaaatagctctacttctttttgtctatctgttcagttgacaagacagcttttcatgaagagaaataagagtgagttagaaaaaggatttccttccttgggatggaaaaaagcaaaaggaagaatcaaataccttcagaatgccctagatagcaaatacaggtttgtttgtttatttatttatttatttattttttattttttttgagatggagtcttgctctgtcacctaggctggggtgcagtggtgcaatctcagctcactgcaacctccgcctcccaggttcaagcaattctcctgcctcagcctcctgagtagctgggactacaggtgcatgccaccatgacaggctaatttttttgtattttttttttttagtagagatggggtttcactatgttggccaggctgtcttgaacttccgaccgcaggtgatccacctgcctcagcctcccaaagtagtaggattacaggcatgagccgctgcacctggccacaaatacaagttaattataaagcactttgaacactgttccattgactaagtatagtaagaagaaaattttaggcaagttaaagaagttccagcactaagcttacttgataaaaacagatataaaagcaagacagaaaataagtcaatagcctaatatcatctgttgacagaacagatgccctcttggggcgtattcatatacagttatacaccacgcaacgtttcagtcaatgatgaactggactgcatatatgacagtggtcccataagcttacaatgccgtgtttttagcataccctttctatttctttttttgagacagagtctcgctctattacctaggctggagtgcagtggcacaatcttggctcactgtaacctctgcctcctgggttcaaatgattctcatgcctcagcctcccatgtagcttggattacacatgtgtgccaccacacctggctaatttttttgtttgtttgtttgttttagtagagatggggtttcactatgttggccaggctggtctcaaactcctgtcctcaagtgatctgcccgccttgacctcccaaagtgctgagattacaggcatgagccaccacgcctgactgctgtaccctttccttttagatgtgtttagagacacaaatacttgccattgtgttacaattgcctacagtatttagtatagtaatatgctctagaggtttgtaacctaggagaaataggccataccatatagcctaggtgtgtagtaggctataccatccaggtttgtgtaaatacattctatgatttacacttgattcactcaaccaatgaaatcacctaacaatgcatttcttagactatatcctcattgtaaagtgatgcgtgctgtggttggttattctggtactgtgaactgaaccatacaaagaacacttttacaaatgaagaacattttcacctagaattgatgccaacattaataacttaagtatttcagtgtctcatggccaaagttccatattttagctaccttagcaagaaaatccaagaaaatcaatttgcatctaaaagcgccttcacggagttggcctggttttgtggcaggcatcccagcttgcttagagaaggagaagttgaagtcggcctcacagaggattgtttggtcccagctgaataacctgctggcatccactgtgagcagagtggtaagcagattatgggtaagcagatattaatattctgattaaacattttcaaacctcataccgctattttaaaaaataattgcactactcttgagagcactcttatagttcccattctgaaaccacttttagctttctatatattcacgatcttaaagtctctatctacagtttatttcccaggattaaaactttttcccttcaccaccttaactgcaatgtaaaattcatgtgaatatgactttcttggacaatcttaatagcttaaaatctttacatgacactctcttccttcccagatctcttcttgaaaaagacagagctgcagtcatcttcggtctcaggttctataaaaacccagcacagccttggcaggcctcctggaatgacttcttgtttcctgaggacccattgatttaacaaactaacaaacgtaaataacagaagctatgaaagaaacatttgcagtaagcattctgaagttatgaagcaacaaaagtttactagaccacaaaaatttctctaacaccatccatcatgtagaatatacaatttagcatgataacagggaaagttactaattgttattaattgaggtctacagtgcatgtacaggtttttaaacatcaacagtcaaaactgctgggttaccacaatttatttctgggtccaaaccaaaaaagtctgtttatttcttaggtgcacactaaatgtggccactgtgttggagagaaaatgtggaatgaacattgtatgcttacaacattgagtgttggaatcatccataatctccacttctaatttagcttgctagtgaccttctctcaaggtgctatagattctgggcatcttccccagaatgctttcaggctgatgaggatgtgggtgcatgggtttaagggcagaacacctagcaaaccacttgctttacagttcaagtaaggaaaaaagggaggagttcaaagaaggttaaatctcccgcttcaccagtggtgtcctttccttctttctaggcatcagaccttcttctctagaactttcttctgccccatgtggtggtcactgcccagctcaagagatagtcctggagaggacacagaggcaacaaggtccagagacttgcctcagggtcacctcaggggcccttccaatcatgcttcccccagtccccgaagcatcttccagcagccaacatgttggtgaatggggtcctaaaccctgcactgcccaggaactgtgctgtggagtctggccacgttcccttattggggcaggcatgaggcagtgactaaagtgtcctaaagctcccagtgaaggctctgagatggctggaccgcccactgcatccttggccctacagaaagagggctccatggagcatgcacagaagcagcaaggggcagtgtgacactgggagaggtactaaggagggggcggccttctgatccacgcaaggattcttaaggacctcctggctcaaaacaatcacttcctctcttgctgtggttcgtggacaatggagtcccaaagggaggcctttccttgcaacctcaaagggaggaaagcctgctttcacagctggcagggcctgcggacagccagccagctacctgcaccaactaccgtccacctgtctcccgtcacatccccccctctacccccgagtggctggtctgcggcgcttcggacgtgctccttgccttgcattcactctccctcccgcgcattcagtggatgtgtcccacgtggagaaggcgaagttgggaaggggcagccctcgcgaagggccacttggtctgggcacttattcactggggtggaatgggatggcagcggagcaggggacagcctaggctaaaaggccgcccgggggcagcccctccaggtaacccgtcccgcggcccgccagcatggagcaccaggcctggctgtcagcgcgcgcgtccggcacggagcccacacccaccgggaggcgcggcgggagggcgctcggggcccggcccagggagggtggtgcccgcagcccgctcgccccggccttgggctctgaaactcatgccctggagcccagagcagaggagggcggcgggcccgggcgggctacggggccggcgcctcccccgcccccgtgggtcgcggcgtctccggggcactgacctgccagccgcctctcccggacgttcttccacagcagatcccaggctctggccgtggagtcccgcaactgctcactgatggatctcctgagctgcgtttggcaaggtttccgtttgctggtcattttagatccgtcctcataacgaccggcgggctctccaccgccactcccgcgtggcccgcgactcagactcccggcgactggaaaggacggacgcggcactcccgccggggtcccgggacccaatgcgggcgcgacatgggtcggtccggcgctgggaggctgcgccacgcgcgaggaccgggatgcctggccaccagaaacgccgcgctaggttattaacctctgcgctcgccaactcctctactcctttcccactttccttctcctcccctcctcccctccgttgggcgctcctccactcccctccctcccctgccctccccctggctgcctcgcgccccactccttccaggagcgcgcttccccttccctccctcgcccaacctgacagcctggtccccacggccccccactcaaggagcttccagcttcttttccagttttacccagaaatcaggggctggaccatactcctcctatttcttgatactttcctttatttttcagtttcagaaactaccaccttcacaactacaacaacaacaacaaaaatttatatatgccacagtgagagcataactcatcccagtttccctaaattcaagttacttgaagtcagctactcggttaggttgacattcttttgatgttcaatattggtgatctgaacattatgttaatccttcctgatttcttcaatgaaataattatctggctgcaaactacaattaaattaatacggtttgaagtgtcaaaatattatttccattgcatagccattatgaggagaaaaataactttaaaatattcaggtcaaaccataaggaacctacctaaaatagatttacatactttgagaaagcattacaatctgtatgcagtgaaagaagtacgtattatgaagaagtgaaatatgaaaatagaagaattttaaggtattttagccaaaaacgtaaagtaggcttgtagttagaaattaactctgattcctgaaggaaagaaggaaatgtattggctctttaagaaatacatcatcactgaagtccaagcccacttcctggacttcaactcattcataaggagaagacaatactgtctcaggcctcggggtgtcctgcagttcacaaagttttgtttctgaagtgctttgaggtcttccaagaaagtaactgtgacaacatttaactaattcagagatgtgattaatgccttacacctcaggtttggggaggggaacaaatttttcaaaaggaatttctgaattattgaatctgcaaaattgcttgaatctcatttctttttaaatgtctttgtaccaagctgccacataagaaccaaaatttaatcagatattcattttaattccaggtgctccacaggaagtttgaaaattaaaagtattcagtccttcctctattatataaattgctactgacttagggaatgcaaactaacctctacctaaagtattccctctacacttctgctacacttctagtaaatattccctccatcagtttatcttgttggtagaaaatgggaatgacagggatgatggtaagaaatagtctttattgtcttattttgttactttaaatatttaaaaatgttaactagtgaaacatacctcagaatgagctagaaagtaatgagatactttttttgtagaatcctggtaaatctttgaaatagtcagttatgaagcaataagtcacggatcagaaacggacttgaaactgtgacagccggttatatagactaatccagattgctttctggacacaagccaaatacccttttgattccatcctctgctttgtatgcatgcagaggtaacaaaatgctctgcaaagaacaagactcctgttgtcttaaagtggctgctatacagtgtaacaacaaaatgtttatcaattacattcccaggaaagctgtatacttgacttttagaagggacctcttgttgaatcaaacagacgcaatagttttaacattatatacacgggaacagaacataaccattcaagctatttcagtgatcatttagctctcaagagcgtgggcccctactactttctattctagcacatattttatattcagatgccattgattaggagttttccttaaatgactaatttgaagactaaattctggaattgcacatttgtttagttctggctgttggatggcccatgaattgaggactgtccaagagaagccagatgaaagacggaaatgatctgcctggaacaggtgccggctgagcagtgtgtgccacccagcatggcccagctctctgccagccccggctgctggccctgttggaagaaaccacacagctgtgcagatggagccgccacaaatgccaagtgttccaacctcaacaggaacctcagggctacttggagtaatctgtacagcatccgctctcattctccccaagatctgtttcaaagttgaaccttaggtagcatcccctgtggggccttcaccagatgaaaatatcacctattaggagaaaagaactcaggtaaccccctagccctacctaccttcttgcttactgtcttccctcccatcgcagcggaagaggtgttgctcttccagcccgagaccacgtccctcacctgtgttgggctttctttcccttcttgtccctacaggtactttgctacattggttatttcctctccctcacataccctcaatctctgcctctccacaggctcaaccctccagtctcaccctgcttttaaataaaccaaaactaaaataacagcagccatcctaaagcccactgcctctaccctgtgtccctgggaagagaagtctttccctgtcaacactgcaatctgggcttcctcccttcctcaatgaacgtgatcttgccaaggtcaccaataatcatctggttgctaaatctaacaacgtgttccagttattgttgtcctttccagggtgcatggaccattggacactgtagcccatttccttcctctgacacaggcttgtctcgtggctgtcaggcgacaccctcccctgggttcctccttttcacagatggcctcacatggtccttcttaaggcctgacaggctatagatagaaagtatatgtggttaagagtgtggctaaaggcagtgtcccatttgattctgcatatgtttctgcctctcagtagtacctccctagacgattgcattgtggattaaatgaaataatccatttggcacatagaaaagacttaacctatgcttccaacaacaatactattataattacattactgtcctagcccaaatctatcctgagccctttcaagaagccttccctgacacccaaccaaaatagctccttctcacggcatccagtttagttttccttatagcgcttccacttccagacattgtgtttgtttgtttgtggttggtctcccaggcagactgtgagctccataagagctgaggccctgtccgtcttacttgcttgtgcatcctcagtgcctaaaacagtcccagacagttatgatcagtaaatacttgcagagtaaatgaatgattctactctagggccatgtattgtttcccttccggatgggtatctccaaaactttccttccaaacctgctctttcatctctatttcctatgtgagccacctggtgctaccacccatctagtgactgagagagaaatctagaagacatctgaaacacctccatacatcctatgctgcttcaatcttcccccacttctctatctcctgagtaactgatttagttcaggttttctctttcccttccctgaatttcagcataaaaagagtcccatttgaaagctcttggtctcactgcactctacgtctttatacattagctgttcttgaatgcccttaccctaatttttttgttcttcactcatccttcgagattcaactcagatgtactcagatgtcacctcctccttaatccttctacaaatcccagtggctggatggattcctcttccattgtgtttcttccatgctttggggatactgccggaggagcacttatcaaagagccagagttcagtgtccttacctgtttcttctcagctgtccctgcagtcctgagttcctccaggtaggactagcacagaacttttatttctcaacctcttgtacctttttcagtgaacagcacatagtaggagtaggatcatttactgactgaatgactattcctatagttttaaatgactggttaccactaggatctgctccttagtctaagtgtaaattttaaggatgcttatggtgatattgcttcattctcattaattatcactcttttcttatataatatttattaattttaaatatacatactgataattatagttttttaaacacaaaaattgtaatagaaacattaaaagtacctgtaatattaccaaaaagagagctgataacatttgaaaattttcctttttatttttttccttgcatattaaaaaaacttggaagaatttttataccaagtttttcattttttttcactaagcagtagattgtgagcatttttccaatgtattttcttttaaaatgtagtttttaatgaatatctaaaattctgtgggataaacacactataatttattttaaagctttcacaattttgaatatttttctccaaatttctaaaattacaaataatcctgcgataaataactttgacaaatgaaaagatatatatttttttctccttctcttactgctatgtaataagacccatcaccattgcctctcacaaccacaggcaataagcaggacttgccacccaccacctacacatctgaatgccaacaactctgcaattccattacatttttatcccttccacttccctcccatgttcaactctgattctgtgccatcaccccgtatggaagagtggagaagcacattccacggtctgcttgctgcggtatttttttgttggaaccctttgcttgagaatagagcccaatttctaactgtaccaggccaggaatcctttgccaagaacccatagtcatggtgcattatttcatgttgcttgcagctttgctgtggggaaatgccttccttgaggagacccattttcctttgctgcagggtagaagggtgaagagctctcgcaactctctccctgcagcatgttcctttcccaggagagatgggatgtagcaactcttcctttggtgtatccttcgctccatttcagggacatgctgttggagattgtgaaatgcaatctcatgttacttatttcctcattttaaaagtgttgctgaaagttctggagaagctgacttttcaagctgggtccttggatcacagtcaccaatctgtgcctgccctgattggtctatctgtgtgtcccattgccatgctctgaatctgccagtctttgaatgctaacaattttgattgcttttcgggttttgttctgttaattaaaaaagcatcaggctccacactttcttggaagcaaaatttagtgttagctgtaagctctgcattgccaattaataactttggctgtgtttcatattttcctgatgtagactggtaaatgctttgaatcttcaggctcaatgtcatatcatggtcatcaactttacaaatatcacaattcctttctatattttcatgtacactttggggggaccatgattaccatatgggagacgttgggtaagtgtcttacaaatttctgatggcattcacaggccattggattgaagacgtttccagtgattgaaatcatcttgacatcacttgtgctatccttcagactgtctgttttataaaggttgagtaagtaatttagcttaccacacaacctcgcattagcatatcgatttaggtaatttgttatgactgtcttagtatacatagagtagtttgagacctcaaacatacactgtgaagcattcttccattgctactgagcttcttaaggtcaatgaacacatcatctgaagagcagtgaaagccccagtccccagctcccataggcagtacagggaagtggctgatggcatagacagaggaggtagccaactaggttcataccatggctccgcacctactagctgtgtaatctccataagttacccattttctgagttcctcagcctcagcatctataaaatggggattataataatgcttccctcataggatttttggcaaggatcaaatgcaataatacatgcaaaatatttagaatgatgcctggcatataatgagcatgcattacattttaattgctattgttgttgttgctactattttgcctaaaccatttctgcaattctcatgagattccagtccagccaaattctgaatagcctcatgctaaacagcaagaagtcactcatgagaattataaactagcactggatgtgggaggtacgagaataggattcacatcttagctctgggaatgataaggtgtaggagagatagaagctatttaatatccctaaacatagacttccttatctgtcaaatgcagcaaagaactctttgttctacctaccctgctcatacttaaactatatgtgagagtgttttataattcaaagtgtcatcaaaatgaaaggtattgtaaataataggaaagtttagggaaaatctgcatatggagcaagtacatttcctacttgcatgcataaaaagatatttattcaacaaagatctgtattcctagagtgacacaggtttctcctggtggccctagttgtgctccaactgctgacataaatcaaggctgattaagtatgtttactggtgtggacacttgaaaggggctgggacccttgtcaccttccatggggtaaccctccactccaattatatttattccacaaatatgtgttcaacaaacctttggcatctctaaagacaggcagcatgtgttccacattctagaggaaaatcttctggagatatctcagtactaactcccaccttgttaattaatctgtgtaggtatggcattttctttaggaatttcatcattaataagaccttgctctagtttagcactacccaggataatgcgtcttgtaagcattatttaacataacaagcacatgaggtcagcagctactctttagaaaaacaaaacaaaacaggcagggaaacaaattcagaaaagttatatgatttgatcaagatcatcagctaataagttgcggaaccaagactcaaatgtttaccatccatctttaaatccagtctttgggaggccgaggtgggtagatcacttgaggttaggagttcaagaccagcctggccaacatatgaaaccccatctctactaaaaatacaaaaattaaccgagtgtgctggtgagaggtgacagcatgctggcagtcctcagagccctcgcttgctctcggcaactcccctgcctgggctctcactttggtggcatttgaggagcccttcagccccccactgcactgtgggagcccctttctgggctggccaaggctggagcccactccctcagcttgcagggaggtgtggagggagaggcacgagcgggaaccggggctgcgtgcggcgcttgcgggccagctggagttccgggtgggcgtgggcttggcgggccccacactcggagcagccagccagccctgctggccccgggcaatgagggacttagcacccgggccagtggctgcggagggtgtactgggtcccccagcagtgccagcccaccagtgctgcgctcgatttctcgccgggccttagctgccttcccatggggcagggctcgggacatgcagcccgccatgcctgagcctcccacccactccatgggctcctgtgcagcccgagcctccccgaggagcaccaccccctgctccacggtgcccagtcccatcgaccacccaagggctgaggaatgtaagcgcacggcacaggactggcaggcagctccacctgcagccccggtgtgggatccactagatgaagccagctgggctcctgagtctggtggggacgtggagagtctttatatctagctcagggattgtaaatacaccaatcagcaccctgtgtttagctcaaggtttgtgagtgcaccaatcgacactctgtatctagctgctctgatgaggacgtctgtatctgctctctggtgagagtctttatgtctagctcagggactgtgaatacaccaatcgacactctgaatctagctcaaggtttgtaaatacaccaatcagcatcctgtgtttagctcaaggtttgtgagtgcaccaatcgacactctgtatctagctgctctggtgaggatgtggagagtctttatgtctagctcagggattgtaaatacaccaatcggcactctgtatctagctcaaggtttgtaaatacaccaatcagcaccctatgtttagctcaaggtttgtgaatgcaccaatcgacactctgtatctagctgctctggtggggccttggagaacctgtgtgtggaaactctgtatctaactaatctgatggggacgtggagaacctttgtatctagctcagggattgtaaaggcaccaatcagcgccctgacaaaacaggctactgggctctaccaatcagcaggatgtgggtggggccagataagagaataaaagcaggatgccccagccagcattggcaacccgctcaggttgccttccacactgtggaagcgttgtttttcgctctttgcaataaattttgctactgctcactctttgggtccacgctgcttttatgagctgctatgagctgtaacactgcaaagatctgcagcttcactcctgagcccagcgagaccacgagcccaccgggagaaacgaacaactccagacgcgctgccttaagagctgtaacactcaccgcgaaggtctgcagcttcacttctgaaccaacgagaccacgaacccaccagaaggaagaaactccaaacacatctgaacatcagaagggacagactcccgacacgccaccttaagagctgtaacactcaccgcgagggtccacggcttcattcttgaagtcagtgagaccaagaacccaccaattccggacacaatggcgtacacctgtaatcccagctactcgggaggctgaggtaggagaattgtttgaacctggaaggcagaagttgcagtaagctgagatcatgccattgcactccagcctgggcaacagagcaagactccatctcaaaaaaaaaaaaaatctagtctcattctcttctccccacagctcccttgccattcttcagaggccatagtataatggccaaagttgtccctttaacttgataggctatttccccactagtttgtagaaatttggaggttgtcagataatatattatgatcagtatagaaatgtcttctccatcagcaatgagattaaacctatttcattctttaaagtaatctagagttacctcaccttatatttaaatctatcattaagcccttggaaaacgtctggttatctaaaatgatttctaagactgagtgcattttaagggaatgattacttcaaaataactggtctctgattctttcagataaacaaggggttatgaggacacagactgggttctgccaacgtcctgcaacatttccttgttatcagtaacagaactcttaggagtttaaacaaagtgtctttcaatttatgacgttttaaaaatgggggagcctcaagatgtaattcctctttcttcaacaaaaatagttcaaaggcagtcgatttttttttttcttctgagacggagtctcactctgtcgcccaggctgtagtgccatggcgccatcttggctcactgcaaaccccgcctcccaggttccagctattctcctgcctcagcctcccaagtagctgggactataggcgcgtgccaccactcccggctagttttttgtatttttagtagagacagggtttcaccgtgttagccaggctggtctctatctcctgaccttgtgatccacacacctcggcctcccaaaatgctgggattacaggcgtgagccactgctcctggccggcagtcgatttttttaaattttaagtgtcttcctgttagtgccttatgatcacatcgttagtaaaggagagttattagttttaagagtatctggggcaatggaaattacttttattatttaatatacattttccttctgtgtagacagaaggattccttctgtgtagacagaaggaatccttctgtgtagacagaaggaatccttctgtgtagacagaaggacatattgttgatcgttgaacaatataggattgaactgtgtgggtccacttatatgtggattttttttcttttcttttttttttttttgagacggagtcttgctctgtcacccaggctggagtgcagtggcgcaatctgagctcactgcaagctccgcctcccaggttcacgccattctcctgcctcagcctccccagcagctgggactacaggtgcacgccaccacgcccggctaatttttttttttttttttgtatttttagtagagacaggttttcaccgcgttagccaggatgatctcgatctcctgacctgtaatccgcctgcctcggcctcccaaagtgccgggattacaggcgtgaaccaccgcgcctggcctggattttttttcaaaaacagttacactgagtgtgcctgcctccccttccacctcctctgcttcttcctctgccctccgagacagcaagaccaaccctcttttattcttccttctcatcagcttactcaatgtgaagacaatgagaatgaagacctttgtgacgatccacttgcacttaatgaatagtgaatatatcttctctaacttactttattgaaagaatataatatataatacatgtaacataacaaaacgtgttaaccaatggtttatactaatgataaggcttccaaattaacagtaggctattcgtagttaagtttctggggagtcaaaagtcatacttggattttagactgtagctcgggggagtaggaggacctggtccccctaactcctgcattgttcaatgatgtattagtccatactcacactgctataaagaactacctgagactggctaatttataaagaaaagaggtttaattgactcacagttccacaggctgtacaggaagcatggctgggaggcctcagggaacttacaattatggcaagaggcaaaggagaagcaagcacatcttaccatggtggagaggagaaagagagtgaaaggggaattgctacacacttttaaacaaccagatctcatgagaactcactcactatcgtgagaacagcaagggggaaatccacccccatgattcaatcacctcctaccaggtaccccctaacactgggaattacaattcaacatgagatttgggtggggacacagagccaaactatatcaaagggtcaactgcatttaccttccatatgagaaaatactatattttctatatcacttcagtagtggtcattcactgctaataatatatttgttgtaattatttttatacatcattttgcaagtaccatttaaaataaaaatgtctgatattacttagtgtgttaggccatttttgtgtcactataaagaaatacctgaagctgggtcatttataaagaaaatagatttaattagctcgttgttctgcaggctgtacaagcgaggcaccaacatctgcttggcttctggtgagggcctcaggaagcttacaatcatggtggaaggggaagggggcagaaggatcacatggcaagagcaagagcaagggtgagggacaaccagcgcttgtgtgaactgactgagtgagaactcactcatcaccaaagagatggtgctaaactattcatgagtgatccgtccccgtgatccattcacctcccaccaggctccacctccaacactgggaatcacatttccacataagatttggaggggacaaacatccaaaccatatcaataagggaaaaacgacaagttcaaatccatctttggagtcctgagaaatcctttggatttaatggattttattgatacctctattttacttgtgtaaccctgggtctctgttttatctctctttgcatcccctgttcctggaacattgcttggcacgtggtgatctcaacaacaacgtcaaccaccaccacaacaaaggttgttgaatttgattttcttaacttttaggtcttagcatagctgtcccctctttggaagcctttcctgaccattttatgatcaaacttcactaaactctgaccagaacgtatgtccacataatattttgtgattattttttattccttgcttgacttgccccttcactagactgtaaattccataagagcaaggaccttgtctttctttcccgaaactgattcccagcacctagagcagtgtttgatacacagtagatgctcaaggaatcacacatcatttgccaagaaagctagtgccatcagtggaaattatcaatcctagaagagtctgtcctgcatcatctggagagcttaaatatttcaactcacaactccaggacctttgtctccactccacttcacccatctactcccagggacacacgctgggccaagtcactatcactgtgcttccagaatcttgaacctttatctcagtttctatatggaccttgtatccttttagcattcctcatcttgtctcatgatctttgtttgcttttcctttacttaatcagtcctttttcttgacatcatgccttcagttaagttccatgaaccagactttcaaaaccttctcagtacacacacacatgtacacacagagctattttatttcttagttattccatgcctatctggcaaaacccctctatctagtcttatatgcaggccaccacacactgtcaatgaagttccagaactgcacagactgatgacatgatgccaatggggtgagaattatcagcaaaatctttgccatgtctctagcagggtctggttcctgttttccagaaacagtcacagtggttagcttaaatcttcatcactgtcctcaaggccctggtacactttcttcctcttaccctcaacaccaatacttgtcagatactcatagaagaaatagaggaactggcagttccttaaatgcaccacactctctgcctcagtgcctttgcacgtgttcttctgcctggagcacactgactcttcttttctaaagttacacctaagccccacaaagtaacagttttattcctacattggattgaaaccctcctgagggtaggaagtggatttttaatgtctgcatccctagtagtgaatgcagtgctcagaacatagtaaatgctcaatatatatttactgagtgaattaagcattgaaaactggggctgcagagtgggctagagaagctagatatgcctatgcgttacccttccaaatgttgaaatatttagcattaatccattaaaaagatagaaaatgtacatacaaacacttaactattaagtcacagttgattaaatcaccatgaatgacaggaaatttcataatagccatgcattatgggtgaatgtgatgaacaacgttttggaatatttgatcaagctgattaatttaaaacattacttaaggttcccccccacccccaaatctacagtttacacttgataaaactaatgctatcatagattaaccccttccctcagccaggcacagtgactcaagcctgtaatcatagcattttgggaggccaagccaaaaggattgcttgaggccaagagttcgagaccaacctaagcaacatcatgaggctccttctcaacaaaaaataaaatttaaaaacataataaaatctttactccactcaaaccagagtgggagtttggagtgttctttgtgaaaacataaatgcacagtcatcagtattttaaaaatataataaaaatgaaatgggttactcttaatatttaagagtttatcatgaatttaacgtgcaagtttgttgtgtgtctgaatgggaaaacaatatttttttaaatgtcccatctaggggaaaaatacgacttcctcgtgggcaaggtgtgtgtggttttaaaggagaatagaataacgattaagaaaaagaggaggctgggcgcggtggctcacgcctgtaatcccagctctttgggaggccgaggcgggtggatcatgaggtcaggagatcgggaccatcctggctaacacggtgaaaccccgtctgtactaaaaatacagaaaattagccaggcgtggtggcgggcgcctgtagtcccagctactcgggaggctgaggcaggagaatggcgtgaacccgggaggcggagcttgcagtgagccgagatggcgccactgcactccagcctgggagacagagcgagactccgtctcaaaaaaaaagaaacaggagaaaaactatagggtatgcatgagaaaagaaaggtagctgttacatgaaaccaggagaacagaaaggggctcaaatacaacatataaaagggctggagtaggaacagaaactgcgggaatttactctggagagaggtgactgcaagaggtaaaaaactctggagtcaaatcagctgggcaccttccacacatgtgagatgaccacaaaatgaagggactgaggctcacctgagcctcaagcagtaaaggtcctgggttcctaggagatgagggtaagaaagggatgctgaagggaatgggggagtctgtggggaagggtgggaagaggtggaccaaacaaacatccacagctttgaggctcctaatagagaaatctagaaagtaacaggaattgggaacaggaggtgctggaagatttttctagagcctttaatcgagcaaagggaactaggcaaaataaaggtatgcttctcatgtgcatcaacagtacacagctggtgcctctgcattcactgcacagttataaggttaaactgtgtatctgaacacctctgtacgctggacggcgacagtcggggctggagaagggagccctgccagggaaggtaaggcgggtagcaagacttgagatttccctccttgacccttaggtagtagcagccaagagtgaacacaagattatctagaagataaaatgccacgatttcatcaaagggctttgtggatgaatagtgggagagttaaatactaaatacaattcttcaggttttaataccttgaagaataaatcatgctcactgtaacactcacccatgaactataaattcattgcaggtcaggtgttggaccagtaaaacattttgctcggattgtcttctctctactcagcatggctttcttggtacaattataaaacatagtagttttcacttgagccattaattgctgctgctcacaaatccctttctgttcttttcctaatttcttttcaaggcttttcttttattttttgtgccaccctcatgtttttaaatatgtttattaaggtattattagcataccaaaaatacatccattgatagttttctttttaaaattttaggcaattgttttcttaataatgccagttagagacttttatcactaaaagtgatatatatatatcacttttgatatatgtattaaaaattatatagaatttttttctaggtatagtatcatagatacagaatggcttatacttgcttagtatgtcaatgaatgcatcacttatatgtatatattactggactactattgtcaaaaatgcttgcaaataatacttcttgccattctattaagaaagcttaagaaagacaggatcaaggatagaactctgtcacagaccctggagggatttaataaatatttctgaggctgatagccagtatgtttgtttttagataactgaagttccctgtaagctggacactgtaaattttcagagcgaggttatctccaaaactttcactttattattctaaaaaagattatttagaaataacttcatcttcctgtttctaaccttagttcttttattatttctaataaggccataaaaacttaatcgggtacctgctttggattttagattttttattttcccttttaaattttctgaacacctgcctaaccaactaaccaagctttgcttccttccctaccatgcattcctgccatgtgattctgggaagtttcccccttagttcactaagctctttaaacacctgcagctcagtaacaacgatagtattgtccggctattttacttagcaatgagttgatttacctgtcaagataaacttcactatacatattattggacctctggattaatgccttataaaacagcacgtttgtacagtcctacgagtttcataaacatcaaacactgatttcatgtgataggccggatattatatcaacatttagtgaaaggagcttattgctgggggttcaaagatgaactcttatgaaagctaaccttttggattcaagctaaaagtttattttctatgagggattttgagtcatatgacaggaggttacccatggcctgtgagagaataccacttaagtatctggtagtctaagtctgccttaaaaatacattaaaatcagtatatagccaagtgattaatggcagcattaacagcatgcacattcacgatctttctgccgctatggagataatatatcaaaaacaagggaaaagcatattttttatcaggtcagagatgagctttatcatggttcaaatgacttaatttttgactacttttcttttacaaaatgtatgttagacataaaaaaagaatgtttccagctgtttccagatcttctttcaatttatttctaataaagcacacatttgggtaaaaacttcaagctgagttttgaaagctgcagacagttctctgccttaaacagttaatcaatgacacatacaagctggcttcaattaaattcagtctgtgatatctgcgattcagttaactgcagtaaggagaaaaaagattaaaactatcacttcccaaaggtgagtagctctcaaaaaaaaagaaggacaaaaaaatttttagatagtaaaaacaacaataaaacatacctcatgtattagaacccccagcagtaagctccttatggtttcatagccatttgtttaattcttgagtgtctcagtgatagatttgcattaagccggtctgtttctgctttcatcctcatcagaaaagcatcccaaagtaagatggcatcaggctgcctatctagcatgcctttatcttattatataatgtaaatcaattagaggcaattttggggaaaactcagttctcactgaaagtatttttttcctgcctgtatccaatattgtagtggagtgtgataaggatttcaaattgaactacatttaagaaagtgtgttgttttaggtgaatttaaggatttagtaatctctcacaattagtgcatattaatttacatctgtcatggccagatatgtggccatttggaaaaagtgttccaaaggcccagtaactataagaactctccccagcttcccgataatgtggtttggggtttccttcctctttctctttcttattactgctgtttgatactgcttgtaccccagtctctcccccttacttcaaacacttcttatctcaggggagtaaaccccatgactcatatctgcctccacttcctccttaaagcccccactaactctttgcaatgtgtcccgagctaggtcacatctaaccagcctccctcctcgatcctggcccagtgcctgtaacatagaaaagctctttcagtgaaatggtactcctgagaatcgtagatagatctatgccggctctctttatactcaaatgtcataattaacattcactcactcaacaaatatttgttgggtaccttctatgtaccagacactgtgttgggcacatagtataaaggcattatatgcatgcagctctgtcactcactatgggctttcaaaaattaagaaaaataatgagtgactaggatggaacaatttatccctgtttcctcctttctgtttttagcaagaaacagcagcagcagcagcagcagcaccaccaccaccacctttgaaaacatcaagttcaggaaacatttactggacatctactatatcctgggctctgtgcttggtgctggagatagcaacataggaacaaaagggcctgcgctgtgaagggtcttaaataagaatgtagacaaggatagctttgagaatgagagtctggacagaaacaaggtggtggctgcggatatgaggcaggccaactaaccctcctccgagcagcactcggaggagccggcccaccatttggtgtgtctcccatggggttaggcaggcaggagtttccggcctccaggaaactcttctggaaggcccttcctatattccttgttagagattccagcacaacacatttatatcccctactggcatctctgaccaagaccatggaagccaccagtagcttggagcccaggtgagctgcagacttgggaagtgagtggggctaccagatttagcaaatagacacacagggtgcctagttcaattcgaatttcaactaaacaaacaaataatttttccctatatgtcccataaaatgcattggtgtctgtattgttctgcattttatcccaccactctacaagtggggtaacatctttacttctgtttagcttcatcaggcatcctagaccaattcagaagtagcctcctcccacccttgtcagcctctgaaagcattgagacatttggcaggtgcctctgttgtttcgtttttctgctgacacagatgaaatcttacctgctcctcgatctccactgccaaattaaatttggccttttgcagtgaaaatgcataccactcttgctgagcttttctcccttcaaataccttgaaaaatcaccatctttattccatttcagtgcacttgacgttagttaccaaaaaaataatgcccacttcaaaaaagcttacatttaagttaagaacgttttctaatggatccttatttgtctgtcctgagcaaagttaatggtgtggaaacggatctagtagttcaaggcaaatggaaatcaacttgagaacatatttttcttctaatcaaatgtcacttgttttaggcttgtacaaaggatctgaaagctcactttctacttgtttaaaaatgtgtatatatgttcatacatgcacatataagtgcattacatatattttttacatacagttttttttttgaaggcagttggaagaaatttcccttgctttgagagttacttatcattaatggaatagaaaatcaccgggcttggctcacagttgcccctcagtaaacatctgttaagtgattcaagaaatatcgatcagttcataagcttttaattgtttaactttaatttctccagatgtttctagtgttacattcaaaagataaattatcatgatagcttaaaatattagaaataactggaagctacatgataaagtacataagcttattgttcatggcctttatcctagatgttttccagttgagctctgctatttgccagaacaatttatagcttctctggtgtttctgctttctcatctgtaaaatggggacaataattttccctgcctcataggactgttgcaaagattaaataagatcatatttataaagtacttagaacagggcctggcacatataaccatcaatcactgggagctttttaaactgaatctattgtaaacagctatactaaccacctttgatccttctagaatcaaataaatgatttgatcctcccagaatcaaatgaattcctagaatgagttaattttgatatttatgggccacttttgctgaatttccatacatctctcactctcagcagggtctggagaatagggaacaatggttttcacggtacaattagcttcagaagaagaaatacacgtacaacactgctaataccatttaaaaaatattctaggatttatttggtgcttggttataatttaatcagtatcctggtattttgcagcattcttatgtaaaacaaaattgtattttctgaatgtcactctgctttcctttgacatactttcttttcttttctttctttctttctttctttttttttttttttttgagacagagtctcattctgtctcccaggctggagtatagtggcgcaaccttggctgactgcaacctccgcctcccaggttcaagtgattctcccgcctcagcctcccaagtggctgggattacaggtgcccaccaccatgtctggctgattttttttgtatttttagtagagacgggtttcaccatgttggccacgctggtcttgaactcctgacctcaggtgatcctcccacctcggcctcccaaagtgctgagattacaggtgtgagcaaccgctcccagccactttgacatattttctttaagtatagaaataataatttcaaagaaatagttagtttcgtctaaaaatctgtctcacaatcaagatcaattcacttcatctctaaataaacaggcatgaattatgctcacagaaattttacatgggctcctcctcaataaaagaaaggatttcgttatctttcctccttcaatgtcaatgcttctaccatctgagcaaagagatactctgaaatgctatccaagtcttgtctactctcacccttactaacatctgaaagtatgctctagaagaggtcagcacttgttttttcttcccatatctgctctggttaaacatctgttagacactatgtcctttctgaaaaaccactgagaaagtggaccctctttgggtctgcgtgtgaagttgtcaaccactatgaattttagactgatgccattaaggatttcatactagacagcattttgtcaccttaccaaaaatatttgctattttaagcattgttttttcatggtgaaggttaagaaaaatttcaacatataataaagaaacaatcttttaatttcatctttgcacagggtttctctaattaaaaaggcaagaattgattaatatgctgcttctgaaaaggactcactgaaggaaggtgatgcgcaatagtaaaaacgacactgcacggagttccctcctgctccctgagttctcatccttgctctgccattgatgagctagagaatgttcggttggtcccttgaactcaccagctctcatttgctttccatttgtaaagtgagaaataaaacggagaccctctgaggtctcttttctaaagttatataattacaggtacacgttttatacctaatgcatgaactcctcatttttcaattcaaggtttttatacaataccatatttcttctatttcagaactgaaattaggaaaatgtcatcatgaaatttatttctgtttgaattccaattaaagctcagacaaagaaacttgaaagaattgattgcatctcagaaatacctgccacattttcgacttaccaagcaaccaatcagaaagaagtgtgagggcctatggattccccactctgaatctctgttcatgtgtaaccccttttaatgtaagcaatcagacaaatcacttcaaaacaaaggttagtgaatgagtctacaaaagccagaaaaaagtttaaagtattagacataagcagtcggggaatatatgtaacctccatatatctgaaagggcacaaaaagttcattccaaatggatcattcatcataaagtcaggggtcgagtaaatagggagtcataatgaagggctaagtatgaccctggctaatgtcctcacacataccctttgaatacacctacatatgtgcatgaatgcaccattattagctctcatttatgttaatccagtgaagatgttgtcattgaactacagttactcagtagtaatgttttgtaccaaaaaatactaagtgatcgactcatgtctttgaagttgtttcataattcagaatgaaaatgaccccaggaaagcaatctcgtatgccttctgaatgactttctcttgtctgacctttcattggaaaaaaatcaactaaccctttgttgggatgctgtgctaattattcaaagaggttttatgtaatcctttcaaatatgaaccaaccgaattcccattaaactattccacagaaggcacatggttatagccatagacaaccaatgtgactctgtggcctaatgatagtttgtggtagaaagttcttgagctgaaaataaatcacaaagcaaaaaggccagagggtgagaaagtaaaaccgagacaggattgttatggctattattagtagttttcttggcctataaattagccaaataatacaattcagaaaaaataaataacttactatccttttgtttttattaccccacaaatgtccactagcttttctcatttgctactgccatatcaatgatgaatttgattacattaagaccaacaggggtcatgcttcagggtacagtctgaatttttataaacatccttacttctctgaaagtttatttctttcagagctactttctatttttcagttgacttttattatgctacaagccctaacaaaacaggaatttaaatgttcctccaactgtactacaaataatttctaatctctttcttgccatatgctagcaagtaatattcagagcctccctgtgtaagtgttaagattttaaatctaaggacaatgatggggcattgtcagtctatgttttgaagcttcctttgtgcaccccaaacagagctcaagcctgaaattgttcacaattatatttggcattccccgatctcattggatttgaccaaaataattttaaagcaaagttaatttacatttagtcaggtttcatcataaatttaagcacagtgataaatcattaactaagcatcgtttaacaactcaaattaaaaaatataaatattgattagataccatttgaaagcactatagttaagttcatttgttctttgaacagttcctataagaaaggacactgcagagaaaaaacgccaatatggtaggaaatatttgcaagttacatatctaataagggttaatattcagcacatataaagaattcctaaaactcaacaacagcaagcaacccaattaaaaaatgggcaaagaatttgaatagatatttctgccaataagatatacaaatggccaatgaaaagatgctcaatatcttcaatcagtagggaaatatgattcaaaactacagtgaaataccatctcagacctataccattaggacactattaaaaaaaaaacatagaaaataagtgttggtgagaatgtagagaaattggaatcttcacactgctggcaggaatgtagaatggcaaagccactgtggaaaacagtataaaggttgctcaaataattaaaaatgaattgccatatgatccagcaattccacttctgaatatataccccacataattgaaatcagggattcaaacagatatttacacacatatccataactgcattatgcacaagaaccaaaatgtggaagaaacccaaatgtccatcaatagatgaatgattaagcaaaatgtggtatatacctacagtaaaatattattcaacctttaaaaggaaggaaattctggtgcatgttacaacattgataaaccttgaagacattatactaagtgaaataagctagtcataaaaggaaaataatacatgattccacttgtatgaggtacttagagttgtcaaattcatacagacaaaaagtagaaatggtggtttccaggggctggggaatgggaatttgatgtttaatgagtacaagttttagtctgggataatgaaaaagttctggagatggatagtggtgatggttacataacaatataaatgtgcttaatgccaaagaactatatacttaaaatggttaaaatggtaaattttatgttacgtatattttatcacaataaaaaatgtaactacccatattgtgctaacaatgtaaggaggagatgagtgtgtgtataaaattagtactagaatatctgtaattcaaggtaagagagatagcggcaagccactagaaattaaatactatggtgttcaggggatgcaaagataatattcaggggttacaggaaatttttcatggagtatatagttgctggagttcatctttggaagattaatgcaattttactgaatagagatggtgggggcaggtatcctacaaaaagtgacccatacaaacaaagcatggaagctaaaatcttgggggtgattttagagctgtgatttctccttgttaggctacagtgtagagcagtgtttgtcaaactttagtctttatacagatcactggggaatcttgctaaattgtagactctgattctatagattctaatatacaatccaaaattctttattgctaataggccccctattagaaatggtgatgccaattccactcttagtactcatgtcttgagaatccatacctacaaattagactggcccaagattgaaggttttaaaggctgcaagtttgtatgaatttcagaattagtgaagaaccagtgaaactcttccgggtagagaaattatattactcatgctatcccttaggaagattgatccagcagccatgtgtaggtggcaatagaatgggcagagacagacactggggagactggttaggctcaggggaccagtcaagaggctgttaatagaaaccaatccagatgtgccgaagcctgaagaggcaagtaggggtgagaatgcaaagggaagactaagtgaggggacagtgcaaaggcagatgtgtgtcttggcagctgacaatgcaagggaatagatgaggaggaaaagtaaaaaatgctaatgattagggtaaacattcaatcaggttaagtttatgcctgtcatcccagcataattatttatagtgcccctttattagtccattctcaccctgctaataaaatcatacctgagactgggtagtttataaaggcaagaggttcaattgactcacagttcaacagggctgggggaggcctcaggaaacttagaatcatggcagaaggggaagtaaacacatccttcttcacatggcagcagcaaggagaagtgctgagcaaagagcaggaaaagccccttataaaaccatcagatttcgtgagaactcactatcatgaaaacagcatggaggtaaccactcccatgagtcaattacctcccactggatctctcccatgacatgtggagattgtgggaactacaattcaaaatgaattccccagtctcaggtatgtttttattagcagggaggggacacagccaaccatatcagccccctttcacaccaaaaaatgccctggtttggctgattaagtaatatgactggttttgaccacattactttacatacttaatattaagtaatatggtcaaaacatacttgaccatactttactggttttgaccacattacttaatgtacttaatattaagtaatatggtcaaaccatacttaagtaatagaaaagaaatatggtttgaccatattacttaagtatggtttgaccatattacttaaaccatattacttaatatggttttgaccatattacttaatgtaagcttaatgtgtaaagctacaccctagctttaagcacaggtgacaaacaggacataaagatgagttaggctggtttgtagtgggtagagatgaagtgatagtcattcattcattcattcagtattttgcaaatgtcaattatatgccaggtactgttctaaagtgctgaggatacctaagtttaaataaaaatgacaacaacaaaaagccttgtcctcctgtagtttatgacttagtgggtacttacgcattctagaagtggggtggaggaggaaatgggaaggcagcaggttgaaggtgcaagaattacagctggggcagtgtcaagcacagaatcaagaatgaaggattagccaggcacctaatagtcccagctaatcaggaggctgaggatcacttgagcctggaagttcatggctgtagtgagctgtgattgaacctgtgaatacccaccacactctatcctgaccaacatagccagaccccatctttaaaaaaaaaaaaggattagaatttcaaagggaggaagctgacaatttagatatagatacggatttttatggaaggatgaagctttgggattgggtgagatatctccctgacagagaccaaagaaagaagagaccttgggcagtgcctaggcttaggggacagaatgaggagccagtaagcctgagaaggagaagttagggaggtgaaagaagcaccaggacactgctctatgacagccaaggaagcagggaggtcaagggccttccaagtaacaatatcaaatgctgctgagagttctagaagacaggcctggggccactgtggggaaaaggagggttggctttgggaaggaatgaacatgtacttgggggttggtcaataagatgctacatggtattcagcacataagaaaaacttactgagactcttaaggtgtccgatttattctaagatagttttatgtattttatgcaatttttttctattgttagtaaaaacaatcattttgttgttattgctcctagaggcttggaacaaaattaagcaaaagctataagcatctccttttccatcaataatgagtacatatttttcctcacaggattaccctgaggatgggttatagataatgcctgtgtgctttaaaaatctgaagcagcaaacaagagccacgttctggtaaaaaaaacatttaattttactttgtgtcttcttttgaatgtgaagagacatctgggaaaaatactgaaagtaataagaggtatgtgtgtgactttaatgatactgaatggaaaaaatactggattttctctggaaggtcaaaggtcttttatctatccagaattgtcggtactacaactgttattcttattaattctattgatctttgcatgatgacagaaaaatgttatcgtagactcatgggactaaatgaaatcttagcagagcatttaaattattctcccccacccccgcttatactctcatctcccccaggacacacacacacacacaaccacgcaagctccacttacagaggatgagaatgcatcctatttttaatgcttttagggaagatgatataatattcctggataatccatatcacaatagaaaagcctacacttagagcaggaaggtgtgtgatcaccttctgggttataatgtagtccttttttgtttttcccttgtcctaaacccagaggttggggctgggagcagtttttacacccagcagaggaaaacaggaattgattgaatgggtaaatcagtaataacctatctaaaaaccaaatgaacaaggtcctgttattaaagccattcacaatagccaatacaattctggtaggaatgttgggtaatttcttagtggctggatggctacttttacagccctgggacaatgctggtattagttactatttgtccagtgaagcaattgagccaagtttattttaaaggggggtctccagagtttccttggttatcatacttgtaattcatgcagcaagttagccagtggtgttctcagggaagtgggtggttaaacttaaaactggcaaagcaagcaagccctgaagccctggcatttcagcacccccactccctactgagaccagctgagactccactcccaaggccaggctgaacgtccactgtgccacacagggagctgtcaccccaaacataccaaatgctttccaccctctgcacctttgctctccctgtcctcatgccctttctcctcttcccacctgcattagtcttaccttccaaggcccacctggagccccatctcctccactacaccttgacttgctgtggttctcaggaataattccattctctgaaaacctgcacttcttattagaaacataggccaggcgtggtcgggcgcagtggctcacgcctgtaatcccagcactttgagaggccgaggcgggcggatcacgaggtcaggagttcgagaccagcctggccaatatggtgaaaccccgtctctactaaaaatacaaaaaatcagccgagtgtggtggcgggcgcctgtagtcccagctacttgggaggctgaggcaggagaattgcttgaacccaggaggcagaggttgcagtgagctgagatggcaccactgcactctagcctgggtgacagagtgagactctgactcaaaaaaacaaaaaaaaaaaaaagaaaaaaagaaacataggctgggcgtggtggctcacacttgtaatcctaggactttgggaggctgaggcaggcagatagcttgagcccaggagttcgagatcagcctgggcaacatggtggagccccgtctctaccaaaaatacaaaaattagccaggtgtgatggcatttgcctgtggtcccagctaccagggaggctgaggtgagaggatctcttgagcctgggaagtcgaggctgtggtgagctgagatcacgccactgcactccagcctgggcaacagaataataccctatctcaaaataaaaaaacaagaaacgtgatctgacatgtagtgtacttgatcttaactgtcacttttttgtaccatcagctcaaatggactataaaactggatctgattttccttagagagctcttatgacaattagactaagatatcctatcatatgtttgaaagcaccttgtaaaatagtccacattaaaaatacaccctatagtattttttcctgacatttgcagaatttttcataaaagccatataacaatatttaaaaggttagaaatcagatctctttacaatgggggttttaattggaaggattataatgcataatgtaaattatactttcatgtttgttctggtagctcctttattgacatgaccccatctctgatttgacatttaataggacttagaagggtaggaggttttctgtttgtatatcacaacatttaattgcctgttctctcactgggaaggcatgagaaagacactttgtataattaaaataaatagataatactgatgtagaaatggatgtaaatatagataagtttaatcttcacaacaggcccaggaggtggacaatattcacatcctcttttacagataaggaaacagagaacaaaacagttcagtaacttccccaaggtcacacagcaggtgaccagctgggattcacacctggcattctgatcccagggttcacatgcttgcttagtcactttactgtgacaaggcagcaaagagctgagcaagatttgattccatttaatttgagcatcatttattggacatttactaaatgccaagatctatgctaagtgctaaggatgaaaaatgaatatgataaggtccctgcactcaaggacaatgttctcagacatgactcataaaaacacataattttaatactcttgcgataaaataaatgcatgcaagacagagaagagttacttatcagacagatgttttatagtttgacttatttattttacttaaaatgtggaggccaggcgcggtggctcatgcctgtaatcccagcattttgggaagctgaggtgggcggatcacctgaggtgaggagttcaagactagccttaccaacgtggtgaattcaagaccaatctggccaacatggtgaaaccccgtctctactaaaaatacaaaaattagccaggcatggtggcgggcgcctgtagtcccagctacttgggaggctgaggcaggagaatggcttgagccctggaatcagaggttacagtgagctgagactgcaccactgcactccagcctgggcaactgagcgggattctgtctcaaaaaaaaaaaaaaaaaaggtggagaatacccctaccgtcacacacacacacccccaccccccaccccccccacacacaaattcaagttcatccagttggtatagacctttcctctgtgtgctttcttaggtaagactgcatgcaaacgagggaactgtctctgccctggccctgaagcaagaaattagtcaaagggggaggcaggagaggatctggtaaacagatgcaagagaatacaatggtgtcaatgctgtcagagaagaaagaacaaagttcccagagaagctatttgaactagaccttgaagaacaaacaggcaattgacaagccaaagtggggctcaggcagagaggtgtagagcaggctaggcctttccaaccagagggtacccgtgccaggttcaggtggggaaggggggtgtgttcaaggtgagggagaaggagaaggtcagtgtgtctggagcataaagtgcaggggcaagggtggcacagcatggcatggcagacagaattggattgagtccagacagtgaatggtcttacaggcctggcccagaattgtagacataatcacaaaggcaatgaggtaggaacaaattctagaagcaaaaatatcactgactgacttttttctaattttagatcacctctacgagtatataggaatgctatgttctgaggaatgtatatttgagggaacaaatgtcctctgagaaaataaatttagtagatgccaaatattatattaccttatcagaattttacaatttagactaatataaaaatattaaacactttgaccactttggcagtaagaaaatctatttgcttactccaatcttcattaaatttatttaaccattgaatttttttgctccctaccccctacaaaacgcctattaaacgcttcacagttgacttatgctaataggcaataagggtgtgacccaggagaggctatatacatatgggcacatacattacatattcagaaaagcattcagaagaaaatgctcatagaattttagaaattataattccttggctgggcacggtagctcatgcctgtaatctcagcactttgggaggccgaggtgggctgaccatttgaggtcaggagttcgagaccagcctgaccaacatgatgaaacccccctctctactgaaacacaaaaattagccaggcgtggtggcaggcgcctgtaatctcagctacccaggagcctgaggcaggagaatcgcttgaacccaggaggcggaggttgcagtgagctgagattgtgccactgcactccagcctgggtgacagagtgagactccctctcaaaaataaaaaaataaaactaaaaataaattaaaacataaaaaattccttgattatatattaaggatctgcttctttaattactttcaagtgttttcaatattatttcttggaatatgaataattcattcctcgatatggttttgcataatgatacatcaaagtcaaaataccatccaataatttcccacacctgccccctctagggcttgtcctttaagtttcctacagagacggaactgacttgtccatggccacaaaggatgggatggtcacatgaactccataagctgaagatcttcttggctcctagcgcaaacgcatagaccaggagaccaggctacgctgccatcataaacgaagcatggcataccttgcaggcactgagtcatgcagaattgaatgttcttagtggaattatctgatgttctgtgttctgttgggtaacttcaggtcacttgccctgaattttaattttaatttctttcgagcaaattacatttcaagttaagtcaatccagttatagaagttgtgccgaatctccctggcatccagggcttttgcggtgctgtgccctgtcccctccccacaggtaactcctactctccactgtcctcagctgaaatgccacttctcctagaccctccccacactgggcagatcgctgatatcaactctcgggatgccatgtatctcttcctacttagcattgatatcatctgtaattgtaagtttatttatgtggttatttgtttactgttggtcctttcagtaggctctgaaatctatgaagggagggaccctgattctgctcgatattgcattgtagcatccagcacacaaatgttaagtaaacaaataaacatggattcaagaactctaaaaggccataatttaagagagtagaaattgtgactctacatatattggctatagcctaggcctcatttgaaattacagaaaaatgcgattccattggtaacaaataggctatcttatgtttgaaattacagaagaacatgattacattggtaacactgataagaaataaatgctcttccaccgataagcattatagaaaaatggtattcctatgatttagctattctgttgatagctaaataaatattagctattactattataattagtgaacaacgtaaacttaactgcctttagtatcattccatgatatctagcttccaggcagtactttatttatatacgcaacataattggcatttacatactttaaatatttttggcctagtgggtctgggctggtctgggatggtgggtaacatctagttagagcttccattataaattgaaaaatgaaatattggaaatcaaactttcaaaatttatttagattccctcataagacatttcatgtttctcccactatttccctttctttgtctcacagacatgccacatgggtagcgtatgcttcctttgaggctgagtttaccacggaatactacacacggagaagaatctggcagtaaggctggccacagtggctcatgtctgtaatcccagcactttgggagtcccaggcaggagaatcgcttgaggctaaaaggtcgaggctgcagtgaactcccacctgggcaacaatgtgagaccctgtgtcaaaaaaaaaggtctggcaatggcttctgcagggaccagtgtaactggcacacagtcagtgtttgatttgaaatacaaagctgtggctgggtgcagtggctcacacctgtaatcccagcactttgggaggccaaggcaggtggatcacctaagatcagaagtttgagaccaggctggccaacgtggcaaaaccccatctctactaaaaatacaaaaaaaaaagaaaaaaattggcagggcatggtggcatgcacctgtaatcccagctacttgggaggctgaggcagaagaattgcttgaacctgggaggcacaggttgcagtgagctgaaattgtgccattacactccagtctgagaaacggagtgagactgtctcaaaaaaaaaaaaaaaaaaaaaaaaaaaagaaacacgaacacgaagctgcacattccctttctagtcatctgcatgtctcatgcacctggtacttttctccttcgtgagtttgtttttctaccagaagttttcatccatgaggaggtggagtgtcgggggaggggaagtggtttggccagctaaatgtatacagcagggagctcgttcaagggcaccaggttcgattattaatttagcctgaccaaccaagacaacagaaggctagaattcaaactttgattgcgtggttctatttaatgtgtcacctgcaagataaattatccctgggagagcaacttggttggctagcccagctctacagcaaagataactaaggcttaaggacagtgtcttgtacaatgaggtctgatcacaggctgtactcagataaaaggaacagtgacattgctttgaatctaacaaccaataataacaactaggtagcttcttcctttagctttaaccctgctgtttattacttggtggctgttgaacggaaatccttctcttcagtttctaaatcaatggttaaagcactgtcatgttgccagccaagctaagagtccgggaagctgactgttaaatcacagaaaccactcagtagggtttgttaaacactgaccaatccatattttaatgcatcttaagagtactctgtgtccactggcccgagaaagcaaatgcttttgaatcacgtcatttaatattaataagctgcaatgaactttaaaatgtagcagttatgtactgtagcacaaaagtaaataatcctggaagtagagtagtacaacagtgaattagcataaaaatagaatatactaatttgaattgtagaataaggactcaaagtacagagtattgaaactactctaatggtttagttaatgacacccaccgtgttctacagaaatgtagtcctcaaactctttgatctcttcatccactgtggtactcatatcctgcccatctccttaatccttactccacccacctctaccctcaaaaaagactgcatgctgagcaaggagggacttagttaaatgtgcccagggctccatgggaagagcatgggtggtaaactagcagagagcagatgacctacatatggaaccaaaatgatggcagagaatagaaagagactccaaagaatatacataatctttttcctgaatcatgtctgggttgataatagtttcaacacaccttggaaatccagatttttagtttggaagaaaggttcggaatatatatatatacacatgcatgtctggattgataatagtttcaacacaccttggaaatccagatttttagtttggaagaaaggttcggaatatatatatatatatatatgcatgtctgggttgataatagtttcaacacaccttggaaatccagatttttggtttggaagaaaggttcggaatatatatatatatatatatatatatatatatatatatatgtagaaaacagaaagggaaattgctcttagatgcatccatagagtgtcaaagtaagaaagttttcaaaatgaaaaaaaggcaaagtgcctatttggtacagctgtcctaaactgtgagcacaggaaaaaagtaaaattgatcagaaaaataggaaagcagaagccagaggaactggtaactgagtaaaagagtatttgcccagaatggtaaaaaaaaaaaaaaaaaaaaaaaatgaccagcatttttacctgtttaagagcagagataaaggggaatgagaagggtaaaccagataactagattctaaaagcttaacttggctgggcgcggtggctcacgcctgtaatctcagcactttgggagaccgaggagggcggatcacctgaggtcaggagtttgtgaccagccttgccaacgtggtgaaaccctgtctctactaaaactacaaaaattagctgggcgtggtggtgcatgcctgtagtcccagctacttgggaggctgaggcaggagaatcacttgagtccgggttgcagtgagccgagattgtgccactgcactccagcctgggcagcagagcaagactctgtctcaaaaaaaaaaaaacaaaaaaaaaaaaattaaaattaaataaaaataaaatttaaaaagcttaaacttaagcctaatgtgtgagtcaaattgagtaataagagtaataatactaaatttgcaattatttccttgcttgcgtttattcatttgctcatcaattcattatttattcatcaggtatgttgatatcagctgaattcaactgcatgcaaacacaaagcagcttcactctctttttcaacattttgtcttgaaaccctccctgtgaaccatttgttcctcaccctggatgaaaacccaagtgccatggttctttgattcacatagctaattaaaagtaacctggtcacatttggtcctaaggacaacctcattttcataattgaaatatccagtccactgtaattataaaaagcttcaaattggatccaagattcaaggttttcttgctcttcagtttcccctttctcccctaccctgctcttgttaaatcaccctgccttcctcaggggctccaggaagagaaaatgtcttacatgctgagctagcgggtcacatgagctccatatggtcaccctccaggtatggtaaattcccaaggctgattcttctccaggagggcacattgctggggttctttctcagccctgggtgtgtggtggcctcccccatccaggtcccaacaggcaattctcaaggtgacctcctctgggggggtcgacgtgcagcctggaactaagggacgtgtgcccactgccattagtaggaggggtttcctcctagtgtctctttctgttctctcatcatggcaggtagaccaaggcagagcctttttgcctttatgtttccagaagtcaccatttcctgggccctccaaagtccagaaaatatacgccaagttctctggttctcttgtggcactggaatcctgggggccccttatctgacttggggtgagagaaagcccagcatattgactgctccaccaagaacagacctgccctcctcactcttctaccttaatttaaacttttttaaaatttcgaggtggctgatgggctgagaacagacagggatttttacaaccttctttgccaattctgcataggcctgctaatatcttggtttggttgggttgacaggtggagggacatgtcacctaattttctttctttagagatggggtttctgttgcccaggatgaagtgcagtagtgcaactatagctcactgcagccttgaactcctgggctcaagtgatactcccacttcagcctctccagtagctaggactagaggtatgcatcactatgcctagctaatttatttttagttttagagattggattgtgctatattgcccatgctggtcttgaacttctggcctcatgcaatcctcccacttcagctcctaagttgctgggattacagaagtgcgccactgagaccagctgtgcgtaatgttttcatctcaatagtagggaatctcaggtgaaactgactaaagtggttgtgctttatcatggggttataatgaacagaaacattctagtctgtgcccatgtttgctggccctgtgctaagtgctggggattcaaaacaaaacaaaaaaccgtggtgacttgtctcaaggagtccacagtcaaggatgcactcccctgtactgcccagtctgtgtttaagtggttgttatgctggacccctattcactccaatagggatggcatgagtccaagaggttgaagaagagatctggagagagtgaacgagatataaggtttattggggaatttacagacagggacagtgcagtggcagcaggctggacaggagtaccgctactgatggtaaaaagcctgatgttagtataacattttcacttagcaccttccacctagcaacctccatttaacccagcaccaagggcctctatcccctgtatagcctgtgtttcaaaggatgggactggggtccagatgtccttcatggacaaggagtgaaactccagattggccgctcccagattctttagcttgggactccaaacacacactctccttagaccacagggtcattcttgggctatgcctcagttaaattattgctttcagatgcatcggccatatggtggtctttcctctgtaagcacatgagtgtcctgggctaagaagctgggaaggggaaaaggacaaaagtgaagggtatgaggggagctagagttcaatggtgcctttctataaggtggggactgcaacatagagtttctcttccccaaccaccagaggcgttaaaattaggaggcgagcagagccaacaggagttgaaagctgtggtccaccaagccccagacaaatctaatggcttggtgaacagtaggaactgaaaacagacatcaagactgaggttctgagaactaaaggaaaactgagcaaaaacgaccaggtttagagcaagtagccagagatcaagagtgactgcctagaagaggccagtttgtgcttgcctttatccaccagcagaggcataatatcttagtggatgggcaaagttaaagggccagggcagtgcagtcacgcacaggtctaaccgcagggccacaccctgcagaggcagctctgtgtggatttggaggagctctttagctgctgggattgttgctcaaagcctatagaagttggggcccaagctgagtacatacccacaaaggaggaatctggcttcagagttcagctaagtcacatctcttctagaatgttgtcatccatttggaagtcagtaagctgctgccctgcattgctaattcccctttgtagacacgccctatcctctgacttgcacaagcctatggacctgaaattacctacttggttctctgtctagcagcctggcagccacaccaacgttactcagattagcaggctgagatctgtcccagactctaagatcaaacctaatctcagtagccttatatgggaggcattgagcattgtgtcagtgttgctgccggtgccttgtgacttcagtgtcctgagctcctagtacctcgctgactctttacatctttgcctcatcaatccttcagtccttgaggttaggggtccttcttttttttttttttttttgagatgaagtttcgttcttgttgcccaggctggagtgctatggtgcaaccttggctcactgcaacctctgcctcccaggttcaagcgattctcctgcctcagcctcccaagtagctgggattataggtgccaaccaccacgtctggctaatttttttgtatttttagtagagatgggatttcaccatgttggccagtctggtctcgacctcctgacctcaggtgatctgcctgccttggcctcccaaagtgctgggattacaggcttgagccaccgcacccagcctcttgaggttagtggtcctcctaagacaacacccagtacataaggtatgtgaaactggtatgtaaggaagaatgaacccactaattgaacagtttgaggagggaaagggtcctttctcccatcatttgagagagctatggtgggaggaactgtggtggaggaaagcagagaaaccttctggtggaggagcgagggagtgagctgggccaggccaggtgcaaattgcttctcactgcatcctctccatcatctaccattttcagctatttatttgcctgctatactgtaataatatgggtttacaatcttttttctatcgtaaactacagagaacattttaaaaacacccttaattaattcacatgagaaattaattattcttatagtcacattgttcattcacatttaattacttctaagtgcataaataaaatttaaaagtttacttccattaaatttatattacatggtcatataatctaataattatgccaattgcaattaaaatgaatttactacattaatttcatctcatttatcttcgtttattatgtttgagtgtaaggtaatctgtaattatgcttaggaagcaagaatatcctgtaattttgacctcagtatcttcacaagtctggaagtaattcaaagggtttttaaagctacactgctagaagtctgacttattttctcatcttattttaaaatatcagttgaagaaacagaaatgagaatgatccacccttctttcgtgcaaggataaaatagagatatggaggccattttcagcagcaaaatttcataccgtcattggtgcctgtggaatctagattagaagaaaagatgctagggtctggaaaaggtaaaacacccagaaaattcaattaaaagtatgtctttagtacttactttatgagcaaaggtatgcaagctattaataaatataagaaaaaagtattctcatctttgataattttataaaagctagaattgttgagattaacttcagttctgaaatctgaaccaaagactgttctctggcttttatgttgctttgcccaagagtgacatgggtcaattgccttaggatatgtttaccatcaacctggtgttttaatagaacttgagttttgctacccagctccctggaacacctgactttgttagaacaagttactaggaattccaagagcaccagctctatcttgttttgcagcgcaagctttactctacttgagaatgacagagggcactgggagctccaacctcttcataaatttgtatcatttgttacaaagaagaaataagagggcaaaaataaatgaatgcaaatctaacatcactattggaaatataactcaggacacacactttgtgtcaggaatgctatggtcaagtatgaagagagagttgttattcctggtccaggaagagagcgagctcccattctagctcctttagagaataatgcaggctttatctctggtgaatatcatactagtggctagaaaaccctatccgtcattaagatgcaagagttctttacattttgcacactgggccagaaggagaactactctagatgcatcgttaaaaatctctgtgtcccttttctcctctagataagtttatatatcatattttcaggtgcagtttcatggactggttcctacttctgtctttctttaacaggacatactgattttatcaggcagcacttgaattctggtaacaattcagctggttgcttcttaaagtatgtgtgtcacagaaaggattttcccttcttattgactagaaaacatcagagtctgggttatcacaaaaatataacaagaaaacatcattaattattgttaagaaaattcaccaagaatacaaaacttcattttattttaaaacaagtgactgcatcttaagaaatggaaaacaatttagatcaggtttaacattgtgattgtgtgctctaggtagtgaaaagcagagccaacgatattgacaatcagcaagacgaaacccttcaaaataagcagatcatgtggtatatgttctgtcttttaacattcactgcatttaccaaaatcatggctgattgaaatgtgtgcaatttgttttaaaatcggattcaaggtgttttgctttgcaagtaggaacatttaccgtaaatcaaggttgcaagagcagtgttgctttagtgagataaatgtccccagtatacacaaggctgatatacaagacaatcacaccacatattactttaacacataatttggaaacatttcttaagaatcttaatacatctaggcagcttattatggacgtgacagaatcagttataaatgaccgttaggtgggcttcacaaatgatggaagaaggagtgttttggtaaagacacttaggacagctcaggaaatcagccggggagcagaggccatatgttgtcagctttgcgtcaaaatgtgctcaccacatcattactgatgactcttctctgcatggggctgtgatctctcgagcaatctctcagtgggactgccagtggccttcagagtttgccctgcttcagaggaaacaccttcctgccacatggaagaggcctcttgatgggataccaaagaaagatttgcaatacttatgattttttggaaagaactcagagaagagtgaaatgactgccttttggaaaagctccgtgatataatatcctagaatattattgctgcagagggctttagcagcactgttacttgattctgtggcgtaaattcttccctcaacttcttcgttttgcaggtggtgaaacagagagagaaattcagttgcttaagattgtatagacatcctgcagattcgtaatctagctcacaattattaatcagaagttaaaatgcacagagggcccctagggtcctataatatgctttgcttctccaccttgtttttcttgcaaccttgttgtgtttgcccatgtgcgttctttgctaagtgttcatgcctggtgaccccatgcccagcaggctggatgtgtggatgggaaaatattatagaggatgaagacactcatattgcctttggatgtgaaggatgccatgttgatttggccatatcttcatatttgatccgatgaggtggaatgaatgtggtcatcaacttcttttttttgaaacagagtctcactctgtcgcccaggctggagtgcagtggcgctatctcagctcactgcaacctccgtctcctggattcaagtgattctactgcctcagtctcccaagtagctgggactacaggcatgtgccaccacacccagctaatttttgttcttttagtagaaaaggggtttcaccatgttggccgggctggtttcaaactcctgacctcaggtgatctgcccgcctcagcctcccaaagtactaggattacaggtgtgagccactgtgcccggcctggtaatcaagttctacatttattctatcacatcattgtattctgcctaattaagaagagaaatatcttcttaatatcccctaatatgcactggcagaaacactttttgaatgtggactgggagtctaattctctaagcctcatgtgggtcacctttcaactaacttccatttaagtattgctggcatgaaaaatataggatagagtcttgagtaaacaaaatgtagaattgcgctttgtttaattactccaaagccctttgtctcttacttgtaaggtacaatacggcaaagactcttggcagatgcctaagaacttttataactgatgtcaagatcaactgaaacaaagacgcatttgttgaactccagatttaaatgctggcctggcttttcagagataaatcttaggtgtttgctcttggctatggataagagtagtttgaaaaatttatttgccaatgcttacacaagccactactgcatattatgaagcattgctcacctaacacataagaaaaattaaaaacaaaatagctgagtgtggctggaaagagaggcagctctaggggagggcattcctgggaagcaggaatggatgcaaaaacccaggttagattaagcatttggagatgaaaaaaatgaattgactagcatagctaaaaaggcagcaacgtgattaccaaaagcaatgtcagcatggtgtagtgggctgcgtatgggttatggcatcggtagatagctccaatcttttggtacttggcaggtttcttaaagtctgacaatctcagttttcttttataaagtgggattatctgcctgcctttgagggctgctcagagggtcaaatgagattatgttctgaaagtactttgtcaactaaaattctctatcaatgagaatactaataaaatgataatataataatcatgatcagagtaatactcatttgatactaatactaccaaatgacatttacatattttattcggtgccagacactaagctaaaggtttcatataaattctcttactggggtgcatactatttgacaaaataggaagttgtgaaactcagattaaataacttgaccaaggtctattggatacccacattgtgctttgacttccacagtgaattaccttccttattataatgataacaaatgctaacaattcattcaggcataacttctgttttcacatattcctctaaaatgatctttcttgtctagcattttaccgagtagttcaatcacaagctcactataatttaatgcatgttctctccttgaaggacatatataaaggcataaggaaattattatataaaattaagactactgttttagagcaacagaacttgcatagtaaagaaaggctgtagaacctttaaaatacaatatgaacatcctgaaagattagaaaaagaaaataattctcacaaccatattactctgttagtcctttaatttttatggcccattgtctccttttacattattattcctttttttttttctatcaactatccctgggataatagtcctatgaatgggtctataagcctatgaaaattccagaattgcactgttcagtgtggtaaccactgtccacatgtagctatttaaagtatatttagactaaaataaaaagaaattaaaaattcatttcctccatcacactagctaaacttcaaatactcaatgaccctatgtggcctgtggctatcatatttgacagtgcagaagaattcccatcattgcagccagttgtattggacagccctgctccagaacatgaaatcatgatcctctctctgcctggatctgctagggcctaggggacagtcacattatctatgtaattacgccagaggatttacgaggatgtttagagtagaaattcatggaatgatattggacttattgttgatcaacatgatagcagattaaagcatcaaaatttggagaattatcttaaccagactctcttgcaccagctggttaaagcacagaacatgccagggatgtgttcctagtacattccactggcacagaggtgtgaaagatgtgaaaaggaaaaaccacacaacaacgctggccagagcaggcagagttattcagaggagtgtttgtagacagatgcaatggcctgagagcaggcatggaattgtgaaaagcccttctgacctgataaagtgatttcagagtgatagagttctaaggtgagacaatagcagagaatggtgttgaaggttagaactaggttgaaattgtaacgggccttgtgttctctaaaatgttttagtttatccatcaggactcagggagccatcagaagtcttcaagctgtggagtgacgtggctggattagctttatttttcaggaaggtaattaacacatgggtgggcagagtagcttagtttagaggttgagaaacaacttctggattttcctttggtagagttattgtgctctatttgtcagtcataataccttatagttcaaagtaaggatgatttttaaaatctctattaattttctgacattaactgacaatgatactaaaaggacaatttatagtagtgttttgttaactatggtaaaatgggctcagagtggtctgaaaaatgtagtcacctagtgaatgaataataaagacctttgtaccagcttaaatccattttgggtgaatatatttataatatttataattctattaattggttttataagatcataaaacgcaagcgtttaaatgatgcaccattgttgtagtggaaataaaagaggaagatacatgaaatactaaagatgagaagaggtgggaaatgagccagacagaccaccctaactatgctggcgtttggttgattttggaaaaaagacttgggaaaatgaatgacagacccttcccttgatttttcccactctactaatttggtcctgagttaattgtcaaaataagtgagactatgctagaaaccaactattaactattttgttacttggttaactattaacaactttcttaactatttattaataagtttatttattaactacttttatagttaataaagatggaaagtcctgacttagtaaagaagaaatacatactccttttaaacatttatttatttatttatttgtattttaaagacgggggtctcatctgtcacctaggctggagtgtaatggtgccatcatggttcattgcagcctcgaatccctgtgctcaagtgatcctcctgcctcagcctcctgagtagctgagactacaggtgctcaccaccatgcctggctaattttttatttttaaattttttttggtagaggtgaggtctcactgtgttgaccaggattggtttcgaactcctgggttcaagtgatcttccagcttcagcctcctgagtagctgggactacaggcatgtgccaccatgtcagctaattttttagttttaaaatttttttgtagagatggagtgccactatgttgaccaggttggttttgaactcctgggcttaagtgatcctcctgcctcagcctccccaagtactgagattataggcatgagccacggtgtccaaccaagatgtgcttctcctcaagaccaaaacatttactaagaagtagatgagcacatgaaagaagttaatctgacatttcctcaaaggtttaaaaataagttgtattttcaaagaaggacttccataatgcttttctagtgactcttcattcaccttactggcttcggtgcagacagactaacccagttcactccccgaatggcacctttaaacttcagtctgttacacaaaagcacacatagtaaaggaaacatttttgcttcagtataactgttatattattctaccccattttaagtatataattaattttagttctgtgtctacacaacttaaagccaatgatttttaacgactgccccaaaaatttctgaaaaacaaacaaaaggggatatctgattctaccatgttggggtagaattggtaattgtataattgatactggactcataatctcactgtaaacaataaaaaagcagacaaaatttatgagatatctgtttggttttcagacagtataggaggtagcacagaaacaggatccctgagggaatggaaatagataaggttagccctataatcacccccagctttcttcctggaagcactttctgaattaagggcctgtgaggaggaactccagcaaaagcaaaaaaatcatattaaattgagaagacagagacaagaattcaaggggaagctgaaatgactgaaattttcagaccagaaaattggagagtagggagctgtgcagacaagaagctacagagatctgtagaggatctccttgagtccattgggattcatagaaagaaactccatgaggccaggaaagaacaatatggggagctgtgagtactgagcaacaattttccatttctctcctacatttccagacgacttataaacagacattgactgcatttattttggacaatctttttttttcacagatgtttgcatagccaacagccatggcagatggagctagtgcctctctcaggagcaaggggcaggcacacttactgcccattataaaaactccagtttcactaaacccaggattctttcttgtaccacaatgcactacatgtgccagtattgctctgtaggaattggggctcagggagacagtgcagatgtcaatactgtggcttctgctgttgccatgagtaataaagtcctttgtctctgatccaggagactcatatcttctgccaacatcttgaagctatggcaggctaatttgttagtttgcaaggagggtaaaatttcaggcccttcacagagtttgacagttttagtgatgagtatgggatgctgacagagatgtagctttctggaaaatgaaggacaagggcctcatgggacaaataatgggttttgagagaaattcacaggaattggtacctgtattagtctgccaggactgctgtaataaaatgccatagactgggtggcttacaaataacagaaatgcatttctaacaatctggaagctgggcaatctaagatcaagataatggcagattcagtgactgacccacttcctcatagacagcattctcaatttaacctctggtggaaaggatgagaggtctctctctggcctcttatgagagctctgcccccatgagctaaacacgacccaaaggtcgtatctcctaatgctattatcttggggataaggatttcagcatttgaattttggggtaatataaacattcagatgacagaagcagcaaacatagcaaatatgttgaccaaattgtatggtcaactgggcaataaatgatcttctcctttactgcctgttattgaagaggaattggggaggtggttacaggctcaaagacaggtgtcctggtttttgctaactctcctttgaggagacagaggctattcctcacaagtcttgcagtcagccttaggtctgtgctcttgtaataattagagctaacattaatcccagaataattggatatctatatgggaaaaatcattcttgacactaccttacaacattcacgaaatgaacaaaagtatcatctaaaactataaaacttttagaaaacaacatcagataaaatcatcaagattttgagggcagaaaaagaattcttaagacactaaaacatgaactatatggaaattggtcaactggacttcatcatcaaaatggaattattctattctttgaaagacattgttaaaaaagtagaaagccaagcccccgagtggaaaaatatttgcagtacatatatctgaagatatagatgcagaatatatataaaaaattcaactaaattttaaagaagacaaggaatatggggaaaaaaaagagatgtgaacagacacttcaaaacagaagatatgcaaataatcagtaagcacattaaagattcccaatattatcagtatcaggacaatgtaaattaaaaccacaatgagataccactgtacaccagtgtttgtgaggatgtaccacaactggaaccctcatacattgctggagaaaatctaaaatgacacaagctctctatgaagtagtctggtagttttcttacataatgactacataactcacaattccatcccttggtatttactcaagagaaatgaaaacatatatccatacaaaggccttcatgtgaacgttcatagcagatttaaatagcattaagctacaaacaactcaaaagtctgtcaacaggtgagtaaataaacaagttataatctatccatagaaaaaagtatttcccaagcaataaaaaggagcaagctaccaccacattaatggatataaatggataaagaaaatgtgacatatatatattcacacaatggagtattattcaggcataaaaaagaaagaaatcttgccatttgtcacaacatagatgaacttggaggacaatattctaaatgaaataagcgacacatataaagacactgtgtgctctcacttatatatggaacccataaaagttgaactctcaagcagagagtaggatggtggttaccaggggatggggtgtaggggaaatcagggagatgttagtcaaagggtacaaacttttttaaacatttaatgatacagtttaatctctaaagcattaggccaggcatggtggttcacacctgtaatcccaggactttgggaggccgaggcgggtggatcacgaggtcaggagatcgagaccatcctggctaacacagtgaaaccccatctgtactaaaaatacaaaaaaagaaaaattagctgggcgtggtggctggtgcctgtagtcccggctacttgggaggctgaggcaggagaatggcatgaacccgggaggtggaggtggcagtgagccgagacttcaccactgcactccagcctgggagacagagcaagactctgtctcaaaaaaaaaaaaaaaaaaaaaaaaagcattaaaataagtttttacaaatcaagcatcaattaaagagaatatattctatgtgatttattaatataaaattttagaataggcacaaggaatttagagtggaagaaaacaggtcagtgattgcctagggctgggattgagggggcaatgacggcaaaggggtacaaggcaactttgtggatgactattcattttttaatttaaaaatatttaaccagcatataaaaattgaatacattcaaggtatacaacatgatgatttgatatacatatacattgtgtaatgattatctcaatcaaattagtttaatacatccataatcatccatgctgtatattagatttccagaacatgttcatcttgtaactgaaagtttgcactctttgactaacacctccctgatttcccccactccccatcccctggtaaccaccatcctactctctgcttcagagttcaactattatgggttccgtatataagttagagcacacagtgtcttcatatgtgttacttatttcatttagaataatgtcctccaagttcatctatgttgtgacaaaggcaagatttctttcttttttatgtctgaataatactccattgtgtgaatatatatatgccacattttctttatccatttatactttgatggacacttaggttgtttccatatcttgcctgtggcgaataacactgcaatgaacatgggggtgcagatatcacttcaatggctattttttttttttttgagacagagtcttgctctgtcctccaggctggagtgtagtggcacaatctcagctcactgtaacctccactcccaggttcacgccattctcccacctcagcctcccgggttgctgggactacaggcgcccgccaccatgcccagctaatttttttttgtatttttactagagacggggtttcactgtgttagccaggatggtcttgatctcctgacgtcgtgatccgcccgccttggcctcccaaagtgctgggattacaggcgtgaaccaccgcacccagcccgtcttcaatggctattcttgactgtgatgtgggagatatagttgttgaaactcatcaagctttacacttaaaatgggtgcatttcagcacatgtaaataatacttcaataaaattggtttttaaaaaaagatctacaagctaaaaacaaagattaacgtggaatgtcaaaacgactcaggagccagccttaacagggctcccactggcaaaagttggcagtttaagcatcaaaaagagaatgactgtagatccttgaaataaaaggaatatgaaacaatcattattccctagtaatatatgtgcatgacacccctccacccctgggacacccctccagcaaagaacagaatttcgttctttgtcttaaaaatcttctcagtgaacagtaactattttgaaaccagaaatcctaaaacaggattgcattttcaggatctcagatttgtttagttttgaattatttatttaaacattttttttctgaaatattttctaagcaaaactaggatggagttttgaaaagccaaattacatacgcactggctcctgtgtaccttgagaatgcaccttgcagactttcaactacttgactattggccccagctgccacactctgaaatgcattgtttcatttgcactcataaaattggggcagagagccaagcctcccaacagccgcttgtagacaattatcaagtgccgcaggcttcctaaggcagcctgtcactgagagcctgagaacttgttcaactttaggccaactttggcttaaagacaccagtggcctggccgcacttccattagacttcaggatagtccagggtgcttttacccaactttccttcttgtctctcctcactaggaatcagatttgcatcaaggctggatggctctcccatctcttcccagctccctctccattttctctctcagacattttccccaataaaatccttgcaaatttactttcatcttgatgtcagcttcttggatgacctgaacaaattcacagcccaatatttgattatctttcatggccaacaaggcccacaggtgactctcatgctcttatattttttcccattaaacttcatctttgtgggtttaaggccatttgttccaacacatcaaagtatttttgaatcttactccattatcttttacatctgttgtctttcccatctttatgacatcccaaaatgtgatgagtagttattacatgtcttctacaaattgtgaataaaagcattaaactgtagctgccaaatgacaggcccttttggaaatgcaatcaaggcctataataagcctgacagtacaaataaatctgttttcataaagtgaataaatattggataattatgaaaatattaaattatatgtagtgagatggatagtgcccttatattcaaattgtacatctcccatgatattttgcacacagaaggtgtttacaatcactctcaccaagatagcaatgacaccagaaaagtgtagaaaagaatatttgaaagaagtaatctttcgtagttttagaaacaagctgtgtagttcttctgttcttgataaaattagggttagagcacagcataaaaatttcagctcttacagcagcaagaactactcagtatatgaaataaccttcagaaacagtgtaagtggattctcttcaataaggatttggtgatgaatggacaggagatggaaatggctagaagatggactggctagaagagggcggttccctggcaaaggccccaccctcaagcctggagacctctgaccctaagtaggaacaggcatttctgtttctgtgcccaaaaagatgccttttggcctgccatatccccctatcctgtacccatataaatcccaaaccccaggctccagaagcagatgagcagatgagcagaggagcagataaggagatgaggagaaaagcagatgaacagtggaacaacatggcagagaaagagagaagaggaggaatttctgaacactgagagaagttcggctgggggtggccggagggcagttcagctgctgaatggccaaactccaggggaagatcatcctcccactccatccccacttccggctccccattcatcccactgagagccacttccaccactcaataaaaccccgcattcatccttcaagcccgtgtgtgaaccgattcttctgggacactgggcaagagctcgggatacagaaagctgtcacactggccctctgcccttgcaaaaaggcagagggtccattgagctggttaacattaaggtgtctgaggatggcaaggctaaaagagcactgtaacactggggccgcaggcacccacccctagacactactgcaggagcggagcccagagtacctgccccggctcctgtacctgcccatctgcgtgttccccctcctgtcaggagtttgagcaacaacgatgaccgaacaggcaagccacacccctgctgcacatcctgcaagggggatcagggaactctcctgtttcagtggcttgcttctttgtgagctgtgagagttcaaaacacttggtgtagcaataatgacagagtttgtttgtgtttacacttaggaacgattgtgtggagttaggggtttcctaaactaattgtttttaggttaatttgagcagaggccaagggtgtggcaaataggcaagtgaataaatcatccccaaaactgttttatatcatggatagccatgctaatattaaaaataattttgatacttcagaggactcatttttcattcacttgtagatagcatggtattttttgaaaagaaacgtaataggctggaaataaatactttgtaataaattttgtcattaataagaggtgaaacctagacatgacttcaagtacgcatcccatcatgacatcattacaaagcactatccttgtataaatagacatcttgtctaaggtcaaggtccctcaataaatctgcagtccatttgggtgccaggttatagaaaacagagtattattctgcatttttccctcccaaaactcatgaacatagaaaatattccacaatggcaatcaaaatacccagaaccttcacttgctataagggttaaaaaaaatcaattgcagttcagcagttcactctcctatataaattctggtcaaacttttatcctttttctcctctagattcttccattactctaggtgctattaatagggcagttctattacatgtttctcttcagacctcttgagtcatacgcaacctttcatcgttagtttaatagctagtgttattgatgagtagtaatacgcagaagaggctgataatcattggttttgcgtagctgaaatagataataatgagataagtttttcatgggtagtgggaaagacgtcttaatggctcctagaatacagatgaaggaactatatggtattacaaaggacatcttgataagaagcagattcaaagaggtcaaaacagcaactggatttctgctggcataaatctcttctcaactgtattattgccttttaaagtctttttttaacaggcaagaatccaaacaggatgtgttttcccacaaacaagaaaaagcaaaataaaatgctctgttgttaaagttagaaatgagagagagagagtctgactaatggaagaaatcaagggccttaaacagaaatggcagaatgcttttatagaggagtattcctgctgtttagaatgcatggctggtgacttggaataagtagtgttccagagagtgaatctaagatatgtcccttaagctacttaaaggcatgactaagaacaagtcactctaaacaataaagtaagatcttggggtagaaaaaacaccacatgtgggcattgaattagaaccaaacattttgtgaaatgacaaggaacatgttaagtttctccctcaccagacagtaatgtgagaaggaattgtcacaccatgccaaagggagtggtgggggaggatgtcagaatcacctctgggactttttttttttttttttttttgagacagagtctcactctgtcgcccaggctggagtgcagtggcatggtctccgctcactgcaacctcggcctcccaggttcaagtgattctcctgcctcagcctctcgaggagctgggattacaggcatgtgccaccacgcagagctaatttttgtatttttagtagagattgggtttcgccatgttggccaggctggtctctaactcctggtctcaagtgatccgcctgccatggcctcccaaagtactgggattacaggcgtgagccaccacacccagccttctgggactctttcaaactacatttgcttcagagaaattctgacgcccctgtccccaccccactgcacacaatccccgcctcctccttaagaattaatgcccatctgagtcagtggtactgatcagtaggttatcatatcccttgggaagggtgagccagaaagcaggctgagaacctgagaaccactgctttagtgagtttattttcctccacacttcgcgtgcccctctgtgctgctaagcgtgcatcaggttctgctgggtggggctgagtgtgtagcccctcgtagcccctcacttgtgggtgctcacacacacagggcctgcagggagaagccaggagccattccttgtgttcacatggctcagaacactagtttgagaagtccaggagagatcagaggacagagcaacatgatctctgctctgagaatcgttgaagtctgtagtttccacttcagggaacttatctaaatatggtcctccttgtaatgtatttgcagatagactgactcaggtctaactcaatggatttagaaaattaacataagtgttaataagtaatatagcagccttccattccatggttctgtgtgctaacaaatatctgttgaacgaatgatatatacaaagatatgggcatagcccacccagcaaggttggtaaacagaaaaggattcaaaatttgtcattctgtgtcatcatattgtgcttcctccatttcctcaaatatcccaaccgtaaactccacatagaacagttcagagacaagtttccctccaaatcttacattgaattggactcagaaaacagtaataataatagctaacatgtagagagcactgctatgtgccaataagtatgtttagtaatttttgtgtgtcgtcttgtttaagacttacagaagtcctacaagatgggaactattgttattcccttttatctatatgagaaaaatcgagcttcaggcaacttaaacaacttgtccatctagcaagtggcatgaagatgacattcacagaactagcaagaggacgaacccaaatctatctaatgacaaaacccatactctaagctactcctctatattgttaccaaacagatttgaaatactacctaaggctaacaagggctttctaagctgtgatttaatacatagaaacatgtttgaccactgacatagccgaagaacaatattttgcagaaaaaaaacctcttgttttagatactatacttgttttactaactaggtagcatgaatgtttttcagagttttcaaaatatgtcagttcttactatttatggtgattatgttctaaaaatttgctgtggacactgaatttgagtacggagctcttgctattaggagaaatacagagttaggttcctgcaagcttctagtcaactaactgatcaacacataactttatttttttgtgtgtttctgtttaaggatgcctcgtttaatctagattattgattgtttaatgttgaactcatggccaacagcactgtaactcatgcctgaaccaaatttccattttctctgtaaaacttaccttttctctgtaaggcacatccaagcctcctcgcacttagaaatactagacagcacttcagtactctggttgggagccattttaaacagtgaaataaccaacaaaagcacaaaaatgcaaaactgtggttctaaatagacccataaaggacccttgttgatagtagagagctgaaacaggaaggcagagcgtcgccttgtgagacctcagccaggcacgggtgcatcactgctctgggcctgtccacaaatgactgtaaaagcataccgagtgctgatgtgggggttacagataaattttagcaagtagatgaattcacaaatactgaatctgtgaatgtggaggattgactgtacacagaaattcacttaaaggaaatctggcagttaaagtgagcggaggtaatgatgtactagttcattctttgagagagcagctcagaatatgggttctcaatgtaaaagtttagccagtttaacccacggtccagcagcacgcatgtaaaataatctgttatgctctggctacaaagactaaaggcatgtggtctctgaatctgtatttctaactcagatgggcagcggggtggtctctaaaatgcaggcctccttcaagtctgctgtaaaggcctgtcactagctccttttctgccctggccatgttcacagtcattgtcccctcagcatggaaggcctaggtgttccatcttgcagattgtggctgaatgaaactgtagtcagagaggtaaagcgcttcgggtaccacaagggtagaatacccaccaaaatggaatgtgtgcacagtattgctcctgctttttgcattttgggttttggcttttattttgccatttcttcctattttttctgggcaatactaggtagaaacagcttaattaatcataattgtaaaaaatactatttgaaagtgttattttagatggaaattatgggtttttttgtcacagcaggtatttttaaaagcatataatctacacacatatctcagagggtcttcagcatccttatttttgagcttaaatgaatcttgttattttctccattcatgctcaaatcacagccaggagctgcttagaaaagcttggcctgggagttagaacattgccttaaccgcctgggtggcagtggcaattcttgcaaagcaaactcagggatattggtggtagcgaggaaccattgtcagaaagccatcaaagctacagtgaagtcaatgccccttcatgttacccctattctcacagagtctggatttgggaataattgtagcaatgtattttcatgagttgattgagtaatttgcatttactaatctcaacgtgaaatgaaagccagcctcaagaacgggagttgtccctggctgtcgtttcttgtggtctctttctctgtggtacaccctcagagcaggcattctctacccattgcctgtgccttacttctgtgtgttagtagtatgcaggtgaatccgtgtgatagctttatttttttaaatttgtaattgtggtaactacgcataacataaaattgaccgtcgtaatcatttcaagggtactgttcagtggtgttaagtatactcacatggttgtgtaatcaatctccagaaatggttcattttctaaaagcgagattctatattcattaaacaataactccccactttcctctcccctccagcccctggcaacctccattctactttctgtttttatggatctgacttttctagatacctcctatgagtggagtcatacagtattcatctttttgtaaatggttcatttcatttaacataatctcctcaaggatcatccacattatagcatgtggcagaatttcttcctttttaaggctgaatattccattgtttgtatacaccacattttccttattcatttgtctatgggtggatgcttgggttacttctacttaatgcctttattttaaaataactaaaatcttgtgacacaaaggtacaacaatgtatatccttggaaaaagctgattattatgctctctttaaactgaagaattaagcccatttcctgggcataaaagatctggccttggctgatgtcatcccaatccatttcctctctctcctcctgtcccacctccctcacctctctctggctgtttttgctcttcatctaaaaggccaggcttactcttaccttgaggcatttgccagtgatgttccctctgctttgaatgttctctttcccgagatatcgggatagctttctccctccttccttcacatctctgctcaaatgttaccttatccaaaacatcttctcgaaccagcctccaccaagagcaaccagccctctcactttgcaccccattctctctctgcctctcttttgcttgatatttccatgacagccatcaccttaactcatattatatattttcttgtttttatcacctagtttccccactagaaagaaagctctatgaagtcaagactttgttttatttacactgtatgtatctccaatacctagacctgtgtctggtaaataaaattccttcaaaaacatttttgtacgatttatatatcacttactatgtgccagctattgttctcagtgctttacaaatgttacctcatttcatctgtataaaattctaagacccagctactatcattgtctcgattttacagataagaaaactgagggcatagagatgtcaagtaacttactcaaggtcacccaggtggcatgtggtggagctacagtatacactgaaacagtttggtgctagcagctgtgctttgagcactgcaccatgagtggaagaataaataaaagggaccttaagttactaaatgagatagaagaggttgcagattttcttcttctcatcatgcatcataacgttcttgcttggtgaaaatttgtgctatgcattagagattcaacagggcagagaaatgtattaagtacgtttttctactgccttttctactctgttggcagagaaaatccctggcatgtgagggtacatttctccccaccttggatattatgttcagaacttggttatgggcagtggaagttagcctagtacctgcctgaccaaatagaggaaaatacatttcagaacatgacaggtcaggacacactaacatccttctgggaataagatttcttcatttatatttaccagtcttaactggaagtgcaaataccttaccaagaaaggaagacactgtggtatttcaacttccctttatgttatacacaaatgtcagcctttacagtcacagcttttcccagcacattctccttccagtttaatttttcctgtctttgttctttagcaatctctttatcctcccttccctggtctgtgttgcacaccatgtactgtatatttggtatagcatgtcagaattcctctaatctgccacttcacttggaaaacactggggtgattactaatttattgctgtcttctggtaagtgcttaatgcaagcttaataaaaatcagtggttgtgtgtgcctctcctttgtaggaatatacttctgatagatgactaggttaggtcattgtcagatgatttatggaaaatattctaggataatctgccaccagcattttattggtgtcacggaagatgctaatggtcacataagtggaagcagaagcagaaaaatgtaggtgctatacaccctctcttcaaaaggctcattgtgagcaaagaggttaatagtatggaatggggacatcttgcttgatcacagtaacatcccaagacaattaaagttaggatgctaagtgcatttccaaccatgaggccaatgtttataggttctcagccatcaggctttatctcctcattttgggtaacaaagaagtacttgtcatttctctcaccatccacaggacccacccagagtgcctgacctcttgccccttccctgttggagaagggtcttctcctacaaaaggaaaccacttgtgagggatggttaaaacaaactgtctgcactagaactagaccctttcaacacaataatttcatctttctcttttaagcgctcctcacacagtatggcataatgaaatcacaaactgccctgcgttcatctttttctggaaccatacagaacatttctgtcctctggcagacaatctctgcagtctctgctcaatgtcaggctgtgcaggaggtggcctctcccagcctcaacccaagcatcagcacaacaactagtcatcagccaaaggaagaatgtggttcacttcattataatgtctagaaatttgacatttcttcctaatcatggctttccaatttcaactcatcaaaatttccatgcaaacttttaggctttaaagcagtttttaaaagaagctgtttaatttgttaatcctaccattacagtccctatggtttcatctattttatggcaacatttctgacttgtaatatttgacttcttcaaaatattgggacatagcaagatttactacatcatttatttcattatacataacttaatagacatcttcagccttttaaattaaatttagaaaattccttagcagagtaagctcctgtcaggcaaaataagcgccattctccataataaaaggcgtatgtgggacagataacaggcagaaactgtttccacccttgctgttgtacttcttcccatttcctttcttacttgtcagaagtggactgattcacttcagagtctgtttttaactgggatttcctctgattgtccactctctagagacaccatagcctgctcaaatgcatttctgctattgactttccattggatctttataagatccagtcatccaggcaggctgctctgtgggcagcacttcagcaatgatgaggctgctgttcccaagaaacaaagggaaggtgggaagaggctcccaccgagaaacaagttaagagagctcttgattttggcaagcatagaaagaagtaggtttatttggaaagaaaattttcaaaaaataaagaagtactgatctttttactgtctccatagttttcccttttccagactgccaaatgggtggaatcatataatatgtagccttttcatattggattctttcacttagtaatatgcacttaagtttccttatgtcttcacatggcttgatggaaaaacaacaattttcaagtgctgaaagaaatggatcgtcaacccaggatcctatatcagcaaaaatattattcagagatgaatgagaaataaagacattatcaaatgaaggaaaaataaaagaatttgtcaaaagcaaacctaccccaatagaatgactaaaggaaattctctaaacagaaaggaatagtgaaagaagaaaggagggaaaatcatgttaaccaaaaatatgggtaaatatgataagactttcattctcctcttgtgtcttccacattctgttgatggttgaaacaaaacttatgccactgtctgatgtggttctaaatgtaaacagaaaatatttaagttctaaatgtaaattgagaaaagactttatcttccataataaaaatggaggagaggaaagggaagtacaggaagataagtgttctgtacttcacacactagcaaaatgacaccagtaaactgcaatgtcatagaaatatggtgtcatgtctagagcaaccactaaaatagctatgcaacgagataccctcaaaaacactatagaaagagcaaaatgaattctgaaatattttcaagtaacacacaagaatgtaggaaaaagaaaagagagaaaaacagaataaatggaaaacaaaaattataatggcacaattaagctctaacatcaataattacattgaacatagtgatctaaatatactaattaaagacaaaaattgaaagaattgattttttacaaaagaaccactttatgctgtctatgaggaagatacttcaaatataacgatacaggcaggttgaaagtaaaataatgaaaaaatataccatacaaacattaattgaaagaaaaaactatagtaatatgaaaatgagttggatacagtgacaaaaaaatgacgagagtcatagagggacactatgtaaaagggtaaattcaccaagaggatacagtaatcttaaatgcatatgtgtcaaaaagcagagtttcaaaatatgtgaagcaaacattgatagaacaaaaaggaaaaataggcaaatctacaattataactggagttaaacactttctcaacaactgatggaacaagaggacagaaaatacacatggatatagaagaactcaacagcaccatcaactaatagcatataattaatatttatagaacacttcactcaaccacagcagaatagacctcatcatgggctgtaaaacaaactgtggcaaatttaaaacaattgaaataaaacaaaatgttttctctgaccacaatgtaattaaactagaaattaatagcggataggtaacggtaaaatctccaaacacttggaaactaaacaacacacttctaaataatctatggctcaaggggaaggctcaggaaaagttttaaaacatacattaaatagaatgagaaaaaatacaatatatcaaaatttgtgggtcatagctaaagccatgagggaaacttgtaacactaaatgcatacattagaaatgaggaaaagtctcaaatcaataatctaagatcctacctcaagaatctagggaaaaaaagcaaaataaattggaggcaagcagaaagaaagaaataataaagacgagagcagaagttgatggaattgaaaatagaaaaaccataaagaaaaccaatgaaacaaagagttggttctttaaaattgacaaacattaaaattaaaaactttcgctctgtgaacctcatgtgaaaaggatgaaaagctacagagagggaggccatatttccaaaccacatagccaacaaaggactggtatctagagtacaacagaactcaaaactcaaaagtaaaaatacacaaacaaacaaacaaacaaaatcccacaatccaattagaaaataggcaaaagaaatgagcagacatttcactgaagaggatgtacagaaagaaaataagcacatgaggccaggtgcggtggctcatgcctgtaatcccagcactttgggaggtcgaggcaggcagatcacctgaggacaggagttcaagaccatcctggctaatacggtaaaacccccatctctaccaaaaatacaataattagctgaacatagtgacacacacccataatcccagctactcaggaggctgaggcaggagaatcgcttgaacctgggaggcagaggttgcagtgagccaggattgaaccactgcactccagcctcagggacagagtgagattccctctcaaaaaaaaaaaaaaaaaagaaaagaaaaaaggaaacacgtaagatgctcaatagcattgtccataggaaaaggcatattaaaaccaaaatgagatattatagcacacctattaaaatggctaaagtttaaaaatagagaagacactaaattctgactacgatgcagagaaactatatccctctgacattgctagtaggaatgtaaaatagtacagtcaatctggtagacacttcagaaatttcttccagcaattgttttcctatgcatttatcacacagaaaaacttaggttcacacaaaaacctctacatgaatatttttagcagctttattgatgatagtcccactgtaaacaacttggatgtccttcaatgggtgaatggttgagcaaactttggtgagtccacatcacagaatactattcagctataaaaggaaacgagctagtgatacaggcaacaacctagatgaacctctagagaattaggctgaagggaaaaagccaatcttaaaatgttacatattgtatgtttcatttatatatcatttttgaaaagaaaaaaattacagaaagaaaagaattagtagttgccagaagttaaggacaggtgggggtgggagggaagtggatgtgactacggaaaacagaacaggaggatccttgtggtgatgaaaatgttctctatcttgactgtgtcaatgtcgatatcctagttgtgatactgtactatatagttctgcaaaacattatcaatgagagaaaatggctaaagggatatagaattattaggatcaatattattaatcctgtcatattagaaaacattttatagtaatatacatagcatgcttccatttcatcaagagcaaacaacaaagcagccaacctctagataggaatcgttggggtagaatgtctgtaaagatggttgccagtaagcccctcgcttccctctttttctgtaatttgttacatggcaatagacacctgcgacatatttgtatgtatatcaatgtttataaaacagatgattgtgaataaaaacatacctgtcgccgggcatggtggctcacacctgtaatcccagcactttgggaggccgaggcgggcggatcactaggtcaggagatcgagaccatcctggctaacacggtgaaaccccgtctgtactaaaaatacaaaaaagtagccgggcgtggtggcgggcgcctgtagtcccggctactcaggtggctgaggcaggagaatggcgtgaacccgggaggcggagcttgcagtgagctgagattgcgccactgcactccagcctgggcgacagagtgagactccgtctcaaaaaataaataaataaataaataaatgcctgtcaagcatggttgctgggcagtggcagtaggagtaagagggaaatgattaacttataatttatatatctttatattgttttactggtttctacaagtatatattattccataattcttaggacatcaattaaagaaaaattttactaggaaatgaagatgttcttttttttgttgttaaacacgagctttgaaaaagtgtcttcctctcatttcatttttatgtctgtcttttgctgcagcgctccgcagacctcaatttcagatcgttgtgtataatgctggtttcataaacacctttataaatcagttttaaaaataaaggccaaaagcttatacattcaaagtgcctctggatttgcaactaaaacatccttaatcttctttaaataagctataaaaactaagcgagagatagtcattaagaaaattgatttaaaaaattcttactaacgcaatctgtaagatagattagaaaagtgcattagctcacataacattttatcagcctgtaaaattttccctagctttctctgctcttaacagtgctatagcaatgataaatctccaggaaatttatcagaagaataagaaaatgatcatgtttttgctgtgggttgcagttttcatttgtattacctttcatatttattgaatgcttgatttctttaagatatttctgaatttctcataggacctgaaactcctggccaaggccattttcattaatttggttcaacagatttatatccatagtgtgtactatgtgctagatactatgccaggtgtttgaagaaagaaaatgggaaaattaaaaagaaaagaaaaagcagaggaattatcaatcactagatatcaatctagtaagaaaagtaaaacattttcaaaaactatataatgtgctgatggtaaagccacaaagactagacagtagattccatttgagctagttgtaagggtggtaagattgagtaggagtttggcaggcaaatgagataaggaactgtattccagatagactggaagtgtgcagaataacaaggaagtatagaagagcataatgtgattgaggaagaaaatgtagttggtgaggatgtagtctgtagtttctgatggacagggagtagaaacgacaagaacacaggctattttaaaattaaatcacaggttctttttcaacaagagtgtcatttcaatagggggaaaatgatattttcaagtgatgctggaactagatattcacacgcaaaagattagtcagattccttctctagaccacacacaaaaattaattccaagtggactgcagacctaaatgtaaatgctaaaactacaagactcttagaagaaaacaaaggaataaatatctatgatcttgggtttagttaggcaaagccttcttagagatgatctaaaaaatataagcaacaagataaaaaatagataaattggaatttatgaacagttaaaaaatttgtaatccaaaggacaccatcaagaaagttaaaagacaactctaagaatggaagaaaatgtttgcaaatcatagtatatctgatagggaattgtatacaagactatataaagaattgctatacttcaacattttaaaaagacaaataactcaattttaaaatgggctttaaaaagtgaccataaaggaggaattgaacagatatttcttccaggaagatacacaagtgaccaataggcacacaaaaagatgcttgacatcattagtcattagaaaaatgccaatcaaaaccacaatgagataacaatttcatatccactgggatggctataataaaaaagacaaataataaaaagtgttggtgaggatgtcaagaaattggaacatacatacattgctggtgggaatttaaactggtgcagccattttggaaatagtttggctttctcttcaaaatgttaaacacagaattaccacagggcccagcattccttctaacctgactgttagaaggaaaactaacgaaagaaatgtctttcttgtggcaagtatatacccacaagaaatagaaacatgtccgcacaaaaaccagtggatgaatgttcatagcggcattattcacagtagccaaaaagtgggaacaacccaaatgtccacaaactgatgaacagatcatctctatgtagtatgaccatacaatggaatattattccagaataaaaaagtaaagtatggatccatgctgcaacatgaatgagccttgaaaatgttatgctgagagagtagccagttgaaaagaccacatactgtacgatcctgtttatacaaaatgttcagaataggcaaatccgtagagacacaaagtagactcatggttttcagggactaggaggtaagactgggggggaaatggcgattgattgctaatgggtgagggatttcctttttgtcctgctgaaaatgttctgatatttattacggtgatagctgcaaaactctgtgaatatactaaaaattattgacttatacattttaaatgggtgtattgtaaaccgtatctcaataagcctgtttaaaaaaatctgttatagatctttgtccaagatggccgaataggaacagctccagtgtggagctcccagtgtaatcaatggagaagacgggtgatttctgcatttccaactgaggtatctggttcatctcattggtactggttggacagtgggtgcagcccatgaagggtgagccaaagcagggcagggcatcacctcacccaggaagtgcaaggggtcaggggatttccctttcctagccaagagaagccgtgacagactgttcctggaaaaataggacacttttgcccaaatactgtgctttttccatggtcttagcaaccagcagatcaggagattctctcccatgcctggcttggcaggtcccacgcccacggagccttgctcactgctagcacagcagtctgagatcaacctgcaaggctgcagctgggcaaggggaggggtgtctgccattgctgaggcttaagtaggtaaacaaagctgccagggaagctcaaactgggtggagcccaccgcagctcagcaaggcctacaacctctatggactccacctctgtgggcagggcatagctgaacaaaaggcagtaaaaacttctgcaggcttaaacgtccctgtctgacagctctgaagagagcagtggttctcccagcatggtgtttgagctctgagaatggacagactgcctcctcaagtgggtccctgacccccgtgtagccaaactgggagacacctcccagtaggggccaacagacacctcatacaggcgggtgcccctctgggacgaagcttccagaggaaggataagcctgcaatatttgctcttctgcaatatttgctgttatgcagcctctgatggtgatacccaggcaaacagtgtctggagtggacctccagcaaacttcaacagacctgcagctgagggacctgactgttagaaggaaaactaacaaacagaaaggaatagcatcaacatcaacaaaaaggacatccatagcaaaaccccacctgtaggtcaccaatatcaaagaccaaaggtacataaaaccacaaagatggggagaaaccagagcagaaaagctgaaaattctgaaaaccagagtgcatcttctcctccaaaggactgcagctcctagccagcaatggatcaaagctagatggagaatgactttgacgagtggacagaagtaagcttcagaaggttggtaagaacaaacttgtccaagctaaaggaacatgttctaacccatcacaaggaagctaaaaaccttgaaaacaggttagatgaatgggtaactagaataaacagtgtagagaagaccttaaatgacctgatggagctgaaaaccatggcacgagaacttcatgacacatgcacaaacttcaatagccgattcaatcaagtggaagaaaggatatcagtgattgaagatcaaattaatgaaataaaggaagaacacaagtttagattaaaaaaagagtagaaagaaatgaacaaagcctccaagaaatacgcgactatgtgaaaagaccaaatctacatttgattggtgatggggagaatggatccaagttggaaaacactctttaggatattatccaggagaacttccccaacctagcaaggcaggccaacattcaaattcaggaaatacagagaacaccagaaagatactcttcaagaagagcaaccccaagacacataattgtcagattcaccaaggttgaaatgaaggaaaaagtgttaaaagcagccagagagaaaggtcgggttacccccaaagggaagcccatcagactaacagcagatctcttggcagaaaccctacaagccagaagagagtgggggccaatatctacattcttaaagaaaagaattttcaacccagaatgtcatatccagccaaactaagcttcataagtgaaggacaaataaaatcttttacagacaagcaaatgctgagagattttgtccccaccaggcttgtcttacaagagctcctgaaggaagcactaaacatggaaaggaacaagcagtaccagccactgcaaaaacatgccaaatggtaaagaccattgatgctatgaagaaactgcaacaatttacaggcaaaataaccatctaacatcataatgtgaattgaattcacaaataacaatattaaccttaaatgtaaatggactaactgccccatttaaaagacacagactgccaaattggataaagagtcaagacccattactgtgctgtattcaggagacccatctcatgtgcagagacacacataggctcaaaataaagggatggaggaagatctatcaagcaaatggaaagcaaaaaaaagcaggtgttgcaatcctagtctctgagaaagcagactttaaaccaacaaagatcagaagagacaaagaaggccattacataatggtaaaagatcaattcaacaagaagagctaactatcctaaatatatatgcacccaatacaggagcacctggatttataaagcaagtccttagagacctacaaagagacttagactcccacacaataataatgggagactttaacaccccactgtcagtattagacagatcaatgagacagaaggttaacaaagatattcaggacttgaacacagctctgcaccaaatggacctaatagacatctacagaactctccatcccaaatcaacagaatatacattcttctcagcaccacatcacacttattataaaattgaccacgtagttggaagtaaagcactcctcagcaaatgtaaaagaacagaaatcacaacaaactgtctctcagaccacagtgcaattaaattagaactcaggattaagaatctcactcaaaactgcacaaccacatggaaactgaacaacctgctcctgaatgactactgggtacataatgaaatgaaggcagaaataaagatgttctttgaaaccaatgagaacaaagacaaaacataccagatctctgggacacatttaaagcagtgtgtagagggaaatttatagcactaaatgccccaagagaaagcagaaaagaactaaaatcgacatgctaacaacacaattaaaagagctagagaagcaagagcaaacacattcaaaagctagcagaaggcaagaaataactaagatcagagcagaactgaaagagatagacacaaaaaacctttcaaaaaatcaataaatccaggttttttgaaaagatcaacaaaactgataaactgctagtaagactaataaagaagaacagagagaagaatcaaatagacacaataaaaaaatgataaagggaatatcaccactgatcccacagaaatatgaactaccatcagagaatactataaacacctctacataaataaactagaacatctagaagaaatggataaattcctggacacatccaccctcccaagactaaaccaggaagaagtggaatatctgagtagaccaatcataggctctgaaatttaggcaataattaatagcctaccaaccaaaaaatgtccaggaccagatggattcacagccgaactctaccaaggtacaaagaggagctgttaccattacttctgaaactattccaatcaatagaaaaagagggaatcctccctaactcattttatgaggccaacatcatcctgataccacagcctggcagagacacaacaataaaagagaattttagaccaatatccctgatgaacatcgatgcgaaaatcctcaataaaataccagcaaaccgaatccagcaacacatcaaaaagcttatccaccacgatcaaggtggcttcatccctgggatgcaaggctggttcaacatatgcaaatcaataaacataatacatcacataaacagatccaaccgcaaaaaccatatgattatctcaatagatgcagaaaaggccttcgacaaaattcaacttcccttcatgctaaaaactctcaataagctaggtattgatggaacatatctcaaaataataagaactatttatgacaaacccacagccaatatcatactgaatgggaaaaaactggaagcattccctctgaaaaccagcacaagacaaggatgccttctttcaccattcctattcaacacagtgttaaaagttctggccagggcaatcaggaaagagaaagaaataaagggtattcaataagaaaaagaggaagtcaaactgtgcctgtttgcagatgacatgattgtataattagaaaaccccatcatctcagcccaaaacctccttaagctgatacgcaacttcggtaaagtctcaggatacaaaatcaatgtgcaaaaatcacaagcattcatatacatcaataacagacaaacagagagccaaatcatgagtgaagtccctttcacaattgctacaaagagaataaaatacctaggaattcaatttacaaaggatgggaaggatctcttcaagaactacaaaccactgctcagcgaaataaaagaggacacaagcaaatggaagaacattccatgctcatggataggaagaatcaatatcatgaaaatggccatactgcccaaggtaatttatagattcaatgccatccccatcaaactaccaatgactttcttcacagaactggaaaaaaattactttaaagttcatatggaaccaaaaaagagcctgcattgccaagacaatcctaagccaaaagaacaaagctggaggcatcatgctacctgacttcgaactttactacaaggctacagtaaccaaaacagcatggtactggtaccaaaacagagatatagaccaatggaacagaatagagccctcagaaataacaccacacatctacaaccatctgatctttgacaaacctgacaaaaacaagaaatggggaaaggataccctatttaataaatggtgctgggaaaactggccagccatatgtagaaagctgaaactggatcccttccttacactttatacaaaaattaattcaagatgaattaaagtcttaaatgttagacctaaaaccataaaaaccctagaagaaaacctaggcaataccattcaggacataggcatgagcaagcacttcatggctaaaacaccaaaagcaatggcgacaaaagccaaaatagacaaatgggatctaattaaactgaagagcttctgcaacagaagaaactaccatcagagtgaacaggcaacctacagaatgggagaaaagttttgcaatctatccatctgacaaagagctaatatccagaatctacaaagaacttaaacaaatttacaagaaaaaatcaaacaaccccatcaaaaagtgggcaaaggatatgaacagatacttctcaaaagaagacatttatgcagccaacagacacatgaaaaaatggtcatcatcactggtcatcagagaaatgcaaatcaaaaccacaatgagataccatctcacaccagttagaatggcaatcattaaaaagttaggaaacagcaggtgctggagaggatgtggagaaataggaatgcttttacactgttggtgggagtgtaaattacttcaaccattgtggaagacagtgtggcgattcctcaatgatctagaactagaaataccatttgacccagcgatcccattactgggtatatacccaaaggattataaatcatgctactataaagacacaggcactcgcatgtttattgcagcactagtcacaatagcaaagacttggaaccaacccaaatgttcatcaaggatagaccggattaagaaaatgtggcacatatacatcatggaatactatgcagccataaaaaaggataagttcgtgtcctttgcagggacagggatgaacctggaaaccatcattctaagcaaactgtcacaaggacagaaaaccaaacacggcatgttctcactcataggtgggaattgaacaatgagaacacttggacacagggcagggaacatcatacactggggcctgtcggggagtggcaagctgggggagggatagcattaggagaaatacctaatgtaaatgatgagttgatgtgtgcagcaaacaaacatggcacatgtatacctatgtaacaaacctgcatgttgtgcacatgtaccctagtacttaaagtataataataataacaaaaataaacaaaaatctgtaacaaaaaaaaaatctgttataccaaaacaaccaaaaaacaaaaaacaaaaaccccagactcagagccagactacttaagttgaaattgtgctctttcattacccattataaagttctgagctatttaacttctctcgccagtatctccatcaaataaatgaatgattacttccagctgagatcttcagggaaatttttacagaggtggaatttgggctggtctcaaagacagtgctcttcaggattgtgagatgaagaccttaaaagggaggagaaacgaactagtactttgaaaacaactattgtgcaccagggtctgtgctaagcattctgcgcacattattgccctctgctttgtagttatgaaaaaaggaatcctgaaagtgaaatcatttaaagtgaccaagtaggggttcaattgcaagcccagggtctcctgtgtctggcctaagcaacacccgtgaaaagaaaagctcaggcagctggtggaggaagcaaggtaaggtttctctggcagcgtccgggggcagtgagtggcaattcgattttttagaatctttaatggccagacaaattttctgaatttcatcctgtgggtaatgaggagccatggaagtgctcatcaaaaaaagacatagcggtagtggtaggcatgtatttttacatgtagaagtccaattcatcttgtaacttattaggcagctcaactctaactttgagaaaacttgcaatgttactcaaaatagacatagtctgacaagctggcctttggtaaattttccagcagagaaagtggtttgcttccacaattaaaagatgactttaaaaagtgaattaaaactctgtgtctgaaagtttgttactttgagctgctgattgttactgaatgacagactgattttgatgtgaatgttgatgctaagaatagatacttgaagactttcaatctaatgaaaactctgagaagatgaacaaaaactgtagcctcactttatgcaagagcttagtgaaagggaaaaccattcaaatggtgtatatgcgtttatttcatggtgccttctttcacaagttgaggaggcatcatgaatgccttgcctctgcctcctatttggaaagagcttctttcaaagccaccaacaagcatagtgtccagcaagcatctgaagtgcctaggaactgtcagacctggcatgccgaggtaggcaccacatagttgacggaacaggtagcaaatgtgtgctcaaccccatcccaggagggaccccaaacttaagttatgctgctacattggtgccctgaagggccagggtgctctttctctctaagccaatggttctcaagggagatgctacaccttctagaatgtgtgcatttgggaaaaaatgaggaggtacatttttgtttattgtaatgattgggatctttcactagaacttagtggccagttgtcatattctgacaatcctgaaaaccaggactggacactgaaggtgtaccctgcattctacatgattgccaaatctactgccacattagttattatctgagcttctctgagactagacccttactgtattttacatacagacagaaagcagtttttacatggttttaatacatactcaattttccagcaatgacactaccatgtaaatggtgggaagactgcgaagtttgctcataactttgtgaagatctgttcaccatcacaggacatgttaccaaggatgatgtcattcatggtattgggaccaccagtttaagacatccgaagtaacctgcatttgtaattactgaaattgttgtttttactgtgtccaaatatatatattctcatttagccattattttaaaatgttgactctgatagtctgtgtttaaaccatttatttatttttgggttatctaggcttttctatactacttccataaattgtacaatttctctagagcttcttgtagtaaagcttccttttcctaatccatccttatttttctgtggcctatggaagaaaattatctctaatgtctttacatatgagactaaccgtatacactgacatgtggtggaatttcaagaatgcatatatgtttttggtgatgctttgtttctaccctgtcctattttataacatgaagttaattattgtgacatcatacataaataaagcccagctcatttgcaagaatatcagacttcctcattttctccacattgacagtgacaacttgtcttagcatctaatcttgactttaattaaggttattttattctgccttctatcacacacttacaagtctgcctgttattactcatctcagccctggtttcattctaattcccccttacctccactctttcacttacctgtaactcttctgccaaatcacttctcatattcttactttttttaaatccaaaactattcattataagcattgggctatttcattatatcttctaatgtggccaagctgagcattatatactaaatacattgtcatttaattataaattatttttctttttatttattacacttgaggcattatattggtttttgaaaatatttgtatttgctatctgtccatttcctttcagaagggtaaatagagtgtacttatttgttttaaaattctttatgttgtattaagaggtcacagtactcctattattatgacaaaatattcttcgtattttctatctgagacaatggaatgtgtcttactcaagattacatataaagaatgagttttcacattttagataaagttagaataccttggcttctccttctattctcagtttatgaacttgtattcaccattaaaatgctttatcatgcatgatttgggtactcagtaaatataacttttaggtagaggtggttatgagagctctgtatagaactaattattatcaataataacaatgcaagtaatagctattatgtattgatcatgtgcaggcatcaaaattaaaagtttccatttattattatctcgtttaacactaataataattatgcccaataggtgcgttgttatccatattaatagacgaggaaaatgagacgtacacagatgggtgccttgtcttaatcacaaggctagttaagtgacagggacctagactcaaactcaggcctctctatcccaaatgcccatattttctgcctccaaaaagaatgttattcagttttgtattaacaaatataaaacataaaaataatattttggattacagaggatggtaggagcactttcaataaatccgttaaggaaaccaataatccctacaaatattttaagtcaagaggatttaaggagggaaagataatataacccacactggtggcacgccagttttcacgagccatgccataaagatattccctttttttccacttgaaataaattcacccaatactatttttcacgagggtcaaaccaaacaacaacttgtgctgttcaaaatggtagccagtagttatatacaggtattgagcattagaaatgtggctagtccgtaacataaaaatagacacatagccaggtgtggtgcctcacgcctgtaatcccagcactttgggaggccgaggcgggcggatcacctgaggtcaggagttcgagaccagcctgaccaacatggagaaaccccatctctactaaaaatacaaaattagccgggcgtggtgatgcatgcctgtaatcctagctactcgggaggcagaggcaggaaaatcacttgaacccgggaggcagaggttgtggtgagctgagatcgtgccactgcactccagcctgggcaacaacagcgaaactccgtctcaaaaaaaaaaaaaaaaaattagacacatagaccaatggaacagaatagagaactcggacataaatccatacatttacagccaactctgctttgagaaaggcactaggaacatacaatggggacagatagcctcttcaatgaatggttctgggaaaactggatatacacatgcagaagaataaaactagactgttagctatcattatatacacaaaatgacttaatatggattaaagacttaaatgtaagacccaaaacaacaaaactgctaaatgaaaacataggggaaatcttcatgtcattggtctatgcaaggatttttttgataaaacctcaaaagcatgggcaacaaaacaaatatagaaattagattacaccaaactaaaaagtttgtgtacagtaaaggaaacagcagagcaaaaagacagcacacagagttagagaatacactggcaaactatgcatccgaaaagacgttaatattaaaaatataaaaggaactcgaaaaactcaacaacaatgaaaaccccaattaaaaaatggacaaaagacgtgaacagatatttctcaaaagaagacatacaaatggccaacagacatatgaaaaaatgcttaacattgctaatcatcagagaggtgaaaataaaaaacacaagaagagatcatctcatcccaattaaaatgtcttttatcaaaaaaacaggcaacacatcagttaaaaagcttctgacagcaaaggatacaattaacaaagtgaagagcaacctacagaatgggagaaaatacttgcaaactatccctctgataagggattaataaccagaatatacaattattaggagctttttaggagcccaaacaactctataggaaaaaatggaataatctgatcacaaaatgggcaaaagatttgaatagacatttctcaaaaggagacatgcagatggcaagcaggcatatgaaaaggtgctcatcctcattgctcatcagagaaatgcatatcaaaactacaatgagatatcatcttaccctagttaaaatggcttatatccaaaagacaggcaataacaaatgctggcgtgaatgtggagaaaagagaactcctgtgtgctgttgatgggaatgtaaactagtacaaccactatggagaacagtttggaagtttctcaaaacactaaaaattgagctaccatatgatccagcaatcccactgctggatataaacccaaaagaaaggaaatcagtgtatcaaagagatatatgcattcctgtgtttgttgcagcaatgtttacaatagctaaaatttggaagcaacctaagtgtccatcaacagatggagtaaagaaaatgtggtacagggccgggcgtggtggctcacgcctgtaatcccagcactttgggaggccgaggcgggcggatcacgaggtcagcagattgagaccatcctggctaatacggtgaaaccccggttctactaaaaatacaaaaaattagctgggtgtggcggcagtgagccgagattgcgccactgcactccagcctgggtgacagagcgagactccgtctcaaaaaaaaaaaaagaaaagaaaatgtggtacatacacacaatggagtactattcagccataaaaaacaataagaccctgccatttgcaacaacatggatggaactggagatcattatgttaagtgaaataagccaggtagagaaagacaaacgttccatgttctcacttatttgtgggatctaaaaatcaaaacaattgaactcatggacatagagagtagaaggatggttaccggaggctggcaagggtagcagggtgctggcaggggaggaaatgaggattaatggatacaaaaaaataggaagaatgaatgagacctactatttgatagtgccacagggtgtgccataataacctaattgtatatttataatcaataataacttaattgtactttttttttgggggggggggacggagtctcgctctgttgcccaggctggagtgcagtggcgcgatctcggctcactgcaagctccgcctcccaggttcgcgccattctcctgcctcagcctcctgagtagctgggactacaggcgcccgccaccacgcctggctaattttttgtaattttagtagagacggggtttcaccatgttagccaggatggtctcgatctcctgacctagtgatccacccgcctcggcctcccaaagtactgggattacaggcgtgagccactgcgcctggccttaattgtacattttaaaaatgaaaagtaatttgtttgtaactcaaaggataaattattgaggggatggataccccattctccatgatgtgcttatttcacattgcatgcctctatcaaaatacctcatgtatctcataaacatatacacatactatgtacccagaaaaatcaaaaattagaatacatttttaaaagacaggcaacaataacagatgctggcaaggatgtggagaaagtagaatttgtgtataaggttggtggaaatgtaatttagtacactatggagaacagcatggaggttcctcaaaaacctaaaaatagagctaccatatgatccaccaattctaccactggatatatatccaaaagaatggaaatcaatatgttgacaagatatctgcagtcccatgtttattacagcactattcacgtagccaaaatgtggaatcaacctaagtgcccttcaatggataaatggataaagaaatgtggtatatatacaccatggaatattattcagtcataacaaaaatcctgtcatttgcagtaacatagatggaactggaggtcattagtttaagtgaaataagccaagcacggaaagaaaaatattgcatgttctcactcatgtgggagctaaaaaagtggatcttatgaagacagaatagactggagattaccagaggctacaaaggatagaagggaggtggaggtgaaaagaagttgattaatgggtacaaatatagagtcagatagaagaaataaataaaacctactattctagattagtaggtggctatagtttacaataatctattctatatttcaaaatagctagaagagaacaatttggatatttctagcatagagacaagacacataattaaggtcatggatattccaattattctacttgttctttacaaattatatgaatgtattaaattatcacatatatgtgtgtaacatggaactgtgtatatctattgcgcatagataaaacatcgtttaataaaaaaatgtggcaagtctgaattaagatgtgctgttaagtgtaaaatacaccccagatttttaatacctattataaaaaagaatacaaaatttcaataatttttattttgattatatgttaaaatgatattttagagatactgggctaaataaaatgttattaaaattattttcacctgtttcttttattaatgaaacttatggataattttaaattacatatttgactcacatttgtagctcacattatatttctattagatggcactgttgtggaatagatgtctttgaaaataactaggcttaaaatcgaatcatgggaaaaatttttttgaatatcaaaagcaaaacattaagcaatacccaatactagagtgttagaaaatttattttattaaagtgttggtcttagtttttcctaccagttaatagacgtgcaaaatttaacacaccatttaaaatctattaacctcagtttctgtaaaatcaagataatagttatattgcttaccttacagggtggtcataaatataaatgattatttgattcattcaaaaaatatatcaaaggtctaacatgtggtgggccagggataccaagaacataagttgttgtaccttcctccatggggtttacaatagaaattacagaatgttacaggggcaatgacggaaccattacaaagtatcttgtgactggcactctgcttagggatcaagggaaagttcagcggaggacttggcctctgatccggcccggtgaacctgaatcagagtaagccaggtagagaagtcaaggaacaccttgtcttcaagtctctgaggtatagaagagcaggatatgctcaaggaaaaataggggtgattaaggtgctgggaagtaaaggaggagaggtagtgcctagtttgcagtgtggacggtcctggttggaaggttctgatgctgggagagagaggagaaaagaggacccacagtcactcgcgagcttttctgatggtgcctatattctaatataattttggaatctttcttttcttcttagagaaaagatgttagaaaaagttagaatacaaatgaacaggatttaatagaatagtatttaataattagtttctagaaaaattatgtggagtgattttttttaacatctgctcagctctttaggttagaacagtgcctcatgaaagggtccacattctcaacaggacaattgcacggttgcctgggggaaggggcagcttcacaaaacaacctaagcctataagaagtcatttaaatctaccaatatttccaaagactgaattagttgccagagattaatgtatttcaaagttatctgctagactgcagtcagtacgataggtgatttaaaattttctatggtactatatttatttatatgaaaatcacaatgaagataatggggtatgaatagtactttcaagattatatgtttgcacataacatacttataaaaggcattttcagaagcaaaaattatggctgctttttaatgtttgtattttctttaatgcaacacagatttgcattaatctcttaaaacagagattgctgtttcaagaacaataaaaataaacattaactaatctcaaaatgatttagaagatgtgggcatactatagaatctaaaaaaatgaaataacgctttattttcaccattaaatttatattacttaataaaacaatatgccataaataaaagtagagagacccattttttaaacctcagacagataaaatcatgttattgaatagacaatttttattgttttccttccaaatcatggaacaaatgagaagattaaaaggatgtttttcagcaaacgtctgttattgacaacaaatggctttgaacaacaaaataaattgatacttcggtgcttctgattgaagaaagtattgattatactaaaggattcttttaacaagataatattgtttctcttttgccaacaaagttcctactaagtattgtgattactttctgctttctggtcataatctcatcttttcaatgtctctcatcctctagaagaactgctcctatctcccagaagacctcaaaagggagaaaccaggaactgctttgtctttagttagaatttgttcaggtctagcttccttcaaagactctctagaagcaacaacagcaacaatctctattacattgggttccagaggaagatgtgaatcaggcagttttaaaacacaagaaagaatcaccaggaatcaccttgcaggagtcaacagtgggtcagggtcacatcctcctgctacgtcacgttccgccttccatctgcgtatgcggaggggccccttcagtatgactaccatattacatctctgctaaaacagagatcagacctcttgcgttctgtagttttgtttttcagagagcattctcttgtgaacactgagtatttacaaggaacattcaaaggagggttcattaactataatcataaaaataatgcttccttgattttaaaaatatggcctgtgtccctgtcatgcccaccctctgagtaacagcagaaatatcatagaaaatggctgtgtatttgccccctctgtgtatttccttattctcttcccccatttgtgatgagttccttcagggaaggcactgtttttcttctatgcattccttgtaatgagtcacaatgcccactcaataaatttatgaatccatacacagtagtagaagtttgtggatggacaagcagtagcaacttagtcaatagtcagccctccatgatattctttggagagtatttgtttagtgaaaggtacacagtcttagaaatcaaacaagaggccaggcgctgtggctcacgcctgtaatcccaactctttaggacgccgaggcaggtggatcacttgaggtcaggagttcaagaccagcctggccaacatggcgaaaccccatctctgctaaaaattcaaaaattagctgggcatggtggtgtgcacctgtaatcccagccactcaggaggctgaggcagaagaatcgcttgaacccagggggtggaggttgcagtgaacctagatcattccactgcactccagcctggatgatagagcaagactctgtctcaaaaaaaaaaaaaaaaaaaaagaaagaaagaaaaagaaatcaaacagaacgagatttaagttccaacttatacacttattgagcaaattaacatttttgacccttactgttttatacatataaagtgaggacgatacttccaatgatatagggttgttttgaggactgaattaatgaatatacataaagaatgtcaaagtctcataatgctttcttggctcatgaaagctctcagtcaatacggatctgtattcctctagtatcttggaattactctcttcaaactggggtattcggcaatgtgcaaagagggccacaaagccaccagataaacacgagatcttcctgctgcatatacgtttcttggtggcacttaactttattaatataacagctattgtttaggagttcatttagtcagcaaatgtttttgagcacctgttgtatggcagcagtctattgggagcaagggataaaatagtgaacaagacatggactttctagcctattggaaaggaagaaaggaagggagggaaggaaagaaggaaggaaggaaggaaggaaggaaggaaggaaggaaggaaggaaggaaactataagttctgacaagtgctctgaagaaatagagattgcagccatagaaactagttggggaaagagtcaacttctttagctagagtgagcagagaaggatttttaaaacaggtggcatttaggtttcaagagaaggagacagccaagctaagttatgggacagcaatgctgaagtcacctgaaatcttaaggccaaatataaatttcatatttgttagtagggcaggttccttgacttctctgctactcaaggctcttcagtagatgtttggggaactttgcccggaagaagtccatgaattccactgcgagaggtaggaatggtggatagaaaacactctccttttccctatctgtatttaagttggcagcttgcaagagctaaaactaagtactcagaataactttcaagggaataagctgatatatctcaactatggagggaaagattgtattttaactagatttataaagctcttaagctttatgtggcacttgcatttcaagatagagattcccactaattaaaatcaaataaaactaaggttcttcttggcacactttgatgctttctttttgcctcatgtggctgtattactacagaatggtaattatctctctacatatatagccataggaaatcacaatttaaaaatcttactaaattactataaatttcatgaaatagttataaatttactttttgaaaggctctggtttcactggaaaaatctagagagataatttaatttaggcaagcttcttgaaggagggataattttatctcactttatctttgtattgctaatgccttgcacagtgcaagggacataataatgttcaacagacacttaattaactaaattgaagttataatttcatattggaattgataaagggtaccaaaaatctcttcggctcagatatttgtcactacaattaaattctagtgaaacagaagaataggtacactccatatagtacatgattttcttcataataattggatttggctagtacttttgatttcctacatactctatacttctaactcttgtgaaattctgttcctgacagatccttctattcttgataatgtgcctaacaaaacgccataacacaatgaagctgagaaggtgggaagtaattatagctcttggaggaaggttgaatagctatgtccgtgaagcgtcttttgaaactgttctaagaagagttgtccctattgccctagtgacattactcagagaaaaaaatatatgatttcttcagatgtgattttattttccttaggttttaaaattgttttctaaaccaaagaaaatttttttacaatctttaaatgaatagtatgttgtgcactaagaatggtacatcaatgtgagattcaaatattcttgacagtgaagaacacagtaatttggctgtagtctcctattgacacatttaaagaaatgataatacatacaatgaaaagaggaattaaaaagcaaattaagtcaaccatcactacttgggttaattttatagtatgtgtatatttaggtatatatttactcttcaaaaataaattaatttttcattccattaagcaaactatagtataatatataacattcatttctgttgtgaatttttatctaataaaggccacagcataataggcataaactgggaggaattatcccactgttgctacagtagatgtttctttcatcactaggctgagatcttttggtcccagtggacagcttaaactgcctagaaaagagtggcattctctcttaatctgtagtgaaagcaataatgactggcctttaaaccaccttattgtgcctgtgcttttctgctggaatctcttttactttgggtttcacattttacccccatcagtgactgagaccagaggaaaatgtgaatcaggcagttttggaacacaagaaaaaaatcacctcacaagggtcaacagtgggtcagggtcatatcctcctactatacgtcacattccgccttccatctttgtatatggaggggccccttcagtctgactaccatattctgttaagggaggagaccacccctcatattgtcttatgcccaatttctgcctccaaagaaagaaaaagtaaaaattaaaaggcagaaatgaaatccacaagcagacagcccagtgccacaccctgggcctggtaattaaagattgacccctaacctaatcggttatgttatctatagattacagacattgtatagaaaagcactgtgaaaatccctatcctgttttgttccaatctagttaccggtgcatgcagcccccagtcacgtgtaccccctgcttgctcaatcgatcacgaccctctcacatgcacctccttagagttgtgagcccttaaaagggacaggaattgctcactcagggagctcggctcttgagacaggagtcttgctgatgcccctggccgaataaaccccttccttctttaacttggtgtctgaggagttttgcctgcggctcgtcctgctacatatctctgctaaaacggagcaaagctcttggacattccaatcaagaagcaatgatggaaagccaaattaggaatgagggcagttgactttacattttacaaacagcagaaaggaatgaacatcaaaagtttaaattattaatgatttaatttgaaagatgaggttaaaaaaggggggatgactgtaattaaaaaacccaaacttatggactgctttgtatctgcatggaaattggaattaggcttctataattctcctttgatttacatgttcagaaaaattgttctcagatatacttcaccaatatttccttctcccagagtgctttccataaatatttatgtgaaaatcgatttgactgtcttctagattttctggcctgcttgcttatttgattttttcccctgccaaatgaagccctgaatgacagagtggttaaacagcgaaatattcaggctgtagtagaccgaactctcatgcacgatacctgaagacccacaggtaagctccacatccaatctaggactattaaaccacttcagagcctccatggctgaacttcctcacagagatgtaatttgttagaaaagtacttgtcatttccacccagaagtcaactacggttgtttcttactttcttgattgtaacttttacatggtgaaaaatattcttttgctataataagttggatatacttataaaatgaagaaaatagacttattattctagttatcagttctccaggggaaatactttgattgtctaaaagcttcacaggctgctcattagtgtaaatcccttttttggtcatttctgaagcgaaacacgttctttgctgatgtaaatgcagtatcagctcctttaattcaagttggaatttcaacaagagagacgaagcacagagggttctacttatgtcataatttactatttggacacattcatatgattttaaaagaggtctgtgcttatttcccacttagctgccaggtggttgagggttatatatagttgaagtcccaaatataaaagtggtcatggacaaaaattatgcatagttgatgctacaagcatttctcagaatggcaagaacaaattctgcttggttgtttagtgggagagctgataggttcggcacactcactaaagacattttcctgacaaagttctagccagtcatttttgcctggaggcccagtgtaaaggcctccttgcaaatctccccaagagctgaagaacagcagatgactatatcccagagatccaatgctcatcctaagcataagtgaagctgagatcttgggtgtctgaataatgaactgaaactggttctcagcagattatagaaaaatgagtgtataaaaatggaaataatgctggcaccaatgcagataagggtagcatcagactattgcttttagaggcattatttgacaagatacttcaaaattgggctttaaagatataaactcagagaaaagtgttaactttcaagtctagcaatacgctatctacaagatatgaagaatacatgcagtggaatcacataaagggctttgaaggggttcctttctatgtataagcatgtaaatgaccgtatgaagtgaggactgatatggagatttcagaatgtcttatccataatgactattcaaatgaaaagtacaacaacagctgctaaagagttggtaagaagtggtgattcaagattggttagctgttagtttacatagtcattaaaataagattccacaaataaagctgccaagtattcagatttatacagaacatttccaaatacaaaagctatacaaataaaccactaccctcatatatgccttattttcaagaggccttaccttcgaagcagatgtttcagtaaaggtgcaatcttttatttaattcctatttaacttacaaggtacatttcaagataaagactggttatgcaaagcaacttctttctgtgtaaaatcaactttacaaaatggagataaactcagcagcatggctgcatgaggaccagagaaaacccaatgaacttttccaattttcaaaatgcaggtcaaattctgatttaacatcatactgtatccatcaactttgcatccatgattcagcaacacttatggcatgtttaaatttatagggatgaggcaaagctctccaaacaacttttatacataaacaggaaaacattttctcagggagacttacccactctttctttgggtctgttatcagagagcacctgtaaaaaaacagtatcactcttaatatctcaaaattataccacttttgtgaagaatattgagtttgagacaaaaaataagattgtaaaattagaatcaaatggcctccagaaatgaaaataaaatgccaactgaggcatgaagattgaatgattttaggaactacacaaatcatcaggaatcataaaagtcatcaaaatactcattcatggggaagacgcattaaatgtatttttctctgacttaagtaaagatttatacaatacaggccttgtgcagtggctcatgcctgtaatcccagcaattcagcaggcctaggtgggagttccaggcttgagccgaggagttcgaaatcagactgggcaacatagcgagacaccctgctctacaaaaaaattttaaaattagccgagcatggtggcatgtgcctgtagtctcagctacttggaaggctaaggtgggaggatctcttgagcctgggaggcagaggttgcagtgaaccgtgatcgtgtcactgcactccagcctgggcgacagaacgaggcaaaaaaaaaaaaaaaagatttacatgataccatgtgtctatttagtaactgagaagaagactaaagtctagttttaatccactgctccagggccctggtgccaccaatagtctccttagtgctaaagccaggccctgcgtcactgtgtctctcagtgacatcacaggccctaactcagctgactactccttccttctgcaactttatccttctggccttctgaatcccatgctgtccctgctgtcttttctacccctctgcttgttccgtatcattttcttggtgggctctccttttgcttgtgcccttcttatatgctgatttcatttacttaagttttattttgtcttgttagggatgggtgctggcccttcttcccttctcactttgcaccttcttccagggtgatctcatgtactttccatccatattctgataaccttcaggtttagatctccaacttaggtctctttccttgagctccaggaaaacagcgattttttttttttttttttttttttttaagatagagtctcactctgtcacccaaggccaggctggtctcgaactcctgaactcaagtgatccgcccacctcggcctctcaaagtgctgggattacaggcatgagccaccgtgactggccaagaacaaactgttgattgcacatttgcctttggacatttcacatcagacacctcaaactctgtgtccaaaactcaacgtcctctcctcccctcccacctcctcctccacctccttgtccacacacacatacagatcccctgtctatgttccctctgtcttggtgaatggtgtttccatctacctgtttgctcaaatcagaaactcaaagatcacccatgactccttcctgtcctcactacatcctgctgaagcctacttccaaatgttgcttgaatccatctgcttcttttcatccctgctgccacctcctgggcaacattcaggtaatacctagaaaattgcaatagtttcctaacttcttagtccgattctagtcttaattctctccaatctatattctcagccagtgtgattccttcaaaatcaatgtgatcacttcaatcttcttaaaatccttcaatgattcctcattactctaagaataaatacagttttgtggttaagataatatgtttagcaatcagaaagacagttcctagccatatgaccttaaaaaagtgaccacatttctctaagcctcatttcctcatcagtaaaatggggttgctttgaggagtaagtacaaaaattcaggggatgtcctgagccccaagtgtagcagagaaaaggtatacagtaaatattggttgattattgtgaaggaaattcggaaaaacagatgcttacgattattaactttttcaaagtatcaggtacacagtattctacaagagtcagtcaggaaagaggcaaaatgatgatgcagttaaagctttgtccttgataccacagttccttcccatcccattgtttgtgtttctccctatattctacgcctgtgctcatacttgccccgggaaaaagcaaatccacaaaagagttggtaagtgacaataagatccacttttcccaaggatattcacatatgaaagggacatcatttgacaataaacaccaataaaagaacttcatttcattttaataaatggtgcaacttcagacatttgtgacacacagaggagaaaagatccctccatatttttaaactaatatcagtggttctgacttggtctggaagcaaatatatttaatgactatttgacctggaataagaaacagagtaaacttagaaagtaaaataagctgtgttacttgaacataataaaacattaagcattattctctaaatacaataatgttctgacaatcatgtaaattagaaataacccagtagaattcttccatttcagctgtttaaaaattctcacttacgaactaagagcaattgctgccgaaaaatttaagcctcacggcttgaaaaggaaacaaaacacagaagtatgctttctcagccacaccttgagatggagtgctaacagagctactcatacattaataataataataataaataatccttggcacaataactgaaagtcagattacttgatttcaaaataaatcaatgcaacccaactgaaataggaattccagagagaatatttgacaaaagtatggccaagtattatcttgtcctaaatgtagaatatttaaaaggtaaacagagtttgaatttgatgaatatatgaatgtatacagaataggaacatttcaagtgcgaggtatcatgatgagataaaaggagaaactaattatctgaaattaaagcaacaaaagttagtgttttgaaaaatgaaaaatatttgaaaaatattactgaagttcaaagatgttagagatattaaaaatgagcccctcatgtatctaccattttagtagtacatgaaacattagaagcagaggcataggggccctcatttcccaggaaaattgatgaggcaaaaaatgaatacataacacccattttccataatatattaattgtaaaacattcataaatgtgatggtgaacatattcttctttatggattatatagcaatattttaacataataatcttcacttaaaatcacaggatgccaggggccagggcaagaaggaatagggagttattgattaattggtacagagttcagttttacaagatgaagagttctggagatggacagtggggttggttgcataacaatctgaatgttcttaataccactgaactgtacacttaaaaatggttaggatgggctgggcgcagtggctcacccctgtaatcccagcactttgggaggacgaggcgggcggatcacaaggtcaggagatgagaccatcctggctaacacggtgaagacccgtctctactaaaaatacaaaaaattagccaggcgtggtggcaggtgcctgtagttccagctactcgggaggctgaggcaggagaatgccttgaacccaggaggtggagcttgcagtgagccaagatagtgccactgcactctagcctgggcaacaaagcgagattctgtctcaaaaaaaaaaaaaaaattggttaggatgataaattttatgttaagtgaatttcataacaattaataaaaagggtcccccccccaaaaaaaaaacactagaagcacacactctattgcaaccccgtatattgaacctcctgctgcttcctacttcaaacccctctgtttggaaatccaaatagaaactctttagaacttagcaatataacacattaagaggatgtctcggccatgtgtggtggctcacgcctgtaatcccagcactttcggaggccaaggtgggtggatcactaggtcaggagttcaagaccagcgtggccaacatgatgaaaccccgtctctactgaaaatacaaaaattagctggacgtggtgatgtgcacctgtaatcccagctacttgggaggctgaggcaggagaatcatttggacccaggagatggaggctgcagtgagctgagccgagattgtgccactgcactccagcctgggcaacagagcgagactcagtctcaaaaaaaaaaaaaaaaaaaaaagaagatatctctaaaatccaaaatgtgacttatggatagacaattttagaaaactgctcctattggggggataattattcatactcacctaataatcctgagattatagttagctctataaacatgaaggaagggtacactttggagcagatgtgaaatgatgtcacttattcactgatgtcagtatagttagatcacgtgtctctcgaccaccagtgggttttctctgggtattgtattcactaaacatttgccgagtgcttagtcagtatatagatacacacatttctagcactatgctaggtgcttaaccctttctgttgtgtaggtggcttggagcaggtaagtggtctatattggagatccaagaactctagaactgtaagaattatctcatggataattcatggataactattagaattatctcatggataattctcatggaaaaaacatgactgtagttttgccatttatcacagaccacagatagcataaaccatgtttgggtggcttcagttccttcttaattagcagtaaattcctttgagttacatttaagggtaatttgcaggccaggtgcagtggctcatgcctgtaatcccagtactttgggaggccaaggtgggaggattacttgaggcagtgagtttgagatcagcctgggaaacatgaggagatcctgtctctacaaaaaaaatagaaaaaattagccagtgtgatagcttacatctgtaatcccagccactagagagactgaggcaggaggatcacttgaaccccagaagttgaggctgcagtgagccagtgttcccaccactgcactccagcctggctggcagagtgagatcctgtctccaaaaatgattataatgtaacagtaaaaaatttcaaaaagtcatttgcctcatttgctgagatcccccagaaagtgttaattttgtaatacctccaaagccatagtagttataaatccatgttcatgcagacagtctaaaaacatcttaggtatttattttatgataaggctggatataaaatgcaattgctttttgaaacaaatgtacccagtaatgtatcctttgcccacatagccaaatatgacagattaaaatacagaactgcgctaagtaaccataaaaacattcagataattttttttgggaggctatgtcccttagggcttgtaatgatcaatcaagtcaatgaataaattaactactattgtactagtcaaactagaaagcagtttcaacacctgctgctcctgaaaaacaaagggcccattttttcctaatgccctcatgttaacctttaaaaccaaaagcagtagataaaaatcccagagtaaataaattcttatgtaaacatggaagctattttattatctgccctttactttattcagaactcacctgctggtttcaaactcaataggttatattcagtagtaaccttgatttgaatattactggataatgtctaagtaacaatgagtagaaaaggttaatcactagattaccactagaaagttagtttccttagacaagtatatgggatatattacacactgagtttggcccgagtaatttatggctgactttgttataggtgaattatatctcaaataaccttttcctaaatcacccttgtcttagtttgtttgcgtgttgctacaaagaaatacctgaggctatatatataaataaatatatatatatgtttatttggctcacagttctggtatcccgaacagctcaaaactgggcaagggcctcaggctatttccactcctggctgaaggtgaaggggaatttgtatatagagagatcacagggagagagaggaagcagaagaggggccaggtgccaggctctttttaacgaccagctttcacaagaactaataaagtgagaactcactcacccctcaacccaagtgagggttttaatctattcatgagggatctgcctctgtgacccagacacctcccattagacacccatctccaacattgaaattaaatttcagcatgagttttgaggaatcaaacatccaaactatagcactcctcatgttagctacccaatagatcatgtacaaattatacataaaaagtatagggtttaaaaaaagaaaataaaatatttcaaagcattgtaatctgtaattgcagagtcattttgacaagacagtcttaaagaagaggttaaccaaactatcagttgatgaagaagtaaaatgaaaatataatgttccttatttaccatactaaattctcactattccctttaaatttgaattcaaaatattgcaagcatggccttgcaggaaagttcccaaaactttctatttctgcaaaaattctatatagtgatttctgtctaattatcaaagctattctttccctgactcaggccgagaaaaggccatactgactcttagctagaaggagggaagagacagggatgatcacaatttcctcacatatgactacgtgatgaaagctaaaaagaaaaaaaaaaccaaaatcactaaaaaagatagattatatagttttaaatatactttttatttttgtttaatcttccctgatttcctatagatctgagatatgtcatgcttattttcattgctatataaaaatctcaataaactttatacataagagtaaaatgaaaatccacttttgtggactgaaaaatatttcagtttcacctatgatatataaatctctctgtttctaaatataaattttggtgtatgtatattagcgttcatgtatttgaaatagaaggagtaatacagaattttagacatttaatctaatgcaaaaacacgagtctttactagttcagtgagtctaaaatgatgctatttaataaaccatagcattttaataagcattcttgacatctggtgctaataaaaaggactatgttttacagttaacatttaaggaaaaaacatgactgtagttttgttatttatcatagatcacagatggcatagcccacatttgggtggcttcatttccttcttgattagtttacataaagaggctacttgttctctctctttctgtgtatattttatacaggatttgggccaagtcccagaaattaatacatgaacaaagaaaggaattcattaaatttaatgtgaagtttctgaaaaacaaaactgattatagactttttctggatccagtttagttaatagattcattctaaaacaaggatccaaggaattttgcatctggaaaaatatttgaagcaagttttctggaaatgcaagaaaccgcaaggacctaaaaacgtccgtctcttgtacaactatgtgccctaggcaaatacttactagtccttctatccaaaacaggttcttccacgagcttgtgtgcaagccagcagctgagcatgatgctgctgcaacacctagacagggatgtaggcttccaggtgctctccttgcctctggctagctcttttccaaccatgaaactgaagtatgggcttcccttttcctacttgctcagactttttgtgttcttccctttagatcctttgctgagtgtcctgctccaacttggacattagacttgagttgtactctgactctcattaaccccaacttaccacttccttacacgttcctctggaaaatgtcatgcttatctggaagcatcagtgcaagagtataaaacatatgtcatatgacttttcactagattttgttagaaggattgaaaattaatgattacatttaccagatagtaataacagaaatagtatgctctaagatgctcaataagacacacagaagctcagactgaaaagacaatagattaatctgtgagaaatggagagatgggagtgttaattagctcaaaatccaacaaattttatcctcagaattctttaattctgaaaataagagagaaataagatatatatataaacaccattagaaagcaattaaatgcagaatttattacaatacagaattaactgattgagataataagcacaattaatttttagaataccttaaagttagtgaaagaggttatgtatgctgttgaaaatctgactagattagaataaaattgagttcttctttaaactaaattatcgttattattattaaatttttattgatacataataattgtacatacttatgggatatgtgatgtttcgatatgtgttcattgtgttatgagcaaatcagattataatagcgtatccagcacttaaatatttatcatttctttttctgagtacattcaaaaccctctcttctagcttttttgaaatatgatacattattgttaattctcctattctccctcctcactacacttcccatcctctggtaaccactattctactctctacttcaatgagaacaacttttttagatttcatataagtgacatcatgcagtattcatctttatgttcctgacttatttcactcaatataatttaacaggttcatccatgttgccacaagtgacaaaatattctttttttatggctgaatagtattccattgtgtatatatactgtatttttaagctcattcaaccactgaggggatttaggttctttacttaccttggctgttgtgaattgtactgtgctaaacacaggagtgcaaatacctctttgacatattgatatcatttcctttggatatatacccagtagtgggattgctggagtacagggtagttctatttctaatgtttttgaggcaccgccatactgttttccataatggctgaactaatttacatttcccctaccaatgtgtaagggtccccttttctccgcgtcttcaccaacatttgttactgtttgtccttttgataatagtcattctaaccagaatgaagtgatatctatttgcatttccccgatgattaaaaatgttgagctttttttcatatatttcttggccatttgtatgtcttaagaaatgtaaagtcaggccttttgcccattttttaattgagtttttgttgttgttgttgagttgtttcagttccctatatattttggatattaacgcctcatcagatgcatagtttgcaaatatattctctcactctgcatgctgtctctttgctttgttaattgttctattgtcctaaaatgctgtgccaaaaaaaaaaaataggttgatgtaatcccatttgtctatacttgcatttgttgcctatgcttttgaagtttttatccaaaaaaatcctggtgtaggatatttttcatggacattttctcctgtgttttctcttttagcagttttgtagttttgggtcttacatttaagtttttaattcatcttgagttgatgtttgtctatggtgagagaaaagggtctagtttcattcttctgcatgtgtttaaccagttttcctaacactatttattgaagagacattcctttccccattttgtatttttggcaactttgtcaaaaattaattggctgtagatccatggatttatttctggatttttgattctgttccatcagtctatgtgtctgttttcatggcagtaccatgttgttttggttactaacacttagaagtatattttgaagtcaggtagtctaatgtcaccaggtttattctttttgcacaatatttctttggctattcaggatcttttgtggtttcatgaaaattgtagaatgatttttctatttttgtgaagaatgtcactggtaatttgttagcaattgcattgaaactgtagattgctttgagtagtacggacattttaacaatataaattattgcaattcatgaacacaggataactttctattttttgtgtcttcttcaatttttttgtagttttaattgtagttatcttttgcttcgttagttaaatttattcctaggtaattttttgtagctattgaaaatggtattgccttcttgatttctttttcaggttcttcactattggcatatagaaatacaactgattttgtatgttgattttgtatcttgcaactttgcttaatttatttatcagttctaatagtttttttgtgtgaagtacggggttttctatatgtaaagatcatactatctgcgaatagggacagcttgatttctactcttcccatttagattccctttatttctttcttctacctgattactctagctaggacttccaggactatgttcaataaaagtggtgaaagtgggcacctttgtcttgtttcagatcttagagagaaagctttcagctttttccctttcagaatgatgttggccgtgagtttgttatgtatggcctttattatgttgaggcatgttccttctatacctaatttgttgagagtttttattatgaagagatgttgaattttatcaaatacttctattgagatagtatgatttttgtccttcattctattaacatatcatgtttaatgattttcctgtgttgatccatccttgcatccctaaaatgaattccacttgattatggtgaatgatatttttaatgtgctgctgaatttggctcacttatttttgttgaggatttttgtatctgtgttcattagggatattaacctgaagttttcttttttggttgtgttattgaaatttagttatggagcctgaatgagatcatagtctaggctagaagacagctctataacaaaaaggttacaatcttatagtcctttaggatcataacttttttgtttagatatacaagacataatggttgcacaagaggcagaagtagtggacatcatgtagagaatcaggggaggtttacagatagtaatatttaagatggctgttgaagaatatgctcattgggaaaacacagggagaggggaattccagggagaggaaacaacatgtacaaaagagaggagcagaagaaagcatggccgtttggggaaatgcaggtgaagtttgttttttgtttttgtatgttttttaaaagagacagggtcttgctctgtcccccaggctggagtgcagtggtgcaatcatgtctcactgcagtgtagacctcctgtgctcgaggaatccttccacctctgcctcctgagtagctgagacctcaggcacatgccaccaggcctggctaattttttattttttgtagatggggtctcactatgttgcctaggccagttttgaactcctgggctcaagcaatccttccacctctatctcctaaagtgctgaaattataggtatgagcccccatgcctggctgaaatgcaggtattttggaattcctgaaatgtcagttatagaaaagagtggaaagtgatagggtttaagagacagacgtgggctagataataaaatactttactatgttaatgagttgagaacaatttctgtggtgatgaggactctaaaaatgtaagttttataatctagaagcaacatgagggatggactgggggtggaaaggaagagatcggacacaagtcaggggattgttgccataaactatgactaggtgaaacatagggcccggactagagtatgtatacagaaagggtgtcttggatggttttcaggttttggctgagcacctggttcatgttgacaaagggagtaacaggggaggtgtacaggggtttggatcatgagaaaaggagttttacttttatacacattgagtttgaagtgactatgagacactcagttgggtctgcatagagaagccggagctcaggaatgtggaatatcaatgatgttttagctgtaaaagacgctgagattgtttaaggaaagtgtggttataccgagaataagagaggtaaaggcaaaaatcttggcatgatagcatttgtgaagttgaagtaagattgaagaagagcagccagagaagaaagtgatatggtatataacaaaaaagggaagactttaatcagcaggaataggttaatagaaaaggactgaaaattgatacctctgaagtcactaaaagttggtaattatgaagtgaccttggcaagagccagaagacagaaattagaataaaataaattaaggaataagtgggaaataatttacttcaagaaactcaatcagaaagattgaaggaagcaaaaatgctggccttaggaggtaccttgatgaagggcttttgtaatttagaggagatcaggagatctcagtatgttcagggcctaaggagaaggagctagtcaagaacacaggtgcaaatacaagggaacaggatttctggaatggacccaggggcacgaggtctgctggagaaggagatgaggagggtgtggataatgacagtctggccatggtgggcagccaatagttgcggggcacacatgggaggaactctcagttctctggggtatgaaggccagataaggaagggctggagctggagctgggggcagttgtgggggtgggtgtcaggggaaacctattttccatctgagaggcaacacagtgttttcctctgccgcactgttgtagtactcagactagagcttcatgcttaaatactgcctccaactagtccctagttatttcacaaacctgtcttctgtcctcatgcaaatgtgagtactagaaattaatatttctccttctctattttccttaagacattattgtatattagaaagacttgagtttctgaattagattcattgggtttgagtcttgaatccaactcttactagttatatgcgcttaggcaactcttctccattgtctgaaatttagattccttacatataaaatggaggtagtaatatagacctcataaaaatgtaaagattaagctaaaaacttgtgtaccatctctcatccataacatggaggcctagactgggcacctgatatgctaaatctatgcataataaacaaatgagtaacctggaacagcgatgtatatcaacatgaaaatgtcttttcttcaactattatattcagtttcatttctaactttaaaatatattgcctgacattaaagaaactatgggaaagggtcattctattacattccaattttgtccttcagtaatcacagctgccacctcacttttaggtgtgcatagcaagaaatccaaatcaagagcttgggttgggtattaccatgtggcaggcctccttgggcaacatcccactgggtttgagtatttcataggcatatttgccttggcctttagtcttgttttcatagctcaatagtgccagctttcaagattatacaagattgtagtgacacattttatttaatgcttcattttctttataagagtagtttttggctaaaaaccaaacaaacaaaaacaacaacaaaacatgctatgcttcataagcctcatgcctcttggtccctggcttgttcagctgaatatacgccaatagagaataactgggtcaccaagttctggacacatcgccctggaaaatgtcagatgttggatggtctattcctttctctggcaccagctcaagtaacttcatgaataaatcctaagtgctttaagaaataaaaatgactcttaagaacatgttttctttcaagtatagagaaaacactggtgatgttggcttttcttttttagcatcctttttcattttgaatttgaaagccacagaaaagccagttgtttaaggaaatcccaataagagatgaagtatatgagatagtaataataacatagagccactcttttatctgtgtaaatggaagtctaggcctttaaaactattattgaccaaaacatagtttaacaacatttttagacaaaacacattgctgcatgctaccattttaaaaagaagataaaaacattctccaaacatgaaaaatgtttttaaaaaagagtgtgtaacagggaggatttggggccctgctaattcagcatttgaaaagaatggtctgagttgttgcttctctattcttgcaacttctgcacaaaggtgctgatgagtagtgaagagataaaaggtacatagcagaaagaaaaggcttaaaaagtaaaactgatagttcgtgatgtgagacccacaagctaaacagacagtccttgaataatggaaagatgatttttgtgtgtgtgtgtttacttaatgtctcatctcctaacaactcaaagggctttctacttgtggaggctatgagaatgcactgttcagatattttgctacagggtgcttctgcctctgtcaatccgtcatcctcctgatgtgaagaacacacttcctgcaggctgctcctgcccagtgaatgaacttggcaggaggactgatacagactgtttccagtgagaggtgggacacttcctataggtgggtttggctctgggaatctccactgatcaggctaagctttcttggaactgcactgtggtctgaaaaccctccttctctccctccttccatgagtgtcaggcatccattgcagtctggaggctcttcccaactttcctttctaccttccctaagaaatctcttgcacatctaatcctatcttcgtatctactcttggaagacatgaactaacatattcatccactattttagttttgctttatcaccataggcagttacttatagacagaaaaattgaggcaaaaaaagatttaataaattgccaaaggagatacgataactcagtggcctgtctgagctctttcttacgacctgaggcttctgattccctataatctttcatttaacagatatttattgaatgactattatgtggttggctctagagcttatcctaagaatatagagctcctgttgaaaagttctatgcaagagagtggcatgcttagatttgtgatataatcagatcattttgctaaaagtagaaaacgaatgaaggggagcaaggccagattagaggaggccagtgtggaagctgttgcagacattcagagaagagatgatggcagcatgtgtgagagtagaagaggcaaggaaatgtttaataaggaaaattgagaagattggtgactcagtagatacttactctgcaccaggccctggcctacactctgggaaggcagagaataaaagacatattcccaactgtccagaaggatttggctggcttttgttcaaagatatgtaagtaaaggaacttttaattcaccccagttgcttaaagcccaggaacataatggaaaacaggagggaaaaagtctccaacaacaataaaaccagaatatggccataagcctaaaccacagactgtgacacacagaagccatttatggtggaaaggtctgccaacaggaggatgctgagagcagacacaagcctcagactctgaacaggatgcaaccatctccaaaagtaagtgtcacgatagtggaaagtctatccattatcctttgaccaggaaaaccagtactaagagaatttgagagaggcagggagtccccttatgtatagttctctaacacaaaaggaagtcaggggaggtggggctaagacaggctgatgccccatattaccttttacacccagaagtgaagccaggctgaaggacagaagggaataatcaagtatcagatcttgagacaaagccttgtgatttaccgggctttagtttgaatcaaactgccttctagaacaagagttacaacaagagcctgccagctaaatctggctcattgcttatttttgttctgttgtgagctgggaatgatttttacattttaaatagttaaaaaaaaataaaaagcggccaggcacggtggctcacgcctgtaatcccagtactgtgggaggctgaggtgggtggatcacaaggtcagattgagatcattgtggtcaacatggaaaaactccgtctctactaaaaaaacaacaacaacaacaacaaaaattagccgggcatggtggcgtgcatctgtagtcccagctactcgggaggctgaggcaggggaatcacttgaacctgggaggcagaggttgcagtgagccaagatcgcaccacggcactccagcctggagacagagcaagactccgtctcaacaaaataaataaattaaataaataaatacataaataaataaataacaacgaataatatttcatgacaagaaagtcatatgatatccaaatttcaatgtccatgaataaagttttattggaacacagccatgagcatttgtttatatattgtctatggctgctttcaagctatatatgtatcagtgtgctagggctgccatacaaatatcacagactgggtggcttaaacgacagaattttcttttcttttcttttctttctttgagatggagtctcactctgttgtccaggctggatagcaatggcatgatctcggcttactgcaacctctgtctcccgggttcaagcaattctcctgcctcagcctcccaagtagctaggattacaggcgtgagccaccatgcccagctaatttttgtatttttagtagagatggagtttcaccatgttggccaggctggtctcgaactcctggcctcaagagatctgcccccctcagcctcccaaagtgctgggattacaggtgtgagccaccacacctggccagaaattaattttcttacatttctggaggctaggaagtccaaggtatcagcagtgttgttttctcctcaggcctctttccttggctggcagatgaccacctttttgctgtgtcctcacatggccttttctccttgtaagttttcattcctgtgtccttctctttttctaaggacatcagtccatatggcacagcccttatgaatgggatcggtgcctttgtaaaagacacaccagaaagctaccttgtcccttccactatgtgggaatacagggacaaggtgccatctatgaaccagaaagcaggcactgaatttgctgtaccttgatcttggacttcccagcctccagaattgtgagaatggactaagatgagggaaacaattccatttgtaacaggctacaatgacacagttgagtagttgaagcagaaactgtaaggttctcaaagcctaaaacatttactatctggctctccaccaaagaaatttgccaatgatgtccaaaagtgagagaagacttgcccccagggcaaaggaactaaaagatttggtgacagagtgtttgtgacaagaaaacaaatttccccagtgcatttccacccaagttttaggctcatgttattccttagcaagcaggatgtcaaatgactgtggcaaggaggatagatatggaagaagaaaatccaacatacagaaaattggctttcctgaagaagcaatcaacaatcagaacacaaaggtaattcagtcagtaatggaacttttgtgaaataaacaaccactttatttgttgtttgatggctcccactgtcctccagaaaatctaatacaagcaatgccaagtttcagtggcatcactgatattcctctctaaaggatgaatcatacaggcatccagaagaaagtcctcaaagccagaaaagaactttcgtttacaaagatttgggggaaatagaattggaattaaaaactgtctgcccatttaagttattctataagcctgaaaacaacagatagacgatattaggagtgcaagaattcaggaaacatccaatacacctgtcttagtccattcgggctgctatactaaactaccatagactgggtggctcataaacaaacttctttctcacagtccgggaggctggaaagtccaggatcaaggtgccagcagaattggtgtctgctgagtgcccatttcccggtttatctttttgctatgttccaacaaggcagaaggggcagggatctttttggggcctcttttacaagagtattgatcccatcataagggtttcattctcatgacttaatcacctcctaaagcccccacctcctaataccatcatattgggggttagatttcaacatatgaattttgagggtaacataagcatttggtatatagcagtaactccttaaaaatacaaagattttgataacaaaaactgctaaagggaagatagaaaatgaaaacttaactaagacatggagaagccatgatacaagaacaggtggtgagcatcaaactcatttaaatatagaatcacagcatttccatcatcttacatggttatagtttctgtaattatccttcacaccattacttaggtttttattctgacaatgccaaagtaattatataaaaacaaaactcaaaaagtgcaaagaaggggacgttggagaaggtgttaatgtgctcatttccttatcttttataagaggaagttaaaagttatcacttaaagttgaaatatataggtttttttgtttgtttgttttttgttgtttttttttttttgagacggagtcttgttctgtcgcccaggctggagtgcagtggctcaatcttggctcactgcaagctctgcctcccgggttcatgccattctcctgcttcagcctcccgcgaaatatgtagtttataaaagcataacaaactcaactgcttagtgtttttcatgttttcagcaaggaatcttttataatctggtttctcctgggtagagaaacttttaagtttagcaattcttttagtctcactaggtgcttcttcttatctccaaataaaaataaaatataatacattatgatgatgataacatgtagattcatcaaggctgctgctaacacagacagggtctttatgtaaattagaatccagcaattcctgttgggaaacaaattatatattctctctctctctttcttggtagatggattacaaaagggcatcttcttgctactgacaaatgtgtccggatttcagaccccattcttcctctgggcgcttctgagtgaggaacaatctgcacaacatgtttacttttttttttttttttttttttggagatggagtctcactctgttgcccaggctggagtgcagtggtgcaatctgggcttactgcaacctctgcctcccaggttcaagtaattctcctgcctcagtctcctaagtagctgggattacaggcacacaccacaagcatgatctacccaccttggcctcccaaagtgctgggattacaggcgtgggcacctgtgcccggcctattattattattttaatcttgctgtcttttctcattttttacagcctattgaggtacaaatgatgtaagataaattgcatagatatagtgtacaatttgataagttatgatgtactatatccatgaaactaccaccataatcaaggtaataaacatctcttccctccaaaagtttcctcatgccccttttccacctctcccattctttctttccctcccacctccagcacccaagtgactaagcatgtgccttctctcgctatagatcagtttgcattctttaaaattttgtataaataaaataatacagcatttattctgtttttcctggcttctttcatttagcataatgcatttgacattcattcatattactgcatgtataattagtttgttcttctttattattgagtagtgttctattatttagagatagcacaatctgtctactcatttgtctgctgatggacacttaggttgtttctaggtttttgctattacaaaaaagcttctatgaacatttctgtacaattctttgtctagatattttcttctttttctcatggaagtgggaaggtgaaatcgtatgataggtgtgtttactttttaagaactgccaagctgtgcagattcgtgcttccatattgtgctatgttccttttgcctaaaggacttcctttaacatttattgtagaacaagtcttctggtgctaaattttttattattttgtatgtgtaaaccagtcattatttcatgtttatttgaaatatattttttctggatatagaattctagcttgacactttctttttcaggacatagacttattgctccaatagcttgcattgtttccaaagaaaaatgtgatgccattctaacctttgttcctctgtatgtaatatgtctgttttcctctggctgaactaagatgatctctttattattagtgttaagtaattcctttataatgtgcttcttagtgtagttttcaaatttcttacactcggagttcactgagctttccagttctgtgggttttttcaaccaatttgtaaaatttaggccattatgtcttcaactatttttttctgttttcccctttctttattcctttgaggattctaattatgggatgaaggtcaatggtaaaaagaaagattgggccgggcacgatggctcatgtctgtaatcccagcactttgggaggccaaggcaggcagatcacgaggtcaggagatggagaccatcctggccaacatggtgaaaccctgtctctagtaaaatacaaaaaaaaaaaatagctgggtgtggtgccacgtgcctgtagtcctaggtactcgggaggctgaggcaggagaaccgcttgaacctgggaggcagaggttgcagtgagccgagatagtgccactgcactccagcctggtgacagagcaggactccatcttaaaaaaaaaaaaaaagaaagattgtttctgggccatggaattaggttgatattttacttcctcctttgtcttgtacatatttcttaaattttaaatattgacaatgtttcccgcttatttttaaaaataactgacaactcatttcttgaatagagaaattcttctcccaaattaaaaaataaaagtcattaatatgctacattttttttctagatttctaaagcatcatgtagaatcaactcaaaaaaaacaaaaaaaaaggtgaccaaaatgaacaacatctttcttgcactcaactaaaattgccagttcttatattttaaagctatattatcatttttgaaattggcaactttaagcctgctcaaagatataaatgtgtgtgctattcatacaatgagatactactctgtaataaaaagaaatgaattattgatataagcaacaacatacatgaatctcaaaataattaggccaagtgaaataaacaagacaaaaagagcacatactgtttaattccatatttgtaaaattctagaaaatgcaaactagtgttccgtgacagaaaggtggtctgtggttgcctggggatgacagttgtgaggaaggagagatcaccaaggggtgtgaggaaactgttgctgtgttggacatggccattatcttagctatgtgatggtgtcctgggtgctggcatgtgttaaaacttatcaaattgtacactttaaatatgtgcagtttattgtatgttaattatacctcagcaaagttgatgtaaaaattcattttacgttaaacacaacaaagcctgtgacatgtctctcttgtaaaatcataaatgggagaaaattaggatatgctgagcaccttctctgtcctaaacaatgctaagtgcttgtgctaagttttgtcatctaatcctcataccagccacataaagtaggtattattagcactccatttaacaaaggaggaaacctagactcagagagataagggttcctcagtggggactcaggtttgtattaggtcttatttcagatttgtgccttttccatagtagcagaggcttctcttgaggtatttttgcctgctaggaatcctaagtattatttatacttgttagtttgtgacaatattcttgcttattatggttttttgcttaaaaataggttacagtttaggctttttatcttgtagtgattttttacaggggattaaagatagagatgatatatatgaatttgtaatactggtttttctttgtttctgattgtcatgatctgcatatttatgcaaaatttaaaactgggaatagacacactttttagaatggcaagtagaaccaaaaaaaaatctatcctctgaagaacataacttgcccatacagtcttaaaagtccagaatagtttagttagcagcaatctccacatagttcattttgccacaaaatggaactatatgattttctctctaatttttaaattataaacatgcaaccacaatgaagaagaaacaactttgaacttgtcttctctccatattaacactttccagcctctctcccacctctctctcacaaaccctgcactccgccccatctgttctattctatcaaccatttctctctacatatattcgtttattctgccatttgcctctgaacttgcacttacgttactctgtcttcctgggaatgaagtccacctttaaagtgtcaacattctttaaagatttgtttgaatcctcccactgccattgtgtctttcttgttcatcccgaccaaaaacaaacagctcactttccccagtctttgaaatatttactttctgtaccattcacttaccctttacagatcatataccacattattagtctgcatgctgcttttactctttaatatttgtgttagtcagggttctctagagggacagaactaataggaaatgtgtatatatgcaggggagtttgttaaggagtattgactcacacgatcacaaggtcaagccccatgataggccgtctgcaagctgaagggcaaggaagccagtccaagtcccaaaacctcaaaagtaggaaagccaacagcacagccttcagtctgtggctgaaagcctgaaagcccctggtaaaccactggtaaaagtccaagagtccaaaagctgaagggcttggagtctgacgttcaagggcaggaagcgtccagcatgggagaaagatgaaggcgggaagactcaggaagtcagctccttccaccttcttctgcctgccttatcctagtcatgctggcagctgattggatggtgcccacccagattgagggtgggtccacctctcctagtccactgactcaaatgttaatctcctttggcaacaccctcacggacacacccaggaacaatacttagcatcattcagtccaatcaagttgacaccggatcactcaatatcaaccgccacaatattttaaattgttggaaggttagagtcccatgatatacctctgtatctctcaaaatgcctagttgagtgctttccatttaaatggtcaatacatatttggtgtctaactgaataagtaaatagtttgcaaatctctggaagtgatgcagggtaggcaagcctccgaattggtgcttagcttgggaaggttcttgattttgcccaggaaagaattcaagggtgagcctgtggtgttagacagcaacttttattgaagtgccagagcacagcaacaacagggatactggtctttgtggagcagggctactccatagacagtgtgcccagaggaacagctcagaggcagttctgcagtcagatttatacccacttgtaattatacacaaattaaggaagagattatgcagaaatttctagaaaaaggtgataacttccaggttgcccagttgttaccatggaaagggtccataacctccaggtgctgccatggtaatggaaactgacattgcgcactggtggatgtatattttggaaacttgcttctgccctgtccctactttagctagttctcaatttggtccagtgtccaagacctgcctccagagtcgagtcctgcctcctacctcagaagtgccaagaaatgttagagaaagcagagaccagctatatagaactcactagggtaacatagttggaggtctggagtgtgctaaccccacttcatgtaacctggtgggaactagtgctttatcctttttgggtgtcaaaatatatgcataggctgggtgcagtggctcatgcctgtaatcccagcactttgggaagcagagatgggtagatcacgaggtcacgagttcaagaccagcctggctaacgtgtcaaaaccccatttctactaaaactgcaaaaattagccaggcatggtggcgggtacatgtaatcccagctatcaggaggctgaagccagagaattgcttgaacccaggaggcagaggttgcagtgagcagagatcgtgccattgcactccagcctgggtaacaaaaacaagactccgtctcaaaaaaaaaatacatatatatatatatatatgtatatgtatatgtatatgtatgtatgcatagcattaaaacattagaagatcaatggtgactgaactatatattcatcaactagtgtgaagtctgggatttttacttcaaagtaagccagtagggggctgagagagaatattgatgaaacaaaactagtcatgtgttgatatttattgaaatgggagatggataaagggtattttattatactagtctctatgatttggtctttatttgaatgttccaataatatttttaaaagatttttcattaaagcattaagatatgtacaatgaagaacaaaatattctcacttatacaagtcaattattgtaacacatatgttgctccaaaaccttatttgataagagatgacacaaaggtccatgtttgaaaggaatctgtttccatgcttcattgccctttaaagccaccattgaaagagtggagccctgcactgatcctatgctactattgcataataatactgagcatttctttatttgtttaaaaaatgtattgaggctgggcatggtggctcatgcctgtaatcccagcactttaggaggccgaggggggcagatcacttgaggcaagaactcaagaccagcctggccaacaatgcacaaactggtctctactaaaaatacaaaaattagctaggtgtggtggcgggcacctgtaatcccagctacttgggaggctgaggtgggagaatcacttgaactcggaaggcggaggttgcagtgagctaagatcatgccatgggcaacagagcgagactcttgtctccaaaaaaaaaattgttgaacgcctgctatgtactagataccacatgaggaggtgtagtgcctgcctgcaagacactgccagtccggcaggaaagtcaaactacaagtgccattaaaaccttaggtttttcccatctccataaaagcacaacctcaagccaaaatttgggaagcatccttgattctttccttcagttcatatagccaatgtattatcaagtcctgtcaactgcttcccctaaaatctcccactttcttcttctagcctttatttttactatcttcattgctattttgctattttctttctaccatttaccatgatctgttgcctgccttacagcagtctcttaattggtcttcttcttttttttttttttttttttttgagacggcatctcactctgtcacccagcctggagtgcagtggcgcgatctcggctcactgcaagctccgcctcccgggttcacgccattctcctgcctcagcctcccgagtagctgggactacaggtgcccgccaccacgcccggctaattgtttgtatttttagtagagacgggaattcaccatcttagccaggatggtcttgatctgacctcgtgatccacctgcctcggcctcccaaagtgctgggattccaggcgtgagccaccgtgcccagctggtcttttcttccgcttttgtatttctatcattcatcttcaaaatacatcagataatgttcctccccattgcctaaaagtctctgataggttcccatggcattcaggatgggacttacaggatctttcctctgtgatccgaactcatatcactctcctcatttgctccactacagactgactggcttacctagaaaaatgacatgcactacgctaagaggcattccagactggctaggaaaaaacatctgccaattacactatatgttacatattgtctttctaaggaaatataccagtccatgtaaggataatgtctattacattaacgagatacatgcactggtatatttccttagaaatatgctatctcattaatgtagtagacattatcaaaaaagtgaaaattatatatacctatatatatgaataaatataataatatgatgtgatgggactctaaccttccaatcacttattgtatgattccagagtccccactgaggaactcttatctctccgagcctaggttttctcatttgttaaatgcagttctaataatgcctacttcatgtggctggtatgaggattagttgacaaaacttaccacaagcacttagcattgtttaggacagagcagtcttaaacagtgctcagtatatcctaattttctctcatttatgatttacaagagatacatattacaggttttattttttaatgtaaaatgaatgttttaaatcaactttgctgaggtataattaacatacaatatgttatgacgggactctaactctccagtaatttaaaatattagagtaaaacttgaaacattcaaatacagacaaaactttagagactagtgtaataaaataccctgcatccctctcctatttcaataaatatcaacatatgactagtttagtttcaatattctccctcagccccctactggcttattttgaggtaaatcccagacttcacactatttgatggacgtatagttcagtaaccattgaccttccaatattttaatgctaagctcctagacagtaattagaaagtatttcagacttacatcctcaatattacacccatgaaatgaatgtgcttactatttatttgtatttcattgtatcttactgaactttaatgtatttgtatactaacatccataaaagtttaaagattgaagttaaaaaaacagtaaatatagactaaaccccaacaaaacaaggaaactaacttagaaaaataccataactttatgttattagttgctatttataaattgctttccaagcacaaaaagcaacatgaatacaaagtactttaagagtcagaatagggcttctgtgaaatcaaaagtctttaaagccacaaagaaatttaagacaatcccaattcagaagggaaacacatacttggcattcttcctgaccagtggtctacataatatcaaataaaaatcaatattttatcaaggatataacttgtgtgtggaaggcaattttttcactgactgggaccacagtgggggttgagggggtggggatgatttggggaggattcaaaaacattacatttattgttaactttatttctattattattacatcctaataataggatgtaatccatctctctcattgtaatatataataaaataattatacagctcaccataatgtagaaccaatgggagacctgagtttgtttccctgcaactagatggtcctgtctgggggtgacgggagacagtgacaggtcatcaggcattagattctcataaggagggcacaacctagaaacccttgcatgcacaattcagagtagggtttgcactcctatgagaatctaatgctgcagctgatctgacaggaggcagagctcaggtagtaatacaagagatggggagtggctgtaaatacagatgaagctttgctcacttgcccaccattcacttcctgctgtgtgatgcagttcctaacaggccatggactggtatttgtccatggtccaggggttggggacctctggtctaagcacagcagtaagtctcttttcagagcgaaatgaggacacttactaaatcttttccaggttgcctgtctttgggttgcatatttaggataagggcataataataatggcgtggtgaccagttggaaatgagtccataggatgagagagctaccatgcgccaggcacttagacacattacctgtactacctatcttaaccttcacaacaatttcatgatgtcattattatctccactttatagatggtatatatatttgatattatgtctcatccccaggtttgctttaaggacatttgtttgaattgctgttcaagggaaagaacagaagaaagaacagaagattgctgtcttctttaggtccagtcacattttgggaaattcttataagtaatcacagttttgttacttaagcaaacctcatggcaaaggtgccaggaataaggcaagataaaattgatgcatcatcttttagcaattgcatttagtcacaggatataaccattagttctatgtgaatggctcccaaaaaggctactaccatcctgaacttcccaggaccccggttctaatcctacctttccaaatgcccagaagcctctcccaaggagatattcttgtggacatctaattcaatattctaaatcggaatttataaatttttctttccattctacttatcctcatgcatacctgattatgattaaagaaattggtatctctacaggcccctgatgtgaaacattttatctttagcttttaccttttactgctcccttcatccaattaatctattgacaatccttgtaatagcaactactatggcttgaatgtgtcccccaaggttcatgtgtcagtcagaaactctacctcaaatgtggaagtgttgagaggtgaggcttcatggaaggtgtttgggccatggggacatttctctcatgggtggatgaatgccattatcatggtagtgtgtttgttatcataggagtggcttccttataaaaggacaagttcagccatctttgcccaccccctcccccactctctctctcatcctctctttgctcttccaccttctgccatgggatggcaaagcaagaagactctcaccagatgctaatgtcttgatcttgcccagatcaagtttccagtgtccagaattttgagaaataaatttctattcattataagttacccagttccatgtattcttttctagaagcacagcatggactaagacagtaaccttctgttctttcttctccatatgagtatttctcaccaacagagtgagagcagaaagtgacatggcaacttccttgctaaggccttctctgccttctccttcatgttccactggctagatccatgggacaacagggccctagatgaaggtagcaccattagaaaaaaggaacttaccttcctgaatattgcacaaaagtgagccactactaactaacaacatatacctcaaactattgtagttgtgttattgtatatttgggggacctacttgttgccacagctagcctaccataatatacatgcttactatgcatcaagcactggactaagcactttatataaattctctcattttcccctaagaataagactataaggaagatattattactattcctctttcacacaaaacaaaactggattctgcatagttcaggaaacttatgcaatgtcacaagtaagtttcagaagcagcatccaacccaggattacctgattccaatgtcccattcttaactcacactagatggccacttcccattataataaatgaaatccagtaattttaagaattaaagttgaggtgctatggtttctctgcctttagattcgcttgagagatgtattcaacattttggctttttaagtcactgcaagtctagtttacatgatatccccctcactctgagtattggcagaaataaacataaagctgaaataacttacatttcaccgaacaaatgtttaaggaatgatatttaccaggtactcccatagacattgggtacataactgtgaaatagagacactggcaaagagacaatattagagtagagggatagggaaattaaaaaaggtattaattgctcataaaaattctgtgaaatggtgagagtagacattattatcccatttaattaagaggaaattgacacacattatttaagattagtctaatctcatacatagactaatgatagaaccagaagtaagatcctggtcacctgatcacagatatcccaaataatccacttcaagcagggtagggacaagggaaaaggatgttcatgagacatgagctgtacagcttttttgtttgtttgtttgtttgttcaatttaaattttttattatactttaagtttggggtacatgtgcaaaacgtgcaggtttagcataggtatacatgtgccatggtggtttgctgcacccatcaacccatcatctacattaggtatttctcctaatgctatccctcccctcaactccccgacaggctccactgtgtgatgttcccctctctgtgtccatgtgttctcattgttcaactcccatttatgagtaagaacatgtggtgtttggttttctgttcctgtgttagtttggtaagaatgatgatttccagctacatccatgtccctgcagaggacatgaactcatccttttttatggctgcatagtattccgcggtgtatatgtgccacattttctttatccaatatgtgccacattttctttatccagtctatcattgatgggcatttgggttggttccaagtctttgctattgtgaacagtgccacaataaacataagtgtgcatgtgtctttatagtagaatgatttataatcctttggatatatacccagtaatgggcttgctgggtcagatggtatttctagttctagatccttgcggaatcgccacactgtcttccacaatggttgaactaatttacactctcaccaacagtgtaaaagcattcctatttctccacatcctctccagcatctgttgtttcctgactttttaatgatcgccattctaactggcatgagttgctatctcattgtggttttgatttgcatttctctaatgaccagtgatgatgagccttttttcatatgtttgttggctgcataaatgtcttcttttgagaagtgtctgttcatatcctttgcccactttttgatggggttgtttgtttttttcttgtaaatttgtttaatttctttgtagattctggatactagccctttgtcggatggatagattgcaaaaattttatccctttctgtaggttgcctattcactctgatgatagtttattttggtgtgcagaagctctttagtttgattagatccatttgtgtattttggcttttgttgccattgcttttggtgttttagtcatgaagtccttgcccatgcctatgtcctgaatggtaatgcctaggttttcttctagggtttttatggttttaggtcttacatttaagtctttaatccatcttgaattaatttttgtataaggtgtaaggaagggatccagtttcagctttctgcatatgggtagccagagctgtgcaggttttaaggaactactgctggaatgatattaagatatgtataagattttaagccaaacactttcattttttcatatgaaaagacaaagagtatgaaattgccctagccatgtagccacatagagagtagcagagagatctgctgtgagttgtgctggaaaggtctttctgcataatgtaaaaccagctttgcaggctgcagcagccagttcctgcaaatgcattacagcatggctgattcacaatgcttaatcctcagcttctaaacccacagatctatttaaataaactcccaattcttttttatttgctacatttacaatgcaaggtttactttcagaatgggaaggaatacctaatactccctcagagggctatttccattctaaaatataagacttgcagagctgtgtttcagaagtaattgattaccagagtagatacattcacaattcagtcatattggccccctgttttttttttttttttggctccttgggggaaaaaagtcacatggccaactgatttcatgcccatctgcaatgcagacaaacatatttttattttttaaagcaaaacaaaatggtcttcctgagaaacgtttaaggatcctttcaaaatggtcacaaatatttgcagcattaaattgccaagctgcattatagatacttctgaactaaatttactatttcctagatagctgaaataagaaattaggagaaatatgtaggaagaatattctttctttataagtactttatataaagccaattatgcagagacagatatggcatctatatatgtgaattcatttattaatataaaataaaagcctggtgagtgaaattatgtagtatactccctttgcctttcatcaaattttcaaacagatggtgcctttcttttctatgtatgatctgctcaagtgtcaagttaaccatttaaaaaatttgcttttcataacaagtcttttttatttagaactttgtcatcagtttataattatttttctttttaaaaatctttttatttttaatttttgaggttacctagtgggtttatatatttctggggtacatgagatgctttgatataggcatgcagtgcatttgtttcttctttcttgtttattcttttaattttttaatttttaatttttgagggtacatcataggttttataattattttttcaaaattcaatcataaaagaaatacatatactggggtttctcagtgttaacactattgacatttggggctgaaaatttatcatagtggtggagggggctgtctcatcatgcattgtggtatgattagcaacattagagagctctaccgactaggttccagtagtaccctcccctcagttgcgagttgtcacatgtcaaaatatctccagacagtgccagttgttccctagagcaggtagagggcagggagcaaaattgctgcattaagaatcactgacatacacctatgtcagctatggagctcagtgcggttttcttgttcaccactgaacaccaaaacatgcagcaatttatcatgcagcaaaaatgcacccaagaaatacaatggcttagaagcaggtctaacattgaacagaatatgtgcagacaaattaatattcatcctgtgtgttctccataggcctgaggtccaatttagtctcagccaagacccagaggaatgcgaaaatgtctagattttagaatatctttggctccttcctgattcaaagttaactggagagactaatttaccctcccctcaggcagtttaggtattctttgaaagggcctgacatggcctcaggaactctatcaggagtaatgcctcataaacatacactgaaataaaactataggttataagaaaaattaggcataaaatacttaagattctgagttgtccttgaacttcctagttggcttgttgattcatcatttatcaagtgggtgcatcccatgtgccaggcatggtgttagacacaggagatacaaaaaaggagtaggatactatcctgcttcagagagatgaatctggtgtcaggaaaataagaagcactatcatctatgaaggccctataatggggcttcatgtaatactcacaaagtccagaatagtaaatatcatccacattcttaaaaacaaggaactaacattcaaagctgtcaagtaatttacacaattttacagagctagtaagtgtcagaaatcacatttgaagccatatatgtgttactgaaacaccagaaatttggtatatgtctggttgcatgctgcacagaaagccaatcactgagacaatgagtattgccagtaaagagtattgttgccggacttcagcatctgaataaagcctcttccttagcaacagtcatctcagtgattggctttctgtgtatataggaaatgaacccagaccaaacccctgctgtttcaataagagattttggttcccggaccagtaatgcattgcttatggttcactgccataggccaggagagtctcagaagcccttctaagcagctgtccacccatttttagctgtaggtgaatttcagtctctctctggccctgccactgccagccctaaccatgttcctgattgcctaggaagaatggtttttaacatttgtcacctgcatctgcatcaaatgggtgaggttcttttgtgggcccagacagcaggatctgctcctctcgatttgggaaattccaaaggaatttctgtttgcaggttaaacaagctcaaccaactgagagaggaaagcaccccaattgtttgagtttggacactcttgggactttgttgttgcagcagttagattgcattttggtgattgtttgtttttatgtgtgtgttccctctagttatgggagaatttgataaactgatattcttttgtaacaccgtctcaccccagtattctttggaatctggagaagtttggcctttccatgggcctcattttctggttgaatgggaaagcaagatggagttccacgtatccaggcttttatgctgctgttctaaccagagtcgagctagttagtacatgatgttcttctgtggtgtggccccagtgttctttggactctggggagatatgccctttaaaaatcaaactgccatggaaactgctttacccaaaattttggtacatagccttcattgaattacgtattggagcaaacagagtttaaccatgtgaacatgtctgcaagctgctgagtttatattgctatctcatgactagaattctgaggtaaaagctagtggatctttctatgtgtatatatgtgtctggatgttccatattatttttacctggcaacaaattgacttataaatgaaagaatgcttgtacattaaacaaataagtccaagaatttttcaagttcatgtgacttgagtagatctctaatataccagctggctttaaaattattgataaaattcacataaaaatgctttgaaattggcagcatacacttctgtctgggttttgtatttgtctctgctggatattttgagacatcagagtttggaagagaaagttataaaactataatcccagccaaaactaaaacaatctccatttgtgtgaatttcttgacaaataagactcatttacttttgttggtttaataaaagtagctgaatcctctgagctattggcaaaaatccccctgcatttaactttaaggttcttgcttaggtaaacatctaatatttataggctattaaaaattatttacaaggaagtaacttgaaatgataacaagttttgcttaatatctcagttttcagaagaaatctagagaaactgttaaaaaataaaagaagtgagtgcatataaaagggatacgtgcttataggtaaactttgtgtataattcaaaatcttaaaattatttttgatgctccttggatatctgggtcacttccacttaagaaaggattatgatatggggaaacatgtttctaaaaactgtggaatggttttcatctgtaaaatactgatatttgacagatggttcaggattttcttgcttcccaaagaatatcagtttattcttaaggttactaagaataagaattctagttaatatataattctgtatgtaaaatgtgccaaagaagatatgttattattgacaaaaatttctacttatatatatttatattaaactattgattttcttagtttctaatggaaggcttgtaattggttctgtggatactcattttgtgtcctacgcatttccaacaattcatcatttgctctatttatctaaacttcctaagctacctttgtcaagcctccaaaatacaataaagcataccagccatttaaaactggattggttttgcttacctctgataatctagagagctacaagagcatcaaggttttcctccctcaaaataaaagacttatttttacaatttctaaacataaatcatacattgtttattttgttatttagaaaaataggtgagggtaggccaggtgtggtggtcacgcctgtaatcccagcactttgggaggccaaggtgagcagatcacaaggtcaagagatcaagaccatcctggccaacatggtgaaaccccgtttctactaaaaatacaaaaagttagctgggcgtggtggcatgtgtctgtagtcccagctactcaggaggctgaggcaggaaaatcacttgaacccaggaggtggaggttgcagcgagccgagatggcgccactgcactccagcctagcaacagagcaagactctgtctcaaaaataaaaaaaagaaaaaaaagaaagaaaaatagatgagagtagaaatgtttaaatggtgttttttctaaggtaattcattttgatcaataacttccattggtttcagatcttttcctttaggtaatgagaaaaattgtgatacgggtacaaagttttaatattcagcaacaattggccttgtccttaagaaaattatattgactcggatttccctcaaattactttaattgtgtttaccattattataattaagtagaatccatctggattgaataataataaaaaatgagatttttagtgatctttgatcccaaacattttatcactgttggaccttcatatatatatttaaaaacaaaatgttttcaagtgttgtactggtgtaaagattctagtggtaaaaattacctaatcagttttcagcactatatctagaatcaatcttagcaatgtgtgacactcttttaaatagctaaaaagaaattattgtgcacttgttcttactttgtccctgttttgtggtacattatttaagtaaaaggagatcatttatcctcatactaaatttccaaaacggatatttaccattaccatttttgtaatgaaggagagaaaaattaattgtcttgctttgataagtttggcataggacctctgtttttgatgcttttggacactagaatgctaacagttagacttatgcaggaagtaacctcactactttaatacaatggtttaaagtgctgcaggcaataaccagtagacaccaaataacagtgttttaatttgtgacatattagctattttgatcaagtattttgagccttttaacatcttgaataaacaccctattaatgaagccttttgacttctgggtctgaaaaagacactgactcctgctaaatcttgaacattgactccagtcagaaccttgtcttcagacctgggagaaggtgacaccaaaatgaattgctttcgtgagacacagggccagaaattaaagctgttcaatcctttgaggtccagggactactgtaaaagaggtgggcacatgagattttaagagccgattttgacagataaaattagttcaggtattccaaatcaaggatgggcacacaatgcccaaacagctgacaaattaagaaatgttacctctctaaattctttaattcaaatgagtttaacaaaatgcttatgttttgtatggctaattgctacaagtcaatatctaagaccaggattcaattctacaaacttacttttcagcttttggttttgggctcttaaaatgcttaaagggttttcagggttaatgagtgcctgcccatctccatcctgtctggcctaaaatgtttacttggctataagacttttgattctaagtccctttaccacaggggtcccattaagggacaggatagacctggggcaggtagccacatcaccccaacaataatatgggacaaaataaaaatttagccattgatgctgactctggcaaatcttgccaaggaactgaggaatgtaaacttaaattaaaatcctaagctccatgatgactaagtgaacccacttatggtcaagaagaccccagaaaaaactaaaactgaattgccagccatgatgggatgggaggtcagacatgccttgttatatcctcttccttttggagtctagacacaacaactgaattacaggtgtcacattttcattcttcatcccattattccacaacaccattcctccgcatgaagcagccagaaagatcaatgaccagattccccatgactgagaaatgaggagaaggtactgaaaccagcccaattatccaatagaatttatgtttagtttattttgaataaacgtagaaattgaccctccaagtcttaacaattgagaaagttacatttgtcttatctgagttcctttctcaagaaaccaaccatcaggcttcccagattgttaaggaactgaaatttccaggtcactgcatccagacggtaagacttcagacccctcattcatcatgactcatgactgcttccttacctctctccaattcctgttttcctaactgaccacctgcttcctgtttaccaactcctattccttacccctccaattcgtgttttcctgcatgtaactacattcctttttccactatgtaaactcccaattttagttggctggggagatggatctgagactgatctcccatccaatgcagcacccaatcaagccttcttccctggcaatgcttgttgtctcagtgattggctttctatgcagtgagcaacaggacctagcccaaatccttggtgtttcagtaacaccttcacccacgaagtcatattgtttttcctgatacctgcccaggctcttttgtaggtgccaaaccactaaaattactattgaggacctaaatttttcaaatctctttcctcaggtatcacccaaaatattttttcacattatatattttttaacattgatattaaaaatctttgaacatgcacttaaaggtcagaaaggatataaattctggtgtattataaatatgatattttaataaaactgatgttacttttttttcaatgtgtccaatgttatctaaatttcatccatcttgatttctaccatcacccacttaaaaaagtaaagtaaaaggtcaggctgggcatggtggctcatgcctgtaatccaagcactttgggaggtcaaggcaggaggatcacttgagcccaggtgtttgagaccagcttgggcagcatggcaaaacctcatctctacaaaaaatagaaaaattatccaggtatggtggcatgcacctgtagtcccagctattcatgaggctgaggtgggaggattgattaagctctggaagtcaaggctgcagtgagatgtaaccatgccactatactccagcctgggtgacagaggaagaccctgtctcaaataataataacaataaagtaaaaggtcaaattacaaattgggaaagaatatttgttaaatatatcccattcaaaaaattaatatcctaatatataaagagattttataagtagggaaaaaatccaacagctctatagaaaaatgggctatagaaatgaacataatgattcacagaaaagtagatcacaatgcaaatggcatttaaacatatgaaaagattatccgtcttgctcataagataaatgcgtattaaaactacacagagattccatttctcatctattagataagcaaaatgccaaaactttaatagcattctcttttagcaagaggaaagaggcacttgatgcactgctggtgggaatgcaaacacggcataacccctatgaaggggaatttgatagtatctggcagagctccctgtgtattaatccctagatccagaactgcattcatttcactttcccaaaaatgcagagacaaaaatgcaaaaagacagatgcatactacatcgtggcattatttgtaaaaacaaaagacctaaaagagtcaaacatatgtcagcaaaggactgcttggataaattatggcatatccatgcaatggagtgctaaggtgtttgaacaaagaaataaacgttcctgaacaaagaaataaagattatctctatgtactgctatggagttgacacagatgtattgttgatatactttggatatgtgtcctcgcccagatctcatgatgaattgtaatccccagtgttggaggtggcatctggcaggaggtgactggatcttgggggtggatttctcatggatagtttagcaccattctcttggcgctgttctcatgatagtgaattctcgtgagatctggttgtttaaaagtgtgtagcacctcccttctttttgttcctgcactcgctatgtgagatgcctgctcccccttctccttctgccatgattgtaagtctcctgaagtctccccagaagccaagccaatgccagcatcatgcttcctgtatagctgcctgtggaaccatgagccaattaaacctcttttctttataaattacccaatctcaggtatttctttatagcaatgtgagaatgaactaatacaattcttaaatgaaaagatcaagagagggagaaggaatgtatagtgtattatagtttaggacagaaggaatacttgtatgtgtatttataacacacatatgctatatataattttaaaacaacaatagaaggatagtctagaacttgttttcaatggctgcctattgaaagagcaaggaaatggggtggaagtaatagagatagaagctaggactcattttgtattacatatttgagttcagaaccattaatatcttacagaattatagaacaatattaaatttttaaaaatccataaaaaataaaagtgaacaaaattaagctaaatatgtatccacttggtgatataaccatacagagaagaagttggtgtgatttgcaaaaatgaatattaagtgtttctggtacttatggtgggtagtaataatgttggttttatcattctgaaacccgtgtgcatatgtcatggcatgaaaccatgactattatatgatattctaccatccctagtgttttttgagaaccaggattatcactacaggaaaagaaaagacagatatatgattacagcagagaagtacactgtagtactaaatttaagttgaaatcatgaatataaactcatgattattttgttttaaaaatgcattcttacacacatgtacatttcttctatctatctaatgaaaaggcttagaaacaatgactagtgtagtagcaatgaaatccccagttgtggtttcaaaattccattttgactaaaaggaaagagaactccttggagaaatgactaatttcaggaatagaaaatgtttatgatgatcctgaaaggtcttatcatatgtaaaatccgggaagctattaataattactggggtcatgtaattttttattagggtcaggatccaacttcaagaggctctcattgaccaaagatggtaaactttaagaaaaagaaccatattaccagtaatggcttaaagcatatcaaatatgtttaaatccattagtttctagtgccactaaaagcaataacaactaataattcaccactagaggatctcggtggataaggtcattattttgaaaaatggtaaatgaaaagaatcaagcatgaatccttcctttccaatatgaattgtaccaagacataaccaaatagtagatgggagaagttattaaatttagaataattaatagaatatactaatgattaattcaaatatactgcactaattctgtatattaccatttgcaattcttgagaaaataatcattctaggcatcgaatgactccagctgctaacatcacaaaaaagaaataaccagatattagatgtctcttaatgaaagaaggcagcaccatttgtgaagtagttttacctaaagatattgaaccacagtctatttgtgcttttagatgcaactatcaatttatagaaaacacggaggataaaggaatatgttaaatgcaatcatcaaagtccagtctgtgtgaaattttagagaaaacacaatctaatttcttcaacaaataatttagtaaggaaaaataattaaaagagagagaaaacttgaggttgtgtgtgaatgtgagagaaggaggggtaggtggaaagagagaagtagtcaaatccataaattaaaagactttagagccatataactaatttttatgtgtggactttatttgaactctgatttaaacaaacttaaaaaatctgggttagaaatataagcactatcctggctaacacggtgaaaccctgtctctactaaaaatacaaaaaattagccgggcgtggtggtggcgggcgcctgtaagtcccagctactcgggaggctgaggcaggagaacagcgtgaacccaaggggcggagcttgcagtgagccgagatcgcgccactacactccagcctgggctacagagcgagactccgtctcgaaaaaaaaaaaaaagaaagaaaaaaaaagaaatagaagcactgactggatatttgatgatactaaaaattattgataattgtaggtatcacaatgacattgtggttatgtttttaaaatgtccttatcttttagagatatatactacaattttactgatgaattgacacaatgactggaatttgcttcaaaataatataggtaagggagatgtaggtggacgtgcagatcaaacagtatcggcatgagtcagtaactatggcagctagataatgtgtacgtgagggttcatggctactcttctatctagtcttgcttatgtttaaaaattttcacaataaaaagatgaaaacatccactaacaagcttgttttaaacagttttaacagtttttaacaggtgccttttcttaaaatccattcccgttgcccatcagtattttgtcctaatgtaatgaaaatcaataaaaagcattttgttgatcactaatttatatttctacaacaaaaataagtatataaagatagatttttaatctttaaaattttcatgctgtgatgaggttctaagtgtttcttccgtgtttaacaattatttgttgtaattattgattactgataatacataattgattagaattttaaaaataaacatgacatttgttgataaataattatcaaaggtaaaagcacaatttttaaaaatgcatcttttaatgtggtaaggaaagaatagggaaacttaattaagggaggctttatgtttttaactgttcttttgtttggtacactaggccaatatataaaatgtaattagaatccaacttgaagtttgaagtctagccataatctaacaaagaaagttttcaggaaaaatcctcagattagtttgtattttaaagtttgtctttatcttttcttaaaaattaagcagataggagagaagcagaaaatcaggtaggagggaggagaataataacactgactaaaggatttgcattgatttggggacaccctggaccaccctcctgattacagtctggatttgaattcaataaaaccttcagtatgcatttccctatagaacttcacctggcaaggaagtcacaaaattctaaagtgagttaaggttgccaaatccttgggagttggagggcacataatcaacaagaacctacctagagaactttaagataataaaatctggaatgaattttaactagggataaaaatctagaacagctgtggatctcctaagaccatgtggtccaaacttacagtggtaagtagcctcagaagtcaattaaaattagaacataacagatctatttaatgtcagggccaaataaataaatgagcaattactaaagaagttggaagaaaattctaatttgaaaataattgataattttcaccatatctcaggaagtttaagaatttccaaaaattgaaattggcccaatttccacatagaaatgatatttacagatttttgaatacacgtagaaattgaccctcccagtcttaaaacttgaaacttatatttgtctcatctgagattctttctaaggaaagcaaccctcaggcaagggatggaaactcaccagatcactccatttagacaatgagacgccagaaccattattcatcatgattgcttccttacagctccctaattgtggttttcccacacttgtagttacatttcttcccccacatataaaccccccagtttcaattgatcagagagatggatttgagactgatctctcatgttcctctgctgatgtcacccgaataaaaagccctcttccctggcaatactcacactctctgtgattggctttctgtgctgcaagcaatgggacctagaccaaaccactggcatttcagccacaaatgcatggctatatgaaaagtatatgattttccctagaaaaacaaaatgaaatgagacatttgcccaataaaagtcacttagaatttcagatttatataaagtgtaaaaattattattaaaaaattccaatacggtgggttcaataacttgcataaaattaggatgtggttgaaaccacctttgcagaagttataacagtgagaaaattaagacagtggaagagacccaatcaaaccaactccatcttgcctttaacctccaaactgcccttggtcattcctggatgtgggccagccaactttgggagaaatttggtttatggtttaagtgataatactgcttcccaaaactaaactgtctttataaaactaaaacatggtcacaggttagaattatgaaaggggcctgaattctgctaagatgtaggcatagttaaatgattgccagccattgttctggaggtcacatgatttgtaacttccccaattactcctatgaataacatgactattgtagaatctaaaattgaccttttgagatgtcttttcagacttttgcattgctgaagaccatatgaatacacctggacatgtgactcatgactcaactggtcctgtagcccccacccagaagcaaactcagtgcaggaaaatcattttccacacccaattacatccccaaccaatcagcagcacccattccctagccctgacctgcctaactacctttaaaaaaccctcacttccaaagtttgggggaggctgatttgagtagcaataaaactccagtctcccatttagctggttctatgtatattaaactctttctctattgtagttcccctgtcttgataaattggccctatctgggcagtgagcaagatgaatcagttgctcaggtgattatgtagtcatttccaagtatgggagcagaagttagggaagataaaccaagaaatagaggtaaggtaatctcataagatgatacattaagtatctaaatttatgctcaatttcaaagtcttagatcacctaaatttcaaaatatcaatttaaggagacacttcatccaaccattcataacctttaacactaccagctaatatttgaaacaactagaataagtaaaccactgcaatacaggaagaagaaaatagcagattcacatactgagaaactgatctctattattcaaaatcagttattttgacagatttgtaaattaagcctaggaatattttctctcaaactcctacttggtaaattgcaaatgcaattagtggaaatgcattcagatttacttgaatgaagtgaatgtcaaaaataagtagacagctaatagttttattactgtctagttcttctgaaactcaaaggcatttttaattaccgaagtgaaatgttccatgatgttacaaaaatctttgaagtgagaccagtttaaagtataaaacatttgtttttaaaatgtttctgactttcaaaaaactctccaagaaattaggaaattatgtaaatatgcaaaacatatccacaatatttagccctcaaacttaaaaaaaaatgctttgttggcataaactcattagaaaacaaataagagttaatgttttaaagaagaacaacatagattataaagtaatttccagccctgaaaattttcttgtgctacatgaagatattgtggaaatggctgggccttgctaattccctgacaaagagctgagaatctgatcctccagagggacagaattcccattatcacttgaaattgagactaaatgaggtaatagatatgctatacctttgcattttattaatgcctatacaaatataaggtaccatcattgatagtactaaaagtcaaattaccaaaaacatttgtttctaaaatatttttgactttcaaaaaacactccaagaaatcagaaaattatacaacctttcaatttcaaattatttcaacgccaaagaaggtccatgcagagatgcaagaagaaaacaagaattagactgggctaaaataaaatgaattaattatcaggtgtactttggtgaattgaagataatcaaaatgtggaatgcagaaagtgtgcaattcagagcgctgaagatgggaacaattcactgtagacccttgactgactgcttataaatcatggtcagagtgctcctaactgatttcacctgcattttgagatcagccctgacctagagtgaccctagggaaagaagtagattggagttatttcttgggatttggacccagagactcctgaagtgtcctcaagagccactaatagaatgtgaatgggtttctcagtgtccatacacttaacaagtatgggcttgttaacaaagtaaaggggctaaagtgggaccgagaagagggcagctgcagagttggaagcttcaaatcctttctttcctacataatgatacatttcaggcatcccagtggatgcccgaaattgtgcatagtaccaacccctatataaactatgttttttcctatatgtacctacctatgataaaattaacttataaattgggcacagtaggagattaacaacaatatctaattataaaatagaacaattaaaacaatatactgtaataaaagttatgtgaatgcagtctgtctgaaaatatcttattgtactgtaccactgtaaattcaaactctggagagtgaaaccgcagagaagtgggcactactgtcctctttccatctttccttattgatgcttttttccaatatgtgatttgcatggctcatgtcctccactattctgtttactgacacacttctttgcctcatcacagccattcctctcccctaacaactcctcttccaaaacacaagctcttgcacttgaacactgcctgccttttgcctgcagaaagaaaagcagtgccttcaaaagagtacctccacagtgacctgttaggacttttatgacatagggagagcagttcctcattgacctttaaaaagtttcctccacaataaattgtgctgcctgccatattgcatcattgaaaatatgacattttctattggagaacaagttactcaagccaaatcatttttctaaactcaccgtagcctggaataaccatttattattaaaacaatgaccttttagaaagtatggttattggtctctgtcatattgtttgagcactcccaagctctatgaccttgggcaacttaacctccctgagccttggtttcttcatctagaaaatgtagacattaataaagcctgtatcacaaagttgtgaagatcaaatgaaatcatccatgtaaagctcttaggactcttttagcacaaagtaaggaaaatcttagcagctgctgatgctgttgctgtagttgtatttattattgttgttgattttgttactatcattatatgtgtaaaggatatgcttttttcattttccctgggatctagttagtccagttttcacaattatcatctcacacatagacacggaaaagaatccaaaagttaaaaatacacaaaattactttggctacatcccttataaatgaggagacattagtatattttaaatagtctgtgaaaagaaaagaaagggggaaagttcagaatgtggatgtaagataaaggctctaaaaggaggagagacattcccaagactctgggctagggatggaagaatgttatgagagtttcatgagatcccggtgcactcacatcattagaaagcttttaatttgggcaccttcataatcttccttgttcaaaagtgttaaccttggtctattacaatgcccttactctccttaatacacgagatttttctcaatgaattgcttgccttgccctccaaagccacgttcctcaatcttactttctcttttagttatcatccacaaacttcaccaagcttatacttatgctgcagtgtgtgatccatctgacagtcacttcttcaccttttgcaatctggcatacaacccatcactcaatgaaaaatattctctctgtgacctcttgctcagctatgtccttgtatttgtgagctccaaaggtctgttctctcagtgctggtcttccagggcagcttcaaagcatctaatcctctccttcccttggtgataccattcttccttggcttctatgatactgccctctcctggttcttgtttgtgtgtctctggtcactgagccttcccctctagttcctcttcctctgcctctcccttaagtgtacatattccctaaggttctgtccttaatcttcctttttctcattactccttcctctaactacagttatcttgattttgaagacccaggctgccaaatctccatctccgctagcacgattccggagctgcatccagagggccaccttagaggtctaccatgcctcagctcaagagtcccctcatccaggtgtgcttctcctcggtgctttatttcttaattaattgcaccttcatcaactctacccttccgatttagaagcctcagtattatctttgatttgtatttctgtgtcaatcacaaataaaatcaacaatcaaacccaattacttctgtctacaacatcttatttccaatatctggctctttcctcctcaaaaatcttcaatggatcccaattgcccctcgagaatagaatgaagatttttaagaatgagatcaaaatattactaggcaatgatcttccttttgggcatgaatactcattatcttcatgaattctatgctttttcttctaccagacatttcctgatcatacaaacactttcaagcttttgaatcttggcacatgaaattgccctaagctggaatatcctttcttctctccaactactggaatcctatctatctttcaagttcaaataccaacttctctctgtagccttctttgatattcacagaattcatccctctttatgctgtgatcatatatgattttgtgttaacacatttaaagcatttaagtcatgcttattaacacattttctttacctgaatttcagactcatatttaattccccaacaatcatctccactgggttaaccctcaagtccctcagattcattacactcaagttgaacacaccctgctgactggacttggtcttcctgcagtgtgctttctgctgggagtcacccttcattcttccatctctttctaatttcacaccctgcctaaatgattctagcttctaaatatctttctaaggtattcacatctcttcccccactattaataaactagttcataccagcatattttattattagttttcttcctctggtcaatgattaatcaattgattagaattgctaataaaaaaagatcaactctcagttcaggaaaataaatatcaagttatataatctatatgtagtcatatagcctttatagttttctgccttctcttttaacttccatagggcaactcactatagtaaagccttttgtgttattaagttatctcttggtaaaccaagttaaaaattaatttagtggtccagtattcagatatttttctatttagttataataaaagctaagaagccatcatattattcttcattttctttctctgaccaatgtctaatacatgacttagagaaattaaatgttacttttatgtgggtcaagtccaatcaactaataaaaaacaggatatagacatctgaaaacaatgtacctattaaaatttccttttatactttcttttcaaagtgtttaaattagagtttaatggaaagtatgaagtaatttacttatccagcttctacggccaaaatggaatgtgctaattttattaatctgaacaatggtggcttgcatttgaaaagctcaagaaacagcgacgcaccatggggctaatcacttcaagttttcttttctttatctctgcccattttgcaagttctcattatttgcatgaagactctcagagaattaccagaccagaaatgtaacccattgtattctttcttctaaaaggggtagaaatcatttttgagatcattttcaaaattggaacattgctgaaaggaaaaaaatcaaatggatcgataaccttgagcttaaggaaaaactgtatgttaagcaagcaatggttgtgacataaagtaataatattactcattaagtaaattttttttaaactttcacataagtttaaataaccactaacagaattttatctgatacaattataaatggaattaatgacaatagtttacaacctgatttcaaaaatttgtttttttatgtgttttaaggaattccacatgcttattttgcgctggggaattaatttgaaatagcaaattgaaggatgctagtaggtatgtactatactgatatggacaggagacagggaaatactgggtagaagaaggcagttccccggcaaaggccccaccctcaagcctggatactcatggccctaaatgagaacaaatattcctgttttcgcgctcctctttggtccgccacatcccctatcctgcacccacataaaccccaaatcccaagctccagagcagaccagcaggtgaggacacaggaggcaagcagaccgacagtggaacaacgcggcagagagaaagaagagtaggggcatctggatgctgagaggagtttggctgggggtggtgcaagaggagttttgcctccggccgctgggtggcccaactccaggggaagataccttcccactccatcccccagcccccgcccttccagcttcccatccaccacactgaaagccacctctaccactcaataaaacctcacattcatccttccagtccgtgtgtgacccaatttttccgggacactggacaagagctcgggatacaggaagctgtcacactggccctctgcccttgcgaaaaggcagaaggtccactgagctgattaacactcaagccgtctgcgggtggccaagctgaaagagctttgtaacactgaggttgcaggcacccaccattagacattaccatggggccagagcccaaagtgctcgccctggcctctgcacctgcccatctgcatgctcctcctctcacaaggggtctgagcagtgggcaaccgaacaagggagccatacccctgtctcatatcctgtaaagggagtcagggaagtctcccgtttcaatactatgtggccatgtgacttgcttatgacatgctagagaatgtgccagtggtagatgggcaggctgtttgtaatgaaaattaaaatgcaagttctgtgctgaactgaactgttgaaaggataacagaccttggaaaaatgccaggtagaaaacggaaaacatttctccatggtatttctggtacgtggcaccacagtagacactcaacaaatatttttgaataaatgaatgtgagggctgagttagcttaggagacattaatataaaattgaaaacattgatgatttgattgtctaagatcagagcagtcccttaagaaaagaaatcccaaatcatgtattaggagagaacgtgttctaatctggaaaatttcaagattattgttttgttcatttctttgtttttttctttttaaaatccaatgaaaggatttagcaaaaattcctaagagtctatatggtacatttcatcagtgatctgtgagaccttgggggttgaaaagaaagtacaagaacttagcctcactctgttgtagactttataaaatacaatcaaggatctctgtctaaaaccacttctcataaaaaaatggtttataaactttatttgcacattacaaccttagagataaataataaaatggaaatctagagtccagcctaatctgtttctccattaaacctcacacaatgtgatgaggagctgtagagttctgaggaataaggtttgaaacctgttgtcccagaggattcttctgaggaacctaaatgcaagaacctctggtagtgaaatgatgacaattgaatgttttcactcgcgtccatgtgaagagaccaccaaacaggctttatgtgagcaataaagctttttaatcacctgggtgcaggcgggctgagtccgaaaagagagtcaggaagggagacaggggtggggccgttttataggatttgggtaggtaaaggaaaattagtcaaagggggttgttctttggcgggcaggggtgggggtcacaaggtgctcagtaagggagcttttgagccaggatgaggcaggagaaggaatttcacaaggtaatgtcatcagttaaggcaggaacaggccattttcacttcctttgtgattcttcagttacttcaggccatctggatgtatatgtgcaggtcacaggggatatgatggcttagcttgggctcagaggcctgacagatattgtaataatacagttatcatttactgaatgtctaccagatctaggtacttcccagagcttatttcattgattctgagttaagtattatgtcagaggcgtgtgaaccagagcaactccatcttgaataggggctggataaaatgaggttgaaacctactgggttgaattcccagatggttaaggcattctaagtcacagaatgagataggaagtcagcacaagatataggtcataaagactttgctgataaaacaggttgcagtaaagaagccaaacaaaacctaccaaaaccaagatggcaataagagtcatctctggtcatcctcactgctacacttccatcagggccatgacattttacagatgccatgacaacgtcaggaagtgactctatatgatctaaaaaggggaagtatgaataatccaccccttgtttagcatataatcaagaaataaccataaaaatgggcaaccagcagcccttggggctgctctgtctatggactagccattcttttatttcttcgctttcctaataagcttgctttcactttactctggactcaccctgaattctttcttgtgcgagatccaggaactctctcttggggtctggatcaggacccctttccagtaacaattatgtctctttttaacgagaaagctgagtttcatggaggttaaactgccaaagtcactcaaatgctaagtgcacttttgactattcaactgcttcaaatatgacacaacaaaagaacaggcatctcttactgcatagattttctgaagtatcctccttctgtcgaacaaggttctgtggtgctgggagatgtacggacttccaagcaggttaaattttccagagggaatcagcaatgtgtgtgattaggggtggaacagctaaaaagtttgccatgatcacctgacttttaggaaccataaacccattatcacaacagagcctccttgcggaaccaaggctcagacactcacacaacccctactttagattcagggatcttgtctggggcctgatttatcacactcaactatcccaacccctccaaagtcccagaatgaacacagaagtgatctcacgtgatcagtaaagctgcttacgcatttgtccaaaccggtagaactatgcaacacagtgaacactaatgtaaacaatggctttacttcataataatgtatcatactgattcgtcaatcatagcaaatgcagataatagggcatactaacatctaaataatagggagtattagtaataagtaataaataatacagaatattaacacctaaagaaagatgttaataagagagaaaactgtgggggtgcgcagtatttgggaatgctgtactttctgcttaatttttctgtaaacataaaattgctctaaaaattaaagtttattagttttttaaaaagtagctattttctggatcaactgtataaaacaatgcatatccaaaagaagacaaatattgaagttaagaaaattcaaatctaggatttactcagcctctaactaactcttcagccccacacttaaacttgtacattcacagaaagtggccagttgttggctgcacccaaggtcaaaggtaggtctgagtggaacacagctatgaaaaaaatccacaggttggtgccaggttaatgacatttctgatgagaccgtaaacgacttggtgcgggtttctcatcagacagagtagtaaacccaaaaaggcaaaaccactttgggaaccctgtgttcatcaagatacctgattacccagagttagctgctcacttccaagtttcctttgaaactgggacagaaagcgctccaattctttctgaactccaggtctagtgtagaagcagagcagatgcttccttcccatttgacttgaatgccaccttctcagtgcaacattcaccaaacaaccactttagaactgcaaaccttcactccggccacccagtatcccctttctgatgttatttcaactccacccccacccggggcacttattgccattaataagcacactacacattttacttactttgtttattgtttcctcacctgactagtctaaattccaggagagccgtgattttattattgtgtcctcagcccctaaatgcagtaccttgcatttagcatgcttcccataaatatttgttgattcgaatgaataaaccaccacttgcaagacgaaatgggcgtgaaaaggaattataatcagaacaatcagagtttaaggctctcctgctctacctcccccacctttctgcatgggctttcccggcttatttttgacacactgcatttggtcgttgtctactaccagtgagaagattgctgaagatagaacagtggtcaacaggattgactgttaagattatagtccagatgcaactggatggaggcttcaggaaaatagctttttgaccaaaaaagcagtactttttttttttatttcactatagctagcacaatgagaatgaccagttggccacttaggacaattgccagagagattatatgatacactctatagaggtcacaatgtcacggttttctttgctgctgcaccaaaaaaagaaataactagtccagaccacttacacacagtagaaaacataaaaacaaatgcgcccccaaaagactctacttagggttcccacgacaagtcttccaaaatcaacagtgcagtctgtctgaatgttatcaatgctcactaaccatgcattcccatgacatgactcagtgactccatttcctgcctacacttccgctagctctgggcctcactttgagcttgtctgtcaagtatagtaatgccagatacttctagctcctacatgtacaccataaaaatacttcagaaaatacacaacacatgagaataatatcagaaaccaatttacttcccaatttcatccattcttgtgattgtacctgtcaattaaaaaactattcagaactctatcacattaggttttcttagacatcacttaagccaattatcatcttaaccattttaagtggacagctcagtggaaatgtggaattttgaacttgtcttttacattagagacttgttaagaaaatgctaacttatcaaataatatgagctcctctatacatggtactattcgagaaagccttgaagataaatgataaacatttacaaggggcagcatgaactaaagttaaaggacgggaaagcttgaacactttcttcatgtggatcacttactttcttattagtcttgagtaaaatatttaaatatttgtgtctcagatttccaatcttctaaacaggatggaaatatttgccaaatacttgccatgtatatattttctttgaataaagctagtaagaaggaagaggagcatggttttgaattgttttgtattactctctgttttccatgcctcttttataatggatgatttaaatcaattttcatcttgagctaataatctttccacatttaatataatttattttttattcagacaagtattataatataatcattttattattacataattaatattatacaattagaatgtactataattatataatatataattatataatgattacatataattatatatagttatgttattatattatatagttatatattattgtatataattatattatttaattatatatagttaatatataattattataatagatagtgaatataaattattataattatatatagttaatatgtgattattataattatgtatagttaatataattatagttatatatagttaatatataattatattaactaaataattatttaaataattttatttttataatatatttataatcattttaatttatgattttataatttctacttatttaaatataatttataatatacttatataatttctaatgtaaacataatataatttatagtataaattttataatttacatatgcattatagaatttacatatgaattataaactttattcttttataaattaaaaataaactcagtttattttattaaaaaataaagtgtatttacaatagcaaatacatttgcagctaacactgcctcattattattgttactattactattattaatttatttagaataattggtcagtttccataatatcctcatggtaaaaacttcctcatggtatcatttttaatatacagttctctccctaacttatcatcccacttgattatgcaatttctcttcttatacatgttataaaaatttgtttaggtcagacatttgtgtaatatcaattcatctgaatcacctgtatgcataggcacatatagtatgtttttaagtatcaagcatccaaatggcttccatgtttaactctttttctataacactggaacaggtacacatacagaagagtacttttaaatttcatgatgatgattatgatagtgatgatacagtttatacatattcattgctgtttttttaaacaaagaagaaatgtatgccattttgtctcaacatcaaatgataaattttcaaattctattagatccttgagttttgaaaatctttatatagtttcgtttctggataaattttggctatgtgataagctgctctctgttttgttgcaattatcctacaagtaccgtttttctcaactgaacctcaagtatataacaaacagataattttgtaagagaactctgttttgtcttattttcacagctttgtggttattctttatggcaaggaaaatagaccttgggtatcctcccaaattttgagaagaataaaagacaggcttagcttaattagcacgacctcagaatgagtcccatcacatcccaagacctttaagtttcccaaatcattaatctaattaccatcctgaaaaaaatgatctgctgggctcctccatgtgcaaatgtatgttgttgacgttatgtgctaaatattaagatgtaaccaaaaatacacagtctacttcttttccatgaagactgaatgtttattttgttctctgagtaatattagtcatctaaaggactgtgtataaggctgtactcagcctgaaatttcatttcctctatcagcaaacagagttgaagctatgattatgtcaaccttgggaagtctctattttgataaagaagtgagaaaggttttccaagatcataaaaatatttagtaaacaggtggtagtatgagcctttagttctaaatcacagctaaatcacgcagtcactcctcctagttatcttgacactgctccacttatttctctctcctcttcaatatacaaacctgtcaagttcacttggtggccaaattagctgatttgtttattctatctactatctgctttaaaaatcactattagtctttccctgtctgtctagagctattactgtagtttcaacatccaccaagtgccaagtactattgtgtcttctcataggtctagtgatccctactcattgtggagagtatcaggtttggtgaaggtggaattagacgtgtgagagcgtcctggcatatacaacccttgcaactctgaaatgataatgatttagtaaataacgtaattacttttgtggttctactatgttactttagtatcaagggaattgataaatacagacatgcaaaactctgtaatacgaaatgagttccttcaccatgtgcatcaataacaaccaactttttactagcataacataatctaagacattacaatagtggctaataaaaaagagctgtcataccaagaactgatttcaaagagacgaactagaagctactgatacttccatgtgtctaaattgaagttttaaaagcatctagttctttgcaaacagagaaaaataatacatttactcttgagtcttaagtcaatatgaaatagttagaagcacagcatgacaactgataaccttcaattataagaacttggaattctcctctgctaagtgcacactctgggtcaaagtgttatcccaatgttgatgaaaaaggttttaatggaaatgatatgagtgagagttaaatagatcaaaattcaagttcctctaatgattttacattagggattgttagagcctctttatttcagaatattgcagtgggtcatgaattcgactttttaaaatatttgcatttttgtaataggcaagagataaggtaataggacctctattaatataatgaaagaaacataagattagctttgggtagaaaagataatcaatgagattgaatgagtttaaatgctttctattattaaatgggtccaaattatacatattaaatgacaatttaaaataacatctttgcaagataagatacaaatatttcttgtattaaataaaaaatgctaaaatggtacagagaaagataataatgaatcaaaagtaaagagtacattcagctatgatccaagttataaaatagtaaagaaggcatacattgtatctccttcatattttcaatattgcatatttgcatatgcaatgcttcagaaatactgagagaggaatcttgaaatagtctcaaattcttcctaccacaacaaaactattttgagtacactgcagcactttcggaggccgaggcaggcagatcacctgaggtcaaaagttcaagaccagcctggccaatatggtgaaaccccgtctctactaaaaatacaaaaattagacaggtgtggtggcacatgcctgtaatcccagctactcgggtggctgaggcaggagaatcacttgaacccaggagggagaagcagcagtgagccaagatcacgccattgcactccagcctgggcagcagagtaagactctgtctcaaaaaacaaacaaacaaacaaaaacaaaaacaaaaacaaattttagcacagagtgagcctcagaaattatttaatctgataatcttatgtttataaatgacaaaactgaggttgaaaaaagttgagtgggttgaacaagtatattagtcagcttaagctgccatgacaaaataccaaagactggttggttaaataacataaatttatttcttatagtttcagaggctagaagtccaacatcaaggtgccaatgtggttggcctctggtgaaagttctccttgggttgcagatggccactttgttgctatattctcacatggcagagagaaaaggagctccaggctccagtcttttctccttcttcttcttcttcttctttctttcttcttcttcttcttcttcttcttcttcttcttcttcttcttcttcttcttcttcttcttcttcttcttcttcttcttcttctttcttcttcttcttcttcttcttcttcttcttcttcttcttctccttcttcttcttcttcctcgtcctcttcttcctctttctcttcttcctcttcctcttcctcttcctctccttctccttctccctctccctctccctcttcttcttcttctttcttttttttttttttttttttagagacaaggtcttactctattccccaggctacagtgcagtagcacaatcatagctcactgcagcctcaaacttctgggctgaagcaatactccagcctcagcctcccaagtagctgggactataggcacctgctgctgtgcccagcaaattttttgttgttgttgttcgctgtgctgcctaggctggtcttgaactcctggcctaaagcaatcctcccaccttggcctcccaaactgctgggattacaggccactgtgcctggccacgcttcctcttcttacaaaaatactaatcctatcatgaaagtcctaccctcaagactctaccttaattacctcccaaaagccccacctccaaataccatcacattgtgggttggagcttcaacatataaatttgggaaggagggacacgaacactcagtccataacaatggattgagaaaaatttagagtgaaagtaaggactagaacctaggcctgctgaaatcctggccagccatcttttcaaatgaaattattggttgattctaacttacattatttgacttctaaaattaattgtgcaatttttaaaaacatagttgaaataatgctaaggattagaaaaccagcagagaaggaaaatgagattgacaatttcctacagttctgtatcattatacttataaaagttttcctatgtcatttgatgcctgtctcatatcatttcactatgttcttttttaataatcagccttaatgcacctgaacagaatgtattaaagatgttcaatgaaaaatttttcttgctgctaaataaatccattttgggtgctctttgggttgttatttcttcagacacaatcagttgagtgcttgatgaaatcctttctgcctcagactgtgatgacttctaacattttgtttatatatttagcagcaaaaggaatcaagagctgccaagtattattaaagtagaaccaactacagcaggaattctatcatgagggcagcatcactaatgaagtaaagcagtgagatagaaaattctaaccataactccagtttctaactcctcatgatatggggacattgattctcttactgtttttcaatttaaacaatggagataaccaacttgtattaaggattctcaaataatgcttcagtatgcatataataattataaaatgcttgctttttaaggaaaaacagtataactatcggaaaaatatttatggtcttaaaaaaaaaaacctaaaaaaataacaaaaaaccctgccacatcacatttctttcctcttctctctctcctttttttttttttttttttttttgagacagtgttttgctctgttgctcaggctggagtgcagtggcactatctcaggtcactctgtctcccgggttcaagcaattctcctgcctcaacctcctgagtagctgggattacaggcacccactgccacaccagactagcttttgtatttttctataaaaataaaaattcaccattttggccaggctggtcttgaactcctggcctcaagagaaccacctgccttggcctccctattcactctgatggtagtttcttttgctgtgcagaagctctttagtttaattggatcccatttgtctattttggcttttattgcctttgcttttggtgttttagtcatgaaatccttgcctatgcctatgtccttaatggtattgcctaggttttcttctagggtttttatggtttcaggtctaacatttgagtctttaatctatcttgaattaatttttgtgtaaggtgtaaggaagggatccagttttagctttctgcatatggctagtcagctttcccagcatcatttattaaatagggaatctttttctcatttcttgtttttgtcagatttgtcaaagatcaatggttgtagatgtgtggtattatttctgagggctctgttctgttccattggtctgtatctctgttttggtaccatgctgttttggttactgtagccttgtagtatagtttgaagtcaggtagtgtgatgcttccagctttgttcttttggcttaggattgtcatggcaatgcaggctctttttttttggttccgtatgatctttaaagtagttgtttccaattctgtgaagaaagtcattggtagcttgatggggatggcattgaatctacaaattattaccttgggcagtatgaccattttcacgatattgattcttcctatccatgagcatggaatgttctcccatttgtttgtgtcctcttttattttgttgagcagtggtttgtagttctccgtgaagaggtccttcacatcccttataagttggattcctaggtattttattctctttgaagcaattgtgaatgggagttaactcctggtttggctctctttttgtcttttattggtgtacaggaatgcctgtgatttttgcatattgatttcgtatcttgagactttgctgaagttgcttatcagcttaaggagattttgggctgagacgatggggttttctaaatatacaatcatgtcagctgcaaacaggaacaatttgacttcctcttttcctaattgaataccatttatttctttcttctgcctgattgccctggccagaacttacaacactatgttgaataggagtggtgagagagggcatccctgtcttgtgccagttttcaaagggaatgcttccagtttttgcccattcagtatgatattggctgtggatttgtcataaatagctcttattattttgagatacgtcccatcaatacctagtttgttgagagtttttagcatgaagggctgttgaattttgtccaaggccttttctgcatctattgagataatcatgtggtttttgtctttggttctgtttatatgatggattacgtttattgatttgcatatgttgaaccagccttgcatcgcagtgatgaagccaacttgatcatagtggataagtttttgatgtgctgctagattcggtttgccagtattttattgaggatttttgcttcaatgttcatcagggatatttgtctaaaattccttttttgttgtgtctctgccaggcgttggtatcaggatgatgctggcctcataaaatgagttagggaggattccctctttttctattgattggaatagtttcagaaggaatggtaccagctcctctttgtacctctggtagaattcggctatgaatccgtctggtcttgactttttttgattggtaggctattaattattgcctcaatttcagaacctgttattggtctattcagggatttaacttcttcctggtttaggcttaggagggtgtatgtgtccaggaatttatccatttcttctagattttctagtttatttatgtagaggtgtttatagtattctctgatggtagtttgtatttctgtgggatcagtggtgatatcccctttatcattttttattgcatctatttgattcttctctcttttcttctttattagtcttgctagcagtctatcaattttgttgatcttttcaaaaaaccagctcctggattcattgattttttgaagggttttttgtgtctctatctccttcagttctgttctgatcttagttatttcttgccttctgctagcttttgaatgtgtttactcttgcttctctagttcttttaattgtgatgttaaggtgtcaattttagatctttcctgctttcttttgtgggcatttagtgctataaatttccctctacacactgctttaaatatgtgccagagattctggtatgttttgtctttgttctcattggtttcaaagaacatctttatttctgccttcatttcgttatgtacccagtagtcattcaggagcaggttgttcagtttccatgtagttgagcggttttaagtgagtttcttaatcctgagttttaatttgattgccctgtggtctgagagatggtttgttataatttctgttcttttatatttgctgaggagtgctttacttccatcagagtgaacaggcaacctacagaatgggagaaaattttcacaatctacccatctgacaaagggctaatatccagaatctacaaagaacttaaacaaatttacaagaaaaaaatcaaacaatcccatcaaaaagtgggcaaagtatatgaacagactcttctcaaaagaagacatttatgcagccaacagacacatgaaaaaatgctcatcatcactggtcatcacagaaatgcaaatcaaaaccacaatgagataccatctcataccagttagaatggcgatcattaaaaagtctggaaacaatgggtgctggagcggatgtggagaaataggaacacttttacactgttggtgggactgtaaactagttcaaccattatggaagacagtgtggtgattcctcaaggatctagaactagaaataacatttgacccagccatctcattaccaggtatatacccaaaggattataaatcatgctgctataaagacacatgcacacatatgtttattgcggcactagtcacaatagcaaagactttgaaccaacccaaatgttcatcaatgatagactggattaagaaaatatggcacatatacaccatggaaaactatgcacccattaaaaaggatgagttcatgtcctttgtagggacacggatgaaactggaaaccatcattctgagcaaactatcgcaaggccagaaaatcaaagaccgcatgttctcactcataggggagaattgaacaatgagaatacttggacacagggtggggaacatcacacactggggcctgtcatggggtggggggaggggagagggataacattaggagatatacctaacgtaaatgacgagttgatgggtgcagcacaccaacatggcacatgtatacctatgtaacaaacctggcacgttgtgcacatgtaccctagaacttaaagtataacaaaaaataaataaaaaataaaaagaataccacctgccttggcctgccaatgtgcagggattatacgcctgagccactgtgcactgcctcatatcttcttataaaaaataaattacaccacgaagatggcagcaatagttgctctatttgaggcattgctagaaaggtcttacttctgcagaaaagtccttcagctacagcctgcatattattctgcctgaaagaaagcctgcttcccaagtacaactcatagcagcttgggtgttcagtgagaactgaataaaggagcccaacactccctgtcctaagtctgtgagtttacaaccccgtgcttgttgctcttgtaagcagagactgggaatagtaagttgatggcagaaagaaaataaacatttattgagtgtcctcaatgtggtcagcaaagcactaagtttcacatttattataccattacaccattcttagaaaaatgtcccaaatgttctacaaataaggaaactgagaataagggaggtaaaaattgaagattcattagttggtaattggtatggctggaatccatcctcaggtttctctagtactaaaaaataattcagtatataatacaataagtaattaaaaattcatatagaattaactcacattttttaaaaagtcatttcacaaaaatgaatctttatatatagtaggacattaaatattataagccagaaaaattatatatggttttgcacagatataaaatataataccaaaacattaatattatccttttaaataattcttaaacaacaaaacgtcttttgaaagaaaagacaattttcaaatttgtctggcaaacaaatctgccgaagagcaatgtcttctgatttaactacatcttttgttaaattttttatccccaactttcatgaaaatttagaacaaagtatttcgaagtctagtttgacatacattgttacagtgacaaaaataacagatagaaaacaatggccaagccaaaatagcacctcatgctcatgagtccttttatggtgggtcctccacaaatatatttatttcagttcttacatgatatagctatagttgtcaaagtgtggtctgcagagtcctgggcatctctgagacccttcctgggggtttgcaaggtcaaaattattttctttatactactgagatgtcatttgcctttttcaccatgttgaaatatttactaatggtacaaaaacaaggctgggtaaaaccgttggtgtcacagcacaagtcaaagcagtgtcccccaactgtacccatagtcactgtactcttcagtgacatgcacttgtcggggaaaaatacagtgcaaatttcacttaagaaggttattgatgaagcagtaaaaatttgttttcttaaatctcaatgcctgagtacatatttttaatatttgtgtgacaacataagaaagaagcattaaagcactttccttgcattttgcaaggaaaatacttgaggaaaagcatgtgtgattgagttgcaagctgaatcaggtactttttttgtgaaggaccatttttccttgaatgaacaactaacaaactatacttattcagatgtgggtgtttggcagacattttctcaaaaattaataaagtaagcctatcactgacaatttttcttgtcaacaacataactccagctttcaagagaaaattagaagcttagaaaatttgtattcaccactgtgagcttgacagcttccaaagacttagagacttttctgaaaatggtgttgatccaaatggatgtgatatttttgatgtcatataatgaagtgtctcagaagtggaagatctgcataactcagtgtaccaatattttccaaacaaccaaggcatgctgatacaatatcattcataggtaaaagatacattcgaagggcaaatttgaccaatggattttaatgtaaaaagatatgaaaagctcattggtatgggttcagattctacatatgcagaaattaccacttgttgagttttggtatagtataaaagaatacatacaattatctaaaaaggctattaaaatacttcttgcccagggattggtggctctcacctgtaattctagcagtttgagaggccaagatgggaggatcccttgaacccaggagtttcagacctgcctgtgcaacatagtgagaccctgtctctacaaattagccaggtgtggtggtatgtgcctgtagtcccagctacttaggaggctcaggtgagaggatcgcttgagcttgggaggtcaaggctgcagaaggccatgatcctgtcactgcactccagcctgggcaacagaatgagactgtctcataaaataaaataaaatacttctcctttttccaactacataactataatgccagattctctttcacccaaaacaaacaacatagttatgaactaaagcagaagcagatataaaaattcagttgctattaagtcagatattacagaaatttgcaaaagtgtaaaaaatagtaatgaagcaaccaggttttttttacatgtaaaactcttctcaataattctttttgttttgaaaatatagtaatgtttcactaaaatattctaattacattaactttttgggattattattgttattttaaataaaattatgaaacaattttaaaatttctgattcaatgtttaataaagtaaacattatattaaggactcacaaaatcagtagctctttggggtccttaatacattttaagggttaaaagggctcttgaggccaaagtgtatgagagtgactgtgctatagaaagaatgtgtgttcaataattacaattgacccttgaacaaggcacatgttaggggtgctgacccccaacactgtcaaaaatccaagcataacttgtgagtccccaagaaaacttaactgttaacacagcctactgttgactgcattccttactaataatataaatagctgacaagcacatattttatatgttgtatgtattatatactgtattctcacaacaaagtaagctagggaaattttttttaagaaaatcatacggaagagaaaatatatttattattgattaagtggaagcagatcatcacaaaatcttcatcctcatcatcttcttgttgagtaagctgaggaggaggaggaaaaggagggttggtcttgccgtctcaggggtggcagaggtggaggaaaatccacacgtaagtgggcctgtgcagttcaagcccgtgttgtgcaagggtcaattgtacatgataatatgtaactaagactaaagtgtgtttaggtatctgcctcccaactttcaagtcacttgcctaaggtagggaatacaggctttttgatttagcatcttcttcaggaaaaccactcctctgccattctcactgcaagtggctgatcctactctctggatccaggggaagctggcatgtgttgcagaacttgctaagtatagtactacattcctaaaaaactggtcaggtggcccagacaggccaacaaaggaatatttgtatttacaattttggttgtgttgctaaccctgcggatgcagcctgaagctgctggtggctgtctttgctaacaagtggaaaaacaattacagagtagccaacatagatagtagggacaagtggaaaaaaatgtatactgataatactgaactctgtaaccaacatgcttgaagacaattgcatctttggcctttctagtcagagaagccaagaaattccttctatttaaacttttataagctgaatttatattatttgcactgaagcgaaccctaaccaatacagtatttgatagctggaagtggagtgttgtaaatgacagttcttaaaatgtgacactggataagctgaggtgagagggaggactgccccattcctgggaaaaaggcaaatgctgttgacagcaaagccgccagatgaaagatgcttaatgtgtatcagaactcaaatcatatacagtcatgtgttgcttaacagcaggaacaaattccgagtaatgcatcattaggcaattttgtcattgtggggacattctagagtttacttatacaaacctagatggtatagcctatcacacacctaagctatatgatatagcctattgctcctaggctactaacctgtacagcatgctattttactgaatactgtaggcacctgtaacacaatggttaagtatttgtgtatgtaaacatatctaacatagaaaacatagaaaacatagaaaaggtactgtaaaaatatgttattataatcttatgggatcaccaccatagatgcactctgttgttgactaaaacatcattatgcaatgcatgacttgactgtaaatatcaagttttatggaatcaggaaaaagatgccagaattttggaggttgttggctacttcttttggccttcagtaagaccatataggaaaggaacgaccttcagcctcatctggcagttgcagaaggaaagaggaaaagggatttggtccttcctaagagtcatcctttctgcctgctccaggcactccaaaatggccaacagcagataaccattggcctttaggatgtgtaaatctctgccccatgctaaatttagtacaagcaggaaacataacgggaaaagagattgggatcctggtcaaccagggatctgggttccaaacacttgctgctgtacattcaaagagagcaggtacaattctactccaaaagccatccctaggaattccaccactgaggggtgaggatctgtgtgatttcagcccattgcctccaagtgtgaggcccaaatggctagggagaggggtagagcataaaggctgattgctaagagggagaatcagtgaggtttggaaccaggctgatgggccatgactccacaaaagctctggctttgttaccactgtagggagtatccaagaaattaacagagcaacagccaacagatctgtcaggagaggctgtggcattgccagtgaaatgccaaggctcagcaaacagcccagagaatgcctaactcgtagggcgaattttcagtgcccaaacccacacccacaggaaggaggaactaaaatgttctagctgttagaacaggaacttcctggtgtccatctgacgcatagctgtgcaggacaataggaaagggagttcctcccagaaagcagtgaagggccagccagattcctgaacaaagaactccctccactgccaggtcagagagtccttgctctctttgcccagcagcatgagatcattgtgatggacttgagatcaatcttcagtggttgcccttctcgccttttccaaatggaagttttattgcagtgatggcattttctctctaccaatgtgaagtggcagtgctaaatttatcttttagccagaggttgccaagccacgatgagctacatttagacccaaccaaaaaaatgtcataacttagagattctggaattgaagttgaaagcagtaactggatgagcctaagcatagtctccctttagagtgaaggtagggaattttttctggtagaggtatatttgcaagggccactttgagaattttataaatagaaagaaggctcatatggatactgggcagccaagggatggaaagataatgagagacatagttaacctgtgctttgttcagctctttaggagctttttcccattctgagtccaagttctttaggtggggctctagaactcctggctctagggctgctatcatggaaacctggccaataaagtactggatttcttcattcatggtgattacatccagggatgatcacatgaccaaagccaggacaataaaagctctccctgggtcttctgttggagctattgaaaaattgactttttatttttatttttactagaaattccagctgccagtacaacataaactaggaactgctgctggtcatttttgccacattgtggggagagcctgcccaataatgcagccaacttcaagtttagtaagcagagaaaattattttgaacttctaaatctagtcatatctaaagctggactgataagccctggttttccaaattatttgagtcaataaatacatttttgtgtactgagttcacaagccaaataattgaaattgagttcacaagccaaataatcctaacagctaattaaaataatttctatttcatttaaattctttcaaagagaaataattgagctgacacctaaattttttttttctgtttaaaagctgatgttggccagatgcagtggctcatgcctgtaatcccagcactttgggaggctgaggtgggcggatgacttgactagccaagagttggaggctagcctggccaacatggcaaaactccttctctactcaaaatacaaaaaattagccaggtatggtggagtgtgcctgtaatcccagctactcgggaggctgaggcaggagaattgcttgaacctggggggtggaggttgcagtgagccaagatcacaccactgtactccagcctggacaacacagcaagactccatctcaaaaaaaaaaaagttgctgtatttctgcagtccaagatatatttatttatttaacaaatgtaacatttcagtacaggaattgttgatttaaaaatctgtagggaaaacaaaaaaatcactgtaaactgagatggcattaaaaggtagctaaggtcacaaagatctgtattagagggtgattcccctggacaaagtgatgatgagagccaaccatttactatttattatttgtatcctacttacgtttaaaaattttttgtgtctctttgcaataaaaggtactatgtaatgaaaccactaaagcaaattaaaaactaaaagatccaaataataaaatgaaggaagaggaagttgtattgcaaatcctaggcggagtctccccactagagtcaagtacaaaactggtcgctgagcttctgaaaaggcaaagcaaaatggatatcaaaaagttccgtaccatggttatcttaattgaaggaaatacttcattaggagagattacttgcttctatcactaaagtttaaaaataactaattacctagctctttatacactagccccatgtaataaaattgagtctttaacagaagcttcataaaagatgcagaaatgctcttttcacagctcttatagaaaaaaaattggccattaattaaagctcagaggcacttgtttaattgtaaatccatgaagacaatttggatggagactttgaaataaggaaggagacacaggctgtttttagtaatgtggcttggtatttgagcagattttggagaatgtattccagaagaaagtgtggtgggtggcatgtcccttaagaccactcttcccaattaacagttgactcacaaaatcttgtaaataaaggttacacagcaagccactggaaactaaagactaagatcaatcttaggagattaagtgccaaaagaggactgctgattaaagtgatatctacatgcactaaaaatcctattatatgtgagcaaaattttacaatgcaaatcagtcttgcttttcttacaagatgaggagtaataaatactgttaaaatgcataactaaaagctttcaagattaagagtcttagagaagtgttagagtccttagagcaaagacaggtgctttttaaatttactatgttttttcactctttttttcttttttttgaggcgaagttttgctcttgtcgcttaggctggagtgcagtggcgtgattgcggctcactgcaaactccacctctagagttcaagtgattctcctgcctcagcctcccgagtagttgggtttataggtgcccgccatcacgcctggctaattttttgaatttttagtagagatggggtttcgccatgttgggcaggctggttttgaactcctgacctcaggtgatccacctgcctcggactctcaaagtactgggattacaggcatgagccactgcgctcggccgttttttcactctaaccatagcttcatcccaggttcttgaaagctcagattgccagcaaaccactagaagataccagagagtcctggaacagattctccctcccagtcctcagaagaaaccaaccctgtgcatatcttgatctcaggcttctagttccagaactgtaagacagtaaatttctactggttaagccacccaatgtgtggtactttgttatggcaaccctagtaaaataataacaacagccacattcacttgtttatatattgtctacagctgctctcatgcaacaacagcagagttgagtggttggaaccaaaaccacatggcctcaaagcctaaaatatttactatctggccctttacagaaaatgtgctgactgttgacttatctgatgagtgagatagggtaaagggtcaccaggcatatgaggtttattctccttgtctttctcctttgagaactgtttgatgatccttgctcagcccctctctctttcacacaggctgactcacctgggatcactgagttctatttgggataagagtagaagaaaataagaagacacttggggtctgaggcgtggtctccaatttagctttatcagcaataaagtgtttattttctctcttcctgatagctatacatatttctcaattgatttcaaatctgggaggagagacatacgtgattcactgacttccatgaacctcaacttcttcctcctcatagtatgaaggtgttggaaatcttatttccctcttgaagttttcccaaaaaggaagtgagtgctgacttgtttttaacctggccatatcctctctgaagatgcaattctcatgactaatttttaaattccatagcacataaaactattatacttgcactcatgctcacaaagtttagattttttttcatgctatgccattatgtatttatgagtctctgtgtatgcttttatagatctaaattactataacctttcttagattatgagcttctgagcagatttttgttcaacttgcattctggtttgtttaatagcaacacagtgctatgctgttaatatgtttcccccattaatgaagtccccactaatccaccaacaactttattcacgtaacgtaacaaggaagataattttcaagatgaaaaagacactgataataaataacagctttgtagattgagagaaaaatattttaacctctaataaaatatatctagaaatgtgcctgagaaagtcagcctctaatctgtcacctgtagcttgtaattaactaagttaacccattgatatttatggaaaatacccattacacacatgattctctctgacatcagtagatggaagggcatggaagataataagattaaataaacagttgggaaaataccttgacgctcaggcagaaaaatctggctatgattcagtagatgttcacaaagtgtaatggagaaaatggacacagtgtttgggaggaattgtagaggtcttagcttaatgatctaaatgagataatgtgtctggcttgtgggaaggaggagcagggtaggcccagcagggtctgtttgcttgaaggatctaaagacactcagggaaataactcatcgaaaggaaggacggccatggggtgctgctggagaaattgttgggcttgttacctagttatctagttaccagttgcatctggctcagcctctgtgagctggtctgggagagagggtggcggtcaaaagtgagtaaaagtggaaagagcagtttccttaaagactctgttgagggcagtgtttaacagtaggtgccacaatggaggctggagggtagggtgggaccaagggcatgttcctactctgctgttacctttgcagctgcacgctagaacagcctctagctggaccaggcaagtgacagagcaaaacacaggggcagcatcaggatctttggagggcttcagctacaccacaatatggacagtgacagatgataccatggattccaaacagtcataacaaacaaaaaaggagcctgccatgatgcagtctaccaatccaagttttagacatacgtggacctctcccccggcaccccactcccaccaagattcctcgggagaaaaagagcccaaggcttctagaactggtgggcagaaattgtagatggagtgtgaataaatgggagtggagcctcggaaagtgtgtggttttacaattaccgcttccaggttatgtggcctggaaaacaccacttacaaagatgtagaagaggaggtgatgtagagtaaaggccagagtactagaggctggatgtgttaaatatcagctgtgtgaccttggccaaattattcaaatgttctggcttcagttcctgtatcaaaaaagtggaatctttcaaatgtcctcacaaggttgtggtaaagctccaatgtgtgagaaaaccctttactctaatgaagagttattattataattacatggagtattgcggagcaggctatttagaaaaggttctgagagcactgatttacaagatatgctgccaaataattcagctgtctgctggtgtaaaaatgtttttgtgtcttcctaagccatttcccaagaaagtaatttttctcacataagcaattgtctcagcaaaacctagagcctcttgaaatgaaggattttaggagcatccacttttgtccgtgttctccaaggagacgaaacaaggaaagtgcagagatagctggcacaggagaaatgaaggacaggaaagcctctggggcactagaaagtggggaccataaaaatcttggccttattttaacatttctcagaatatagaagagtcagtgtatcagcttgttggtagtgatggttctactgggaaatcttaactttaaattgcctgccaatctttattttgcgtgtccaagaagaaccatttatcacttttatgaagccactgaaagtccacggtgagggataaaactaattattgagcagtacatgtcctcacactaaatacataatgagagtaatgggctgaaggctgtagagatgggtagtaaatgttttgataaaacaaatctaagatgctttcgacagaaagacagcccttcttcatctccactaattctctgttgcccacctggggagcaagtttctgacaattagcgattctctgtgatgatggattttatctgatagcttatctccacagtatatatagcctttcgttagccaatgacagtaacccaggtatgcatatgactttcactcttagcaaagcagtttttatatatatatccacatatatatacacacacacatacacacacatatatgttaactttgtatatataacactctcagaagtgttatatataatttatatataatatataatgtatatataattcatatatatgaattatatatatttatgtcataatatatattcagtatctataattcattataattcataatataatgaattatatataatttcatatatagttgaaatttcatatatagttggagtattactgaaacccagggcaataattaagcatatcagtttcagcttttcttacttaccttaagaacaccgagaacatttttgaatgaattccatcatcatattttaattcaaagtaaaaaaacatatccccttacatgcatctgaagcctattcagtaaactctactggtcaaataaatcttcctttgccaggctatttcttgggaatccatatccaaagttaatttgcttaattttttctcattattctttttaatgctctctgacttagattctataagattatctttttattggttaaacaataacaaatggctttggtcatcataaagtccttcctattgggttaccacctagagcttctctgtccatggcccacaaatgcctcctgagctcttgggatgtggctagtccaaattgagatgtgccataagtgtaaaatacaaaccagattttgaggacttagaacccctcaaagaaagttacatatcaggccaggcatggtgcctcatgcctgtaatcccagcactttggaaggatgaggagcaaggatcacttgagcccagcagttcgaggttgtagtgagctatgattgcaacactgtactccagcatgggcaacagagcaagaccttgtctcagaaaaaaaaaaaaaaaggagggagaagaaaaaaaagtaatatgtcagtaatttttgtgtgttgattacatgtcaaaaatgataagatttaggatatattggtttcaataaaatatactattaaaattaattatacctgttccttttactttttttaaagtggctgctaaaatattttaaattacctatggggctcagtttgatgggcaatgctgaactttcaactctgcatcataggtttttatcacaatgttccccccaccctattcaagctcatcctgccctctttttttgtcccatgggcattaacatcaccgctgaacagctaaaacccaattcgttttgcctacctctacctcaaccaaagaagagttccttggccctcatttgctggaggatagatgtaagaatttgatgctactcatatagcaagtatgctggtcctgaagttattccattagaaattttaaaaaatggttttccttattcctaaaatgatgtctgaagacttaaaccaaagttggcagaacaggggcagaatgttcacagatgttcctactggccctgaaggcagaattgactttctggaaaattacatccagtaagacagttctacatggagtgaaacaaatttagtcctgatattcaagggagtgcataaaggttcctctgataatgtggagttaattaaaagggatggccaaactgattgtgtttgtcttgaaggaagttcataggcagtatcaatccagctcaagggagcaatggggctggatattttccaagcgtttgccatcaacagctggacatactcttgcaattgtgatttgccattctttttacgcttctgatatttttcggacaaataaatccatacagagacatgtttataacaaaccattgtcaatccatgatgtatacaaacctgcctcacaataaccagactgtactgagaaccgcctgccctgtctctgtgtcctgtctacctactggctgctccctgccacactctttctcctcctctacatctgcttctgggactcattatttaaaaacaatggcaaaaacaaacaacaacaacaacaacaacaacaacaatcttgaagcttttagggaatcagtgagactagaagttgggggcaggaaaaggctctgaaaaagcagaaacaacttccaggagcacagacttctagacagggctagtcagcctgtgttgtgcccatttctgaaacagtttcttgtgcattacttggtttgctttcattttactgttacactgccaaaattaccccccatcccagatttacttgggcaagacaggatctgttaaaaatgaagatacttcaagagtgttaaagtataaatttatccatcgaattgcccttctactttggactcactgcttgtattcctcaacagtaaggacagcaatctaatttcaatatgaagggttagaaagccgcctacctgtggctactcctgaaatccaccaagataacattcgtgcagctcaaaaagctatgccaaactgcctctcaagttttctccagcaaaatgatttgaaaactaaaaagattcaggagacctcatttttgttatgcaaatatgggaggggaggtggggcaccaatttatggtcctgcggtcttaactgtagagaaggaaatttcccaagaggtgacagctgtttggggagggtggggaggatgatagggctgagtagaggcaagtggcacagtttgataactcacctgtcacactcactctccaggaacagctgtgtaatcactaaagaacctgaacttcaagacgctgatatttatggccagaattcacagtcacttctgcactttgcataccttgatggagacttttctggatatttaaagtctgtaggaccctgctgtttgtgtatgaaccaaatctatttctacccctggtcagagcctcctgccatgggctaggctattccaatgggtcctgtcttccatgagtcatataaggtcaaggcacatgatgacaaagattctctgcttgaccaaacatctaaacctcctaggcccatctgagcactttagcaagaaccctgctaagtcagcttaacaagcctgcatacctgatgcccctcaatatctgatcagattcattatgcatcaccagcccccaggtgatgatttctgattaccctggcctgtcttcagcaagaatcctctcaggtgggtttaggcagactcccactcctgttgatgatatttcctcttggtaattttttctttctttctttctttctttctttctttctttctttctttctttctttctttctttctttcttttctttctctttctttctttctctctctctttctttctctctctctctctctccttcctttcttccttcttttttctttccttttcatttttttttaagatggaaccccatcaccatgttggtcaggctggtcttgaactcctgacctcaagtgatccacccacctcggcctcccaaagtgctgagattacaggtgtgagccactgtgcccagctgggaattttttttatccactggcctccaccctcctccttggctataaattccaacttgcccatgctgcatttagagttgaacccaatctcttccccactgcaaaatctcattactgtgattcctatacctatcttgaagtgctttagcaagcgccattacataatttttttagcaatgaccaacttaaaaagccacagaaagcatcgttgatggttaatcccttaatctctgttccaacttcataacacagaaaatcaacagtggagagaccttgaaacattaggaaatcattatttctcccgtctttttgtaagagatgaggtattcgtaatatttccaagtcctgcatagagccaactcaacacaaaaacagcaattcttgaaggtctacacagagaaggcactccataaatatttgcaggccgacttgttcaaatgtgtttttaagagcactgcaaaatgtataccttgctttacttgtaaatgtgtattttctctaaatatcctcttctcatagatatccagtcattttcagttgccatctggtgcataatttctggcacaggtgtgggctgcccaggtctgcggagtggagaatttattgcaacagtcgatgctgctatccattcaagacagaggaaacatgtgatcagtaaaggctataaaacaaaccagaatgaaagccttgaatttttcagaaatgccatgtttaaaagtacttctttaataattcagaggagaaatatgtttgtctggtagctggggtgatttcatgggtggatatatctagtcaaggcctaaagaatgcagtggccacatgcggttgtgactgcatattttcacccacacaactgggctgtgttcctgagacagatgctgttttacacagacatggcttagtaggtattagtcctggcaaatagttcccaaagctgcagaagacataaggacctaaatagcctagaatagttcatcctaatttaatcataaacacagtataaagtactgtgttttatactccaagacgttacttttctttttaaacaatagcggccagtctaacttcatctgctggaccactgtgtacattcagcttgcccctcgggtagtgctacctcagcctggtggtcaaagtcattctgccttccccacagctgctgtcgtgaggatttgcttcacatacacttctgatccctttgttcttccaaaaatccttggaacttccccactgtgcatcccaagcagggatccctgtgattgtcatgcaggaaataatggcgaggaagaagttacatgaggcaggagatcccccatgcccccaccacctggggcttctcttctcccatatttccatagctaaagtacaggcttttccagctaaagtacaggctcatctgtcaaatctctatcccccacactaggtctcaactcttacaaagcctccagatattccttcattcttacttagcttccccaattagagtctaggaagttcactgagcacaggtggccttgaaaggatagataagcattactcaggacccatcacctacctgtctcatctccaaccaacgcacagtcctagccccatgggaacgactcgagctgggagagcccatgccctcagtatttgtcaggaactgagagtcacttgtttggcagtcaggcctagattcacaaatgagcacatgttcctcagacatgttctacagggcagtgaattttacacatcaggtaatttatggctgaaatagggttatgcaggctagcctgtgaaactaagaaaataatgtcagatgaatgaaggtacactagattgaagaatttgttttctatcttgacagaaattcagccaatggcaatttttctctgtgggagcttctgagttcatgatagttgaaagaattagaagtgagttgactctttagaagttgttctctagaataggaaaacagcaagggaaacagaatctattgtctatcttcctaaagattcacagctagaacagcatcaaatgggttcctctgccacatgggccccagcttgcatgctgcctgtttacatgttaccatcttggaaggaatgcctattatagacagtggtagtgaaagcagataatagaaaaagatgttcagaggataagtagatgtcagtattaacacctgaggatatatatttctcctctccactctgtgccactaagaattgacagattatgattttgtgaacggaccggaaaattaaatattccctatgtttttacacaataatttataaagttattctgtccctatcatgaatgagctaatttggaaagaaattatctatccaaggataattaagagcttactacaaaaacaaagaaacaagatgaaaaaaaatactattaggaaagcagctaaggcaagtcccaaatgcctctttaataaattacattcccttaagaggcaatagacaatgagttatagcattaaactaaagataatggctttttcctttttaactttcattgttaatttttaagaaaatcaataaatatctaataaatactttcttcttgggctgaggaatgttccaagtaggaagtcttgtgtagaagtttaatactatttatcaggcattctttacgaaaaagaaacaaaatgtggatcacagtaaatataattaagatgtgctatatttttctttttttaattgaaagcaatgtttttacaaaataaacttcactttttagagcagttttaggttcacagcaaaattaagagaaaggtacggacatttcccatatggcacctgctccactcatgcacagcacccccatcatcaacatagcccactgtaccctggagtggtacatctgttacaaataatggacctccactgacacatcattattacacaaagcccatagtgtacagtagggtacactgttggtgttgtatattctattgtatattcattttgacaaatgtagaatgacatgtattcaccattatagtatcatacacagtagtttcattcccccaaaaatcttccatgttctgcctatttatccttccttccacctaactccagcactcacggattttttactgtcttcttaattttgtctttttcatgtattaacagttgaagtcatacagtatgtagccttttcagattgccttatttcccttggtaatatgcattacctttttataaaggcattacaaaagctctcttgtgtattggtagtgacagacagcatggagacccagacttgagtactggttttgcccccttgggcaagtcacctacctttgctaggccttggtcttctcatttgtaaattcagcataacatgaatagctaccctggtaactttgccatgttgtgaaggtcaggttttttctctagaaaattaaggtagtaatgccttgcagggctgttgtaaggatgaaataggcaatgtgtgtgagagcttagcattgtgcgtggaacatattccatgttcaatcatggcagttaacaatgttattttattatcacgtgtgctgaatattttccatttgactatctgaaactactctctgcttttttccaccttgttctgtggggcacagtttctaaagaatggatcaacttagctcctttcctcctgacttctccatggattcagccagcaggaagtcccaggaggaggttagaagatgggaggaggaagaaattgggtatttattccctgagcctcttctttgtcaggcagaagtttggttgtggctgtatttctctgtgaaggtcaaagatcttgctgagccaccaacactttagaattgttgatttaccttaaccctgcccatatcttgctgagtaatttcttaaattatccctttctaggtaatttttaaagtttctcttgtttactgtcagaaggacacatgatgtttgcctttcatatttatttgtaaaattattattacctttttacattgtaaagcagacaaggcatcataaaatcaagaactataagcaactgtatacaaccttgcaaattattacttaaaatccttctatatctaacactggtcaggacttatgaaggcctactttcagattcaatttttaaaaagtgaaaaaaatttaaaagattcaaaaaagttataaatataatgaaaagttgtaaaacgtctatagaaaaggttggtcaattttttcctcattaaaaatataccccaaaatgcaacaacaacaacaaaactctgtatattattttgagcttggtagaacaaaggcaattttcgaaacaaagtggattgaatattagtagctgatgttttctagatgtgattcccactcttatgcctcttttctggatctccgaacagtgggagacagactaacccgacagggagacttttaaacatagttcaaggagatttgcatttgcagcataagtttttactaaaaatgaagagatgaattgaagtatgtacaatccactgccatggttacaatggactaaccgttttaccttcagcaagagcatttttttctaattttataaatattaacaactatatatgttctcattacaaattttctcatgttgtaatgaaacactagttaatgctaatgttaagtttgaaaaaacaaacaagaaaaatagataatttgtgaacacagtgctgtttttaccttggtgaattacaccgtatgaacagggcaggacactcacaccaggggcatatgtaagaaaactaaaacttactttagtttttggttgagttccagttgacatttggcttggcacaccatcaagattctggatgtttgcagttttagttctacaaattcctttcttctgatgatttttcttaggattactctccaggtttatagaatcctgtaaaaaaattttttaaagaggtttttttcatatataaaggactatccttaggcaatagttcaagttaattaaagactgttacatcaataaaaatttttttaaactacaatcattttgaaaattgacataaaatgtaagaatattcttaaatattaataatttttccaaagacatttttggttagtgagatcagccccagtaaagcctaaggacttgataatgtaagtttataaactaaaagtgattgtaaactctcaagataaattatagaactatattggcattttttaaaactttaaaaacaaaaccagaggtattttatgtatttattataatcttttattttttaattgacaaattaaaattgtatatatttatggtgtacgatatgatgttttaaaacatgtatacattttaaaatggttaaatcaagctaattaacatatgcatgacctcaaatacttatttttgtgtgtgcggtgggaccacttaaaatctactctcggcaattttcaagtatgcagtatattagtattgattgtagtcaccaggttgtgcagtacatctcctgaatttattcctcctgcctaaccaaaattttgtattctttgatcaccaaaagtgttttattttagtttagttttatttcatgattattttcttagagacagggtctcgctctgtcacccaggctggagtgcggtggcatgatcatagctcactgaagccttaaactcccaggctaaagcaatcctcctgcttcagcctccccagtagctggtattaaaggcacttgccattatacctggctacatttttttagtttttgtagagacagggtctcgctacgttgaccaggctggtcttgaactcctgggctcaagtgatcctcctgctttggcctcccaaagcactgaaattataggagtgagtcaccctgcctgcctccaaatgtgtttttaaaactgaagtaatattgaaaaactgaaataataaaacgatgttcatatagagccacaatggtcttttaagccttatgatttcagaccatatgtggtaatagtggagaacaatttataagattatatttctgaaggttaactatgcaaataaaattatttaaaaatattaatatattagtataaagagaatcctaaaatttctaaatacaataaaagttcttttcaagaaagttggatgaatttttatcaaattgaagtaataagtttgtctttactaattcctcccattgcttggaagtcttccacatctctctatgtccaagttatctagaagcctctactgcaatgttctgtcttggcatattccgtctggagaaagtatcagatctgcggaagcaggaaaggctggagatgtaaatctgttatttaactaattttactcatagattatcagaggttgtttttggtgggagggggaatgtagaataaacctacttgtacatgaatctagcactgccaaatactagctacctaacagtggacctaagttcctcaaatcttaattcgcctgtaaaacaatactttttgacatttattcaacacttccttgtgcctggcagatttggcatctgccagaatgtgagtacacaggagcatgccaagtctgatgagaatttttaaatgtgctgcttaaaaattatatttctcttgcttacgatgttgcttatgatgacaataacatggtgatgattatagtagctaatattttctgatagttactgctgtgtactttttttttttacaggcgtgagccactgtggccggcaataattgtcacaattattaaaccatccttatgcttgtgagagcaactgtgcttggctgtgacatgcaattcctttcaattctattgaattttgttagctggtgttttctttggtatttttgcagccatattcatttatgccctgtgttaatttttctttcaagaagatattagtttcataaaataaatatggaagctatgaatccttacaaataagttatatttgtaatatgtagctgagcacttagcacagcaactgaaacagggtgaacactcaatacatatttgttaaatgaagaccgaattgcttatttccatggctttctctgcgtgcttcttccctaggaccctaagttttagttgacttttgtagccaccataccaagagagcaaaagagtagttaggaatgccagctgtggagctagagttctgggttcaaagccaggctctgacacttaacaagctacagactacagactacttactttttctctctgtacctaagttccctcctctgtaaaactagaagtggtaatgctttgtactctctggactgtaaggactgtaaggagtttataagggtaaagcacttttaaaagtgtgtggcacatactaagtgaggagttaatattaactattattatgttagtacgtgacaggtaaattgattaaagaataatgaaaatgtaaagatagagaacaggaagacaatacttcctgtgtctctgagctgtcctgaggatcatgtgacgtgaattttaaataatgacagtggtttgaagtgttgtttttagaaccattacaaatggggagccccagtggtcaaaagaagagaactgttttgttctttgacaagaaagcgacacagctagaaaaatattatttattaagttttattccttagaatttttcttttatattttagcctcttctatattattttaaatacatagttttaagggtttaatttaatatctttgtattgcaaaataagtgaacaagagttttccatcaaacttcattcttcttggaatgtaatccctgatttttcaaactttttttttatgggtctttatccattacttactttttgtagttcatatattactcaaacaatacctcttcctttgttcctttcccagaccccttcccccacacaaaaaatttaaaaatgccatccttatagtcattctgtaaggttgctatgaataggtaatagtctactacagtcaactttactaatgtaataaacattactgaatagtttctactacatacaattgagcaataaaaggaaatcaattatgaattatagaaaaccaataataaagttctcctcctaatctttgcccaaatttcatataaagagaacttaggaaaaaatttctgagttaagatatttatatggatgcaaatatagcaaagaatcaggtggtggactgtccaagccaggagaaataaagagttgattcctttattcatcctgttctgttcagaataaaagaaaaaaataaaaatacagataggtaacccctttgtttaaaaaattctaggacatttctgaaataattatacaaatttaaattttatataatatttaaaattatagcatgctatttttaaatttcctgatttgcaaagaagaatcttactcagatgatttgaaaactaagaccatcatgtttaattttctagaggaaggcacatttataaagaaatatccatattttaaaacatttggaatactattaagaacccgttaactgaccattaatatccaaaagccataagtaatgtaacactagtttttggtcccaaatataaatgaaattggctgaatgtcagagcctagcatagactgaaagttgtctttgacatttattcttcaggtagtagatttgtcctatatctcaacaaagtagtttgtgtaatgaacctccagagaacattcaaaacatgatgaagtttaaacacatatcaaagttttccccagctaagctaatattatatatatatatatatatacacacacacaatatacagatacatgtgtgtgtgtgtgtatatatatatatatacatatatatatatacatatatatatatatatactctttttttttttgagatgcagtctcctctgtcacccaggctgaagtacagtgacataatcatagctcactgcaacctcaaactcctgggctcaagccatcctccagcttcagtctccgatgtagctgagaccgtagggtgtgccaccatggctggccaacttttttttctttatttttgtagagatgaggtctcgctatgttacccaggctgatctcaaacgcctggcctcaagggatctcttgtctcaacctcctaaagtcctgggtttacaggcatcagtcaccacacgcagccctgagctaatataatttgtattgaatttatctttaaaaatgtttctaatctcagatcttcctataacagacgaatttatttctcctgctaaattagcaagaaagacaccactgattccacatctgagaaataagaggccttccagtttttcatacttcctagtgctggtcacgagatttctttttttcatcatagtaacgatcatcttttcagtgcttatatttactgtaatgaaagtgggctgctgcctaagttcatatcatgattcctctgcttactgtacaggaaaccagtaataaaattatcattctaatttttgccaaaatttcatgtaaagagggtaacttgtgacttcagccaattacttaacctcccaatgcctctgccatctcattggaataaatggggatactaattatatttattcatagggttttatttattacttcctgttttattttttggctcatattttacacaagatattgacagaacttcaggaagccagagatctaactgtgttatatactttatgagagccatgactatgctctttctgatggattgaatactgcaaaaaaaaggaaccagggaccaaacataacagactaagacgaaagttagtgccctgttgattgaataacccaaatatctcttccaaatcccatgatgtgatctgttgaagatgcatagaaactaacggaataaagcatgagatgtgagaacacagaagagtcatcatgatgtccagttctacttaaaaattacatatggaacaagcttttgtagtttcatgcctttatttttcacttgtacatagttgatttagaaatctgcatcttgttactgaacccaatggtgttacaacgaagtatatctttggagccctcaattcctgtctcattcattcacttattcattcatccagccagccagtcattcattcattcatatgccaagtgttgtcccaggactgaggaaacaaaaataaatataacatattttcctcaagacctctaaactaaggagaaagggtcatatagacagatctatcaaaaggatttaagccaaagtatgtacaaaacgatatgggaaaacagacaaaaaaagcaagtaattctgcttaggggaaaaggaagtgttcatagaggtggtaacctttaaactaaatttagcaggaagaatagcagtatttcaggggatgggaatccaaaggcatgaaagcacaaaaacaatacagcatgttcaaagaatagtgaggattttatctgagtccatccaatgatgcctagggggtaccggtagcaaatgatctgtagaaggtaaatggggaaccccggataagaaaccacatattaaggagtttgaaattttgctgtaggtaatgggagccctgtgaaattttttattgatgtgttttacaattgagaaaattagaaaagataaggagcctacataaatatcaaagagttaaaaaacatgcataataattgctggtatcccaacattttaaatttaaacttaattctcccttgcctctactcatgttttttttttttggtgaatgcttcttcaacaccttatttttattgtgaaataaaggagaaatacagagaagcacacaaaacagattcatggcttcataaataaaggtgaacaactctttaaccaccaccacatcaagaagtcaaactttgcaagaactccccgagccaaacccctccaaatatcccataccaattgcaattctcttttcctcccaccataagtaaccattattctggcttttacagtaattatttccttgcattcttcattctttatcactgagatgcatctttatgtgttcatgtgcatccttaggcattaaagtgtggtcttgccccttcatacatttttttatgtcttttgtgttttcatctgtaatttatttttgttatagtttatctgttgaaaaatccaagagttttcccaatctgaattttgcaaattgcatgttcaattgcatatttcaacttgttcttgtcttctgtttttctgaaaacaaggagcgaattaagatttgggtttaatccgtttggcatgactataggtagtgttgtgtgcttccatcaagaggtatataatgtctggctgtctttctttttaatgatattagcagctattcatgcgaaatacctatatgtattcattcattagaggctgcaacacagtgatatgttaattcttttttcatctatgaattggaatatgtttatacagagatattttccctcatttactatttggctacctagtgttacagttcatataggaaagcagaatacttcatcctttcactttatttattagttttcaagataatgaattggttccctattgatatggtttggctgtgtccccacccaaatctcatcttgaattgtagctcccacaattccacatgttgtgggagggatcaggtgggaggtaactgaatcatgagggcaggtctttcctgtgctattcctgtaatagtgaataagtcttatgagatctgatggttttataaaggggagtttccctgcacaagctctcttctcgtctgccatgtgagatgtgcctttcaccttccaccaggatggtgaggcctcctcacccaggtggaattgtgaacccattaaacctctttcttttgtaaattgtcatcttgggtgtgtctttatcagcagtgttgaaaacagacaaatatacttatcatgctctaaaggcaatcagctctttttaaaaaagtatcgttatgaaccatgtatttaaatatatttgacaagtttcaatccattgcaattattcttgtgaatgccattcaaattattctgtccttagctagtgggtgccttgtcaatttggtttctgagaccctggtagtgtttgatagctactttgccatggtatgtcaagctgtttgtcttgtacatttccttccttaagcctagaaatagaagtttctcctagaagacctggtttctttaaataaggaattatttcaagaacacaatccaagcaatagggacagtcattaccactgtgttggtcattgtttctaggtgttttcaacagacatagagatagaaagggagagaagagagtggtgagagagagaaacctcatgagttcatatccaatacttccagtttgaatgtaagactacaggacttttacttagtctctaatctattacatctgtatcttttttcttccaaactgagaatcttggttctcaaggacacagactatgacagaattataatattccataattactcatttgttttttatctcatattatacacttaatagtctcaaaataacaatcctaatgctaccaccaacagaagtactgaaaacactgtaaaaggttttgcatgtgctgtccccccgtccccatctttttagtgattatatactattttctcttcctcttagccttcatttagtcttagttctcctacgaagtctctattgcagctcagcacagtctataggctgtcgttctgctcacctgttacctgaagctcattttctagcaggctcttcaggaagatctcatagtcattgtgccctttttgctacaaagtaagtttttctggacacaaagtgcttggcacatacttttttcccttgagaatcttaattatgttaccttattttcttttagcctaatgtattgctaatgaaaaaaactgaagtttatctaattatgatctcttataaatcatgtgctcttttcccctctaaatagtcaaaggatttttaaaaaattaaaacccagtaattgtggtagagtgtcttgatattataattctgggttgatctttttaggtgtatggagaactctctcaatatgtaacttctaatcttttttatttcaggaaagttttcttgaataataatttttagcatttcttctggtccctggatttagttttcttcctttatggctgtgcttgtaagaaatttttctatcttgaagtctgaaaacattctgtttatttttgtcaaagttgtaatgctttgacttttacttgtatgctattaatatacctgggatactgtgtgtacaaaattcctttcatgaaaacaggagagaaatttatgtcatttgggtataaaaaagttgtacttctgagcaattgtttatttatatctcaagtaattatgaactaatctgattcatacctggtgtctgattccgacatgaggaatccaaagggtagcagtggtcttgtaagatgattactgtatttccacacaaaactgggtcaaggaagtacaagtggttcttgtggaccagatgggcaccttccaggtgaagaaatcagccacaaaatttttccaaaggggctgggacaatgggaccccaacagaaagaacccaggtgaggcaaacatatcagtcacccatggctaaatgttggcttaagtcctaagtggccagtgggagaaaggccaatccgagaattgtgtcactggagattccaggcagaggaacataaagaggtacttttagtgtcaatcaaagccccaagaatgccagttccagattgtcagagtagtgaccatgtaaacctgggtcttttcccccagtcctttctacctagtaagaccctggaggatgagacactgtaggtagcagactgggtgaggagcaatagagcaagatatgaaaacaaaagagaagccaacccccacaggcctttctgcccatagcaggtctcagcagtgggaagcagctttaaattaggtaagattatgaagctatgtgattataaatggtctgaaagttctgaatatttaaatgaaactgttcttgtgccaaaaggtaaccagaggatgttttattttaaaatgattggaaatactatggcacccacctgataaatcattcaaagtagagaagaaatattccttgcacatatttgaaggaacaacagaaagaaaaaacaaagctcttttttttttgttcaccctatcaagttgtttccattcaataaaattattacatctggtaagtaagtggatttatgcttatataaactgaaaaaggctaggaagtacatggtaagatcacatgcaaatttaaaccaaagcctttgcttacaatttccttgtatttgatgtcaataaaactttcaaacacctgagcacctcttccatggagacttccccagccactctgatcatgactgtgaggactggatataaagctctaggcacatgttcagcccttaacaaatgctgagtgttaattatgctcttctctgctctcacagcacacatcatcagaaggtgttttccattacatgaatgtgtctcttttcttcaattactctcaaagttcctagaaatgaaggacatatcttatacttactttatgttcatcagaattctggtcagaacgttgtgcttaggacttttcaaaagtaactgacaactgatcaataagtagagataagtggagtgatggtatcacaataggaatgctctggggcaagcaaggaaagcctactagcaaccctgaaatcactctttttgttagctgggtgtacttttcactttttctatactctcagatttctcatcaatagaatgtctattttatgtcctagagtctcctaccataaaatactaggcctttacaaattatattattttgagttatcagacttttagagtatcttctttggaatggtattcaagctcagggagagccacatgaactaactggatgatgcattgctctgtgtaaagtttcctctaagcagtttaagaatgttatgcaccagacagggaaaatagttgaagaagtaggacagaaagaagtgtgtattttctgtctggttttaaatgtaattcaacaggtagacattggatttcaacatttttaaaaaggtctcttgtttatccttgttttaaagatatttgaaactacatgctgttttttcatacatgtattttgtgatcatgtactatgttaagcaggagaaaaggaaccttttctaatgtatttttttatatatagaatacactgttgaaacactattaaaatgattatagaacatttcagtggcctttggatatatttaaattcttctaagtgtctagtataagcactatgagattaaggactgggcctgttttaacattattttataaaaacttattttccttttattattcaagttatggttatctaccatccaaactattcatgacaaatgaaacactaaccccaaagagggaaagcagaacaaattaaaatgtaccattttcttgatgaaagaagatgttatgtccaaattctggacataataaaaggagaaccgggccgtttgtggctcacgcctgtaatcctaacactttaggaggctgaggcgggcggatcacctgaggtcaggagttcgagaacagcctggccaacatggtgaaactcatctctattaaaaatacaaaaattagcctggtgtggttgtgcatgcctgtaatctcagctactcaggaggctgaggctggaaaatcgcttgaacccaggagacagaggctgcagtgagccgagatcatgccattgtgctccagtctggatgacaagagcgaaactctgtctcaaaaagaaaaaaaaaggagaaccaaatgggttttcttcattacataaatctgaatacgactggccaaaaataaaagcaaaagtgaaaaaagcactgactggaaattttagccccaagtcttcctttaaacttaatattgatgatttcaaagtttagaagagttacatacaaatattcttgaactataacaatttcaaattgatacaattaagtaaaatatattttgtattttaagttttaccacagagaatcaaaggcaatcaattaaagataaaattgtattttagtaacttaaaaatacaacttccaggagcagatgagaaagaaaaacatcaattaattgttttgattttcaaaataacttaattatattaattagagatataacaaaggcctgctccaaaggaggagaaagttcttagaacatattggttgttttgcaccaaggtcaactttattttgaacataaaaaacttacattctttctcttaccacaaaagctgaagtaaatatgttctagccctcaaatgtgactattggtgttttggggataaagggaactttgcccccttattgatggcttcttgtttctttacaataatcccattcagggaaataaaaggcacatttgttttactgattccatctaagcatattatacaaggcgagatggcagtccgaaaatctatacttaaattattggaatggaagaggactgagtgatcccttatagaacacacagaggtcaggcttacaccccagttggtcctcatcatgatctggaataagagcatcagtgatttgggggacatgaatagagctgggttatgggaaagctactctagatgtgacattccattttccgtgtgtgcatgtaaataaattaaatatataggattgtcaatcctcagtgatacagttaagagtactgaagactcaaaggtggaaaataaaatggtaaaatggtgaagcaaaacagaaatggcaaataagacaactaaattgtgctggccattatttaacatgccattacatcatacgtatttttaaagccaggaatttatgaaatttagtgtaacatcatttggactgttttatcatcaataactgtaagaaactttttaattgttccaaactgcatttgtttattctataagttaggaaaatgaaaactaataaaaaataataaagaaaacgaagcttaggaaataagagtatttgattctgaaatatattttcccatcatgggagagtctcctgaatctgagaatgttgtaatattactcagtctatatttactgcataatgattatgctgtcttggtaagataaaaattagataaacattagggatgtatatgagaggtgacaataaaaactgaagtcaatgtcttatattcaagggatttataactctctctgggctagcacaatctgaaaagcagaattaaaagggaaaaactggtagatacctcttttaacgaacactcaactgtaaaaccacctggttttcctctttaaagaaagaagaaattgcttctgccagcttactgaacagaacttccctgtgatgtctgataacagcctatactccaatctctgtaaaagtcacactaattattaatacactggagcagagttcaggttccattttgtcatacagtcttagtgaaactgcctcattatattgttctatcggtttgttagtaacaaaattcccttgctattcatattagagctgctttaaattttattccacattaaataaactttttaatcagattttcttttaggttattttatcatagtaaaaattttattttaggttacaaaaacaatttcaggattcattaaatagcagcaagagagcaaataccacgacttgagcactacagatgagtaaacttccagaacagttctgagcacggctttcaataaaatgaacaagttgtttacatagctgtgagaaaggttattgtttcattggttttgcgtcctagtgcagcattcagcatttagtgggagtccaatcagtgtttactgaataaaacaaactaagtgatgagcagaaatctggaaatgttgtggtttccgaaatactgctgctacgcagacaagttatgactaacattcccccttgaagttaaaactgtttgtataaataattttaaaaacaataaagaacccactatgtatcagacattttacaaacaatcttattaaaacccagtcttggcaagtaggtatcttatttgacactttagggaaactgaggctcagaaaagttaaataacgctcaattacacccatgcagaaagtgaggggtcttggattaagtcctgatcattcgatctttctacagtacactcacagacctgtgggcaatgttttatataattattccttgaaattacggtaaaaaatcaaatccactctcgggcttggccgggaagtgtatatttctttactggcataaaaaaaaaattaaaaaaccaacaaggaaaagaaaagaaaagatgtatttcttcttgcctgactagaacatatgcttgtattttaagagtaccaaaggtgacagactgaatttacagctacagcatagtcatgtttagctcgcctggaaacagaactaccctgatctctcagcaaaaggaacagagggtgcttccccatacagaagacagagtcaggccaactctaaagagaactagggcattgcctaggaacccatctgtggcaagggggtaccactgccaggaggccccacaaacacctctggaattaagacggaaagtcacttccatgtcttctgtgttgcttctgatgtttagaaacaaaaagtattgacactagttcagaaaaatgagcctatctttattagcataaagactctcagattacgaggatttaaaaaaaaatgaccccgcctctgaaccgtgaagaactagggaaatctgagtaaaatacaaaaaggatcttgagagggcaagatcccgaagaagggtgcagaaaattctgcccatatttgactctctttttccccttaccttattcatcaatttggaagttgtttcagaggctgagaagttacacagataatggcaactaagaagcagagaagctgagaagagattgctttcaggagtccactgattgagaaaataaaaatgcgagttcagggcccacgaaagagggaaggcctaacacctcggcttttagctgggacacagaaagggtcacctcaggagtaagaaagaacctgaaatagacgagacctaacaaagtctaaaaaccagtttgaaataatctcacttccatattagattaaggtgctctgcccttagcctagcttcctaatagaagcaaaagtaaatcctacaaatacttccataaagtaaaaaacaccactcagagcccagtatttttttttttttcataaacaaagacaacatttcataaagaatttctgggcataccaggaaacagaagaaaaagataatggaaacaagatccacagatgatccaaatactggagttaatgggcacaaactatttaattttttttttttttttgagacggagtctggctctgtgacccaggctggagtgcagtgttataatctcggctcactgcaagctccgcctcccgggttcacaccattctcctgcctcagcctcctgagtagctgggactacaggtgcctgccaccatgccggactaattttttgtatatttagtagagacggggtttcaccgtgtttgccaggatggtctcaatctcctgaccttgtgatccgcccacctctgcctcccaaagtgctgggattataggcgtgagccactgcgcccggccttgcatttattaatactagagacgtagaatctatgcataagaaaattctagaactaaaataaaatgattcaacaactgaaaacttaaactaaaaaaatacacttagaataaaaaccatgaaatgtgttggaagaaacttaacaatgtatgtgcaatacctgtatgctgaaaattacaaacagaaattaaagatcaaaataaaaggagatatatgccatgttcatagattggaaaactcagtatttttaagatgtcagttctctccaagctgatgaataaatttaacagaatcccattcaaaatcccagcagatgtttttagaaattgaaatgacaatttaaaaatttatattaaaatgcaaaggacttagaatggccaaagtaattttgaggaaaaaaatacttccactatctgatttcaagacgtataaagctacagtaatcaatacagtgtgggactgggttaagaacagacatatttatcaatgaaattgaatagaatagaaattcagaagatcggcagatttttaataaaggtgccaaggtaattcaatgaaggataatctttttaacgaatgctaccagaataacaggatttctattttgaaaaatatgactatcaaccattattgtgccatactaaaaattaagtggatcgtaaacataaataagatatattgtgaatctcagaaatgagaggattttatgaacagctttatgctaatgaatatttggatacgtacaaatccctacaaatatacaacttacaaacaaaagctgctctttaaaagacacttttaagaaaatgaaaaagcaggccacagactgggagaaaaatattcacaacatatacttctgacaaaaaagtcatacgcatagtatgtaaataactcctacaactcaattacaaacaacttagttttaaaatgggcaaaagttttgaacatatacccacttaatggctaaaactaaaaactaaaaatagcaagtgttggcatttgataaaaagacctgtcacccttttaaactatagtagttcccccttagcttcaggggaaatgttccaagaacctagtggatgcctgaacctcagagagtaccctaccctaaatatattatgcacgaatttctttttctttcttcataatttcacagatagaagactgattcttaccaaccacttggttcctagtgaccttaggtgattccttaagtcgagaactttcaccttccacttaaaggaagcacattaaggcttcttttggcatatccaaattgccagtatcactactattgggccttggagacattattaaggaaaatataggttatttgaatccaagctcagtgatatggtgatagttgataactgtgatagtggatgctgaacaaagggaggatacacgttctgggaggcacagagagaggcagcatgagatttcatcacactacttagaacttctagcaatttaaaatttatatttctgaaattttccattaaatatttttggacctcggttgacagttggtaactgaaactatggaaagcaataccatgtataaagggggttcctatacaaggatgtttgatgagtgcagacacaaatagattcgatggtgggaatacacaaaaattcttggcttatgctcacaattcttttttcaataaagtgtgaggcaaagtcattagttgaggaagttgataatttgaggaaggaaaagaatgagatatttggattacagaaggaaagggcaaagtcagtaaagcaaaggagtaggagagctgatcaatatgcagagccaatttaggtgtgagatcacactagtccacccaacagttaacaggctgagcccaagctcagaaaagataaatgcatgcaggagttcatccatggtttgagttttgccagggaagtgctaaaagtgagggataagagttgaggatatttgcaaaggagtcaatgccactatttctgaatatatgtgtactctttgaactgtgaagggctatgttactgtaactttatagtataatggtagcaaaatgaagcaatccctcaatttaaggttggttatatacgatgtagagaaagatgggaaagtcgaaaaaaaaaagtaagcaactaaatgggatatagccaaagctgaagtatgcaatgatgaaataaactgattccatattccacacatttgattttagggtctaaaagctattttgcaatcttccagatcactctttgaagacctattacagcttcagctctgacctctttcacgtgttttctagtatcttccaacattttccccttttcttcccctttggatatcctgcctccttcttgccctatttctgaccaatcttgaatgatattgcaatatccccctaacttctacataaacaggtgccatagtactcctcacgtcacagcagcgttttttccagtaccaactacccagactatcaaacggttttagcaaaaaacaatgaaatacacttatttggcaatttcggacaatctttcttatatcctccggcccactgctgtttctttcaaaatatctacttaaaagcctgtattcctttccctctggcttttacaaggattgtttttatataggccctggactgcaaagagctttgaaatccagataaaagtgtttaccaaggctgaagaaattttccaggagaactgagcactttgcacagatgacatttttggaattagtttaaaattaaacggagcggatgcagattcatacagattttatttctgcaacacacttggttgtttccttgcagcatctaaaaacaaagccaatgcactttcagaaactactatggtcctccaaaattcaaaagtgaaaaaatgacaaaatttttctttgtaacacatctgcacaagaggctttcctttaaaatttgataaaagaccaaggccacaccagaaaacacagaatataaaactgtgtatcgacaaaaattaaaaactaaactccttaagagaatcgcttgctaaaaagtttaaaaaacacgaagacatgctttcttaaataatttgaaaatgtttttggttccacacgagtagtctatttgtttgcgtgccttttttattccttgtgacacccctaccttctcagaataaacactgaaagatgaacagaccgggggatcaagccggttcactaagatttagaggggaaggctgggtccatcttagcactgagaccgcacccagactgcatttggatcgctaaggactaagaaaacagtacagatccagttttacctcttataccattaattttccataaagccttccagaaacctgactcacagccagaaacccaaaccccgtgggcgggatttaaaacaaaacccattacgccaccatttccgccttgcctgcctagcaaacgtgcaaacattgaaaaagacgcacacgcagaccgcgcctacgtccccaaagtgcgcaagcgcacggcgagaccccgcccctcgccctcccaccaagacgaggcgcgcgcaccagcaaccagggcccgctggcgccgccccgggtttccgctccggggctcgtcggtcgccgttcggttccggttctggccccgccctcacgcgggaaccctccagaagtcttaatatccgggaccagaggctggttgcagcgcacatttccggcaacgagcgcaaaggaagggatccggtgacgcctcttcccgtctccccagcggcccaggctctggctctcggtgcggcagcgccatctggtgccgagtctcccgccacccgcggaggtggcacgcgcccttctctcggaaccttccagagaaaccgtggcccctgctttcctttctcccgccctggacggggagggacccgagtctccgccccgccgagttcccgcgcgggagggactttgtggcgactctgaagcggaagctgcctgtaggaggagctttacaaacccaaaatggagcggaaactgttctttctctagttttaagtccagaagaaacggcgtccttttattttttgcttccttatgcgttgttgctgggtcattctcagtcttccccgtatcagttctttaatctttgaggactgggaccctgtattaattgcctggtaggaagatgacacgagctttgtggcttacattggcctctgctgtaaaagcttttgtttcctttggcctattaaagcgctgttgtaaaagcctgctgtgtatgttaggaacccatcgagaagcagaatgtagtaatttgctttaaaataggccatggaagtttcagaaaggtagcctcagaaatgctcaatgtagattcgtttgcatgtcacgtttcttttagataatcagagaaaggaaaagtaatttccccaaagttagtaaaatcaacacattttcctttaataatgttctttttttcctgtaatcttggagtactaacagagttgttctaaatgttttattggaatggtgctgtggatatcaaaatatataatgaaacaaatttcctttagagtttagatagcacatgttaacttgactctttgattgtatttctcctatagtaatgcttctcaaactggagcatgcatccagattctctagaaggcttgttaaaacagattgctgggcctcaacaccagaggttataactgggagggaaggtctgaggatacagctggattagtgtagctctagtaaaatctcaggtgattctgatgctgttggtactaggaccacacctggaataatttagagttcaggattgctttgtcaataatgctttttgctgttgcaggacagacggtactaaaatatactggtgatactaagcctgcacaagttagtagtccttttgactccgtggatgggaagtagtaaactaaaccctagaaccagtagagagctacataaatgttcacagattaaagcaaccagttcatagaaatgtattctgtatatgatcatgtgatagagggtgctgtaataccaagtatactaaatatttcagttattatacagtaattgttctttagctgttaaattagaaatgactaaaattaaggacaaaatagtttaaacaatcatactaattttaccctttggaagatgccaggtttttttcagtcttttgcatttcctcaagttcccttgttttacggaattctctacccccagcccactcccatccctaccgtgccatttataaatgtacacagtgcttacattataaaaaatgatcatctcagaacttgtctcatcttttcagcaggacttttctcaattctgtcaaattctgactgtgccactgcctttattgacacagtaattaaatcacgcagtgattaaagtgtgctgcacactgtaacttttgtgcttgctacaaatagaaatacagatattgttagataagtttatgtttatgataatcagttcctaaaatgtagaaagcagtcggttttctggtctcagttttatttaaatcactgctattttgtttactggatgtaagcttccccctctctgctctagcctgaatgggccttcgtgaaaagaagaaaaaaaagattgagaacaactgtcttaaaaccatggtatttccctaataggctagtaccatgtatttggataattactgatgaatcatttaaatcagggaaaggtgcatggttttgtttttttgttgttttttctctttttttttttttttttttttgagatggaggcttgctctgtcgcccaggctggagtgcagtggccagatttcagctcactgcaatctctgcctcccgggttcaagcgattctcctgcctcaacctcctgagtagctgggactacaggcgtgtgccaccacacctggctaatttttttgttttatttatttatttatttatttgagacggggttttgctcttgttgcccaggctggggtgcaatggtgcgatctcagctcatcacaacctctgctcccaggttcaagtgagtcttctgcctcagccttcctgagtagctgggattacaggcatgtgccaccatgcctggctaaaattttgtattttccttagtagagatcagttttctccatgttggtcaggctggtctcgaattcctgacctcaggtgatccacccgccttggcctctcaaagtgctgggattacaggtgtgagccaccgcgcctggcctaattttttgtatttttagtagagacggggtttcaccgtgttagccaggatgatctcgatctcctgacctcgtgatccgcctgcctcggcttcccaaagtgctgggattacaggcgtgagccactgtgcctggcccgaaaggtgaatgttctttgccttattttaaactttattgtaataaattcactaatgaagcaggcagagaagatgtaaaggacacttcattagtaatgctatatttcatatacctgctgtattttgggagcattattgctatcatttggtttgttggatccctccaaatctcacgttgaaatttgatccccagtgttggaggtggggcttaatgggagatgttttcagacatgggggtggatccctgacacagggcttgatgccctcctagtgataatgagtgagttttctattagttgctgtcagagctggttgttaagagcctggcacctccctcctatcgattttcttgctgctttgtcttgcttcctcgcttaccatgtgatctctgcacatgctggttctccttcaccttcacccacaagtggaaacagcctgaggccctcaccagaaatagctgctggtaccatgcttcttgtacagcctacagaactgtgagccaagtaaacctcttttcttcataaattacccagcctcaggtattcctttatagaaaaataaatggactaagacagttgttaaataaccttattttgttgactaaaagtaattagtattttatgacatttatttattatggctgttaacattacaatttatcctggctaatttcatcagtaaacactcttatgaaatgatactgtagtttactttcaaccaagaattggttgactttgatacagtaattagattaggattcccacgtcagattttctttcaaaaataattcctattattatgtggaagcctccttttctgatttttttctcttattttctaagaacataatatgtaaatggatgtataatgaatatttgtggcaaaaagcatttgtctaagaagaattaagttgattcagctgttaaaggggtcttagttgttagagctttttggcggtttatttgctataatcaatagacttattaatacttttaattttagcctaatagtactaatagtcacattttgactaactattgggccagtttttctttgtcattcattggtagttgagtctctgtagcctttatactgccctatttttggtttgccacattttaaatctcaaactgcctataatttatactgttagtctttggaaataagtttgaattgactattctgctaaactcattttaatgaccatgctcccttgtgatgagctaaatttatttattattgtgttgtcgtattaatttttttttttttgagacagtctcactctgtcgcccaggctgcagtgcggtggctcagtctccacttactgcaacctccacctcccgggctcaagtgattctcctgcctcagcttcctgagtagctgggattacaggcaagattaatgttttttatttgtaatcaatttaagcctaatacatgttctaataatttttgtatttcatatatggataaattataataattcttttaaagtgaaagtattgatgagagatacttttttttggaatagctcattttaagcccctgatacttgatatggataaaatattttcagtgtttaataaaatgttgaaatatatttaactttactaatttgagccctgccaattataatactttagaaaaagtgaaaatataatagtacatttataaggcttttaagtattcacaaaatagtcatttcccagtagatgtttttcagctcttatgatacagtgttttctttttcttttggccatgtattgatcagaattagtcattaactttactaacaactggatttagtttgtcagccttgatggtttggttacacagatgtagctattgtgtcaaccccactgttttaaatatgttcctatgccaggtgaaatttgatccctttaagcaaatttctgttaaacactttgtgtcagtttcagtaacgtttccccaatgaacattcctactgtacaaaattttacatatgtgtatttacatatttatacttttttcacaaatgtgggaatttaggatactatgtttgtaaaaattgggcaatttttcttgaagataatttttaaaattacagcaaaacatagggccctgagaagaagaggtaaaatatatggaagagcaagtatgtatagataattttgtaacgtaaccttgagagaaatatagaaaactgagacaacataagccaaaggaaaggaattgggatgtaaaacctttagggtagagcagtgctctgctgtggtcatttatgccttggcattaagttcttttgaatataaaacaatgcatttagaaggattttaagactatatcacagtgcactggcattttcttcttcaattttccagggctaaataaggtaattgaataataaaacttaaaagcatttttcatttcatgaagatccaagaaaaaatatttcataacaatttttatttacaagaaggaaaaacatattcataagaatcttagatgattagtaggttaatgaaataaaaagtttgttaggaagaaggaatactagttattgaacaatgccaattttttctatttaaaaatatttaaaatgccattagttgatttatttaatgagccatcagcctttattttagattcactataactctgatctcctaaacctgcttttcctatcaggtcttaaatatttcatccctgctttcttttacaatatagtttttgggaatgtaactatcatgttgataagtaatgctaggtgaaggaaaaagttaaaacaactccaatgctaggcagtgatataccatagaaaaataaatgagccaaagataggggaagtgattttttttggaggaagaaaacagaaatgagaacaagaggacatggatgactgctgaaaaactgaccaagttcctcttcagtcttctaacagaatttggaagatgttcttagcatgcaactgttggttgaaaaaaacccaaatgtacaagggccatcagttcttaaaagtggaatagtgcatagaaagcttattgacacaacatagcagtttgatgaaatggactgaagccatttctgtggagtggactcgtggaaaatgtgatgcctgattcataaaattgtacacagttgaatgttgctatataggtaaggttttgcaaactcaggactctcaggaaacatcaaaggtatatagttggcacacttaattttagatatgtgtgatacgtttgtgattttttttaaaaaaatatttccaggaatgcttaagaagattataccacctcatgctataaaataaaactaacttggagaattcaacaatgtttgctgttttaatatgcatcttacaaagataattataaacactgagagtatttactgcaatgccctgaatatagtatgcctaaagaattttctgtataaaaataattgtatttattttagttaaaaattgagtaaaatatacatgcatcaaaataatttctaggtagaccaaagtgatatatgtaaagaaagacaaaatcaaaaatcaggaaattgctggtgaatatctaatctcgggatagaaaaatatttttttaaatcacaaaagcaatcagtaatcaaaagaaaagatgactgataattattaccatataaatatttttaaactcatgtgttaacaatttatagaacaaataagttcgagaaaatgtttgtccttagcatgtcagttaattaaaataaaacacagaaacttcatacagttcagcaaaggacatcttgatttgtgctttggagaatctattgagtttttttggttactgagtaatagtttagttagatgtgttgctatagctatacattcttccatcttatgttttcaaaatattaagtgtcctcatttattttttgtgtaattgagaataaactgaaatcaagtaatacacattctctcataaaaataaatatactcggtcattgaattgtaaagtgtggatcccaggatgatatcatcatcacctggaaacttgttagaaatacacattcttgtcccctgaccaaaatctattgaatgagaaactctgagggtgaagcccagcattttaaaatctaaaaatccatgttttaacccatttggggatactaaataaactgctgtagtccttcaataagcccatcacacattttcaccatgtcatctataggcactttttctacggtgttaacatcatcttcatcatcactattatcataatcaccttgattaagaaccattttggctatttccccatggatcaatgaatgaataattagagccgcattattgctggtaaaaacttacatgacatctgtttcttccatcttactgccagactctgaaggtgtatttttttgtatatgtatggaggtcagacattattttttttctcatgtgacatatagaaaccttcaaagtcaccactttgttcatcaccatcactgaacatagttatagcccagaggttgtgccaggcatgcacaactgtgtatttgtcactgtattccaaacatgggcattcttcgtgctaaactccttttgaaaactttccacactcatgcctctgttcactgttgctagcatgctgatcaagaaactttttatatttattctttattgatccaagaacaccctagtcacatggatgaattaatgaagtcacaattagggtaaaatacatgacctaaacatttttaatgagaatttctgctggatgatgagcagaatccttatcaagcagtgccaaaatcttgcagtcgttaatcattcagtctagattccctacagcaagcaagagccactagtaccaaatgtttgtgaaaccaatcagaaaagatatccctaattctctatgcctttttgttagcataataatttactggaaagaaatttactccttgaaaacaacaaggatataagcttttgtctatcatagcaaggttttctttatgcatgcgtgctgcattagcacatcccagaacagttattctgtccttagcatccttaattcctattgaagctgtctcaccagctgtagtcagtgtttttctggtgcaataatgccgaaacagtgatgtttcatcagcattacagacctgtcctggtatcagattttcatcagtgatgaccttagtaacctcatcagtgaatatctcccttgcttcatgatcaggaaatggtacaaatcttcaaaaccttaacgctgtgctttttcttaaatttatgcaactagcctgttgaatgttcacagttcccttcaattttcagttcatcgtgatagatctttgcaagtttcatgttcagcataccattaagtggcatgtattcactgtgacactgatggttccattctttcaatacatattcaaggacttcatatttcactccatgcattgcttttctatttttcattaacttctgttcatcactttcagcatagaacttccaacaatgtatccttctctttcttcaggtcatacatggtggtcactccaacactatactcttctataagacattttccacttataccaccatccagtttcttcaacagcttgactttctgtgctatagataagtataaatgcttcctcttttctttactactgttactcataagggtatctgcagatctttctacattttccacaatacctttataccacagagaagagaataagcaaaacaaaacaacataatgagtaaggcatgtaggtcttggcctcatgtagggcatcacaggcaacccgccattggtgtgtcttgcctgacatgtgccattttattaccctttgtggatgtgcctgcatgacgaagtctggggcatgtgtggaaaagatacttcacagctgaagggggctgggagggtctctttggagacattaagtaaactgtgtgttgtgtatctgcattttgactgtgatccatcatatgaggtcaggtgtggaattttcaacttgtgacttcgtgtcagcactcaaaaagttttggatttgggggaatttcagttttggattttcagattagggatggttaagatgtaatttcattatgagtaaatagattaaatactccaaccaaaaggcagagattgtcaggctggattttgaaaagcaagatccaactatcttctgtctacaagagacaagcttttgcttttccctttttttttttttttttttttttttttttttttttttttttttttttgagttggagtctcactctgtcagccaggctggagtacagtgttgggatcttggctccaagcaacctccacctcctggattcaagtgattctcctgccttatcctcctaagtagctgggattacaggtgcccaccaccatactggctcatttttgtattattgatagaggcagggtttcaccatgttggccaggctggtcttgagctcctgacctcaggtgatccactcaccttggcctcccaaagtgctgggattataggcatgagccaccacaggttgccatgagacagactttagattcaaaaatttagtctgaaagttaaaaggatggaaaatgatatatcatacaaacagtaaccattaaagacctgcagtgaatacactaatattagacaaaatacactttgagacaaaaataaataaaatacttgagacaaagagtacatttcataatgataagggggttaattcaacaggaaaatagaaaagttatatatatacctcagatttccccaagtacatggagcaataaatcacagaactaaagagagatatagacaataataattggagacttcaacaccccaatctcgataattgatgaacaactagatacaaaattagcaaggatatgttttgtatcacttaacacttacacaacacgatcagcagactactgatccaccaactctatccaccaaacaaaagcagaatagacattcctcacaagcacacacagactgtcctccaaaatagaccatattctaggccataaaacacatctgaatagatttaaaaggaataaaatcacataaagtacgttctttgactgtaacagataaatgagaaaccaccaacagaaggtaaaatccttttgtggtgatggaaacattctaagactagattgtggtgcaagtgagcaactcatttactaaaaataatcattgaattatatacttaaactataaattttatatgtaaattatacctcaaagctgttaagaaatgaatgaaaggagaagcacattcactatagcaacaaaactttaagaatacctttactaaggaatatttgtgacctataggaataaaaagtgattaagctttgaaagaattaaaaagagataaataatagacaaactatgtttccatatatcaaaaataatacttccaaatgtcagttacctccaaattatagatttgacacaattttagtaaaaatcataatgaaagtttgattttctgacttaaaatcattctaaagtttatctggaagattaaaaacacacaaaaattcacagaatattttgaaaggaagagaaatgaattacacaagctatggtagacactgaaccatattttaaagctacactgtactagctaaaatataatatggatataggagtagaagattaaacaaaataagaaataaaacattttatttgtttttagtatgtattaaaaatacattgccaaacattttgaaatggataattcaataatttttattgatataaagagttgcatttgatctagcagttatacttctgggaatttttttaatggaaataatcctgaaactgggtgaggcaaatatgaattccagtttcattcgtaaatgtacaaaattggaaacaacctaaacacctaggtaggagattagtcaaaataatcataattgtagttgtttaacttacaactcagaagtaggcatcttatgcagttattaaagtaattttaagtagcatgtgaatataagaaataatgcttataaattttatgttaaatgacataggacgtaaaggtatataaatagtgtgaatataagtatataagcaaaacaaaaataacttttcatgaggagattaatgggaaatataccaatatgttaatagtaattttgtatttgatcatagtttgagtagaatttttaaatatttataatttacaattataaaactaagcactttttttttttttttgagatggagtctcactctgtggccaggatggagtgtagtggcgctatcttggctcactgcaaccttcgcctccagggttcaagtgattctcctgcctcagcctcccgagtagctgggactacaggcacccaccaccacgcctgtctaatttttgtatttttagtagagacggggtttcaccatgttggccaggatggtctcgatgtgttgacctcataatccacctgcctcagcctcccaaagtgctgggattacgggtgtgagccaccgtgcctggctgcaagcattattttaattaaaaatttcccaataattatatcaaaattttagaatttatagtttagttttcaggattcacagcaaattttttaaaagatttctatttttaacatattcattatattattattagagtttggtgaatatgctaaatgcctctcccttccatgagtttatgaatttcaattatatcttctcttcaccattgggtatctggcctaatcaatattaatagatatttaaccacattttaaagctataataattaaaatagtataatacttatatagggaggaacattaaatactcaggagatgtaatttttttagcctcttaatttggcagtgtatctcaaaatgtggtatgtatcaaaataatctggccccaatttcataacttctaagtgggatgcagctctgccatgtatttgttgaaggcagtgatggtggcagtgattctaaaagagaaattctcaattttgtagctgattcgcatagagggcttgtgactccatcacctactgtctgtgtgaccctgtgcaagttacctaaccttccatgcctcagactcttcctctctagaagaactgagcataataatagtgccttcttcatcggattattatgatagttacatgaattaagacatggaatgtgccaggtactatgtatagtaagtatcaaatatctgctattattatgctaaggcctgttattacaaagtaaagttacctaatatttattattttttacgtgttataaattgttaggcacactgaagatataaatgcatgatctcatttatttttcatatccactcaatatgctgaatgttgtcttacccatttcagaggttggaaaagtgaggtccagagaggcttagctggctgagtgtgactgagaagaaaaggcttggggctgcaaactccacagagataaaggtgaagtaattttccagtaaatgttggggttgggatcaaaattatgtgtaatttatttcaaaagccctcctagtgtttggcacattttaagcatgcaaactttgaaagcataccttggttttcctgggttcatctgagggcattttcgtttagtaggtctggatgtagggcccaggaatctgcatttaacaacaaacactcccaggtggttctgaggctggtagtctaaggatcacagtgtcagaaactccgcactaggtcatgttctgagataactaagaaaggatgtaggaagtaatcataaagggtttcaaaatgtgtttaaggtcatatgtaactagttagtatctgaactgaaactaggtgttaggtgccctctcaatccattcctctttttcacatcagagaccttaagcctggatttttctcttagcctagcatcaaatcagctaagcccatgtctgctatttctctaacctcttgctgggcttcagcaaagcttctgcaggggagagggcttgtttatttttagtcagaggccagaccagcagaggagctaaaatgctccaactgtctgcattaacttttcatgaagtttttgggaaagaagagaatggccttattaggtgtaaaccttttttatcctgaaattattttgtaattgggaggtttgtttttattataaatttcaataccctgggtacattcttgtaagttctaatgctattctctaagctgctgatcatcccaaacagctgttcgttcctctgtagtccaacctaacctcagttagatttttgagagaatggatggtgatctaatggaaagagtaaacaacttggagttaggaaatactggttaagcattgtcctgctagacactagttaagtgaacctagaaaagtccctgatcctctgcaaacttcaattatttcacttaaaaaattgagataataaggtcttagtatctaacatcagaattatgagaatcacatgaaataagttaggtaaatggactttgcccactcttctatgatgttcaatctcttgttagtattagacccattttatagtctgacccatttttattgtctgatgtggtattcctgaggccccaggtttggagataataatatttcttcttcagaaaaataaatgacagagccatggctgtggagctttcatagacacagggctctttagctagtgaagcaagaactggcaaagtaggaacacacaaaagttaatgctgtcatgtttactgttaaaactggcattttgcacaatgtaatggacttttaatacgttagatttcttatggaaaaattcataaggtaaggtaaaataaaatcaagatgatgtttaattgttcttttttataatagggttcagatattcatgaagaatgttttcaatgcttattcatttccttcccgcctcccttttcttttcctttctcacttttttaaaatttctttttaaagagacagagtcctactctgtcactcaggctggagtgcagtggcgtgattctaggtcactgcagcctccaattcttgggcttaagcaatcctccacccaaggctcctgagtgactgagaccgcaggggcgccacctttcccagctaattcttttttattttttgtagagatgggggtctcactaagttgcccaggctggtttcaaactcctggcctcaagtgaccctcccaccttagtgtcccaaagcattgagattacagacataagccactgcccactgtcttttccttactcctacttttcacatttctattcctattctaaaacttacttttataaaaatcattttaaacattctggatttatggtggattaccaacttctctcacatgtttaaattatcttcctaataatgcattaaagacttagggagggcctaattcattttggtaaggaaagcatacaactttttttgtgtgtttgtgtgagacagggtctcactgtgtcttccaggctggagtgcagtggtgtgatcttggcttctcctgggttcaagcgatcctcccacctcagcctcccaagtagctgggaccacaagcacacaccatcatgcctggctaatttttgtattttttgtagagatgaggtttagtcaagcatgcaactttttacctgaagcagccatttggtgattcaccagtttgaaaaaagcagattcatcaaacagtacctagctggatgatatcattccacctctcattcaatctgtagagcaccaatgagtgtactaaattcacaagagataagaagtcttctgtaaagaaatccttactgttgctcctttaaccccttagattgaaagaatattgtttcccccctccacttcctctccttctagtccctcttccttctctccctccttctcttctttaaagttaggataatgtgttgcttttgtttcagaagcttacatacattgaacttgattttttaaattcagacttcacccgggcgatgtaatgacttgtgatgatttccaagaaagtattatttccaagtagcataatactcttgtataaatctgggaaaaaaatctcctcttgaattttcatgttattctacaaatacgtttttaaaaatcttgcagccattagttttcaaatgatcttattcagggaaattattgctcactttcttgaaatttatgaagaatttacattcttcataagatttagtattttattatttgccgtatttcctgcaggacagtaattgtatcttatttctctttatatttctagtactatcactgtatgtgttacctagaaggtgctctgtaaatgattttttaactgtttttattgcttactgaaaactcagaatgggaaactttggaaagggtgagacctttgtagaaatgatttaatcctttctcttccactcccaccactcatttagtaagccaaggtataagtccttgctaagagaaaggagtttagataaaccgttgctaagaggcaggaaggtatacctatagaaggtttcctcagaggccatagagaatttagggagaacgagatgttgacatgaccctggtccctaacttgaaattatagctgtgagagtttccttttctgtgcatcggaacattctcaagggcaatgacagagaagcacaagggagtaagctgccatatcatttaaaccaataaacaaactatttcatgaaaataaaaaccatttaagattgtaaaaagccaaatgtagtaaaaagtccttttgtaataaaggtggaaatacaatctcatgtatagaacagaaacaaagtaatactttaagaggaaaaaaatagtttccaaattctcccaaggtttttttcactcataatctttctttccatcacttgcttgttctgtgactgtgagcaaggtacctgcaaggtacatacctctctatgcctcagtttccttatctataaattggggatgataatagtgatatctgcctcacaggttgttaaggttaaataagtcaatattttaaaaacaaaaaagtacctggaaagtactagggacaataaatgcttgttaaataaaatttaaaaataatatatttactaaagcacatttatatactttcttttaaaatatggccctgttggtaaggtgtttttcccagcttgctttgaactatttgtatttattttttgaaattaaaaaaatacctgcctatctgtacggtagagagaaagaagggaaagaaagaaggatacagaaaaaatgaaggaaagaagtgaaagaaatagaaaggaattactaagttttctttaggaaaaggggcaaaaactttgacactgctcagaagctaatgtttcactgattcttctcactttctactttctgttatgctatcctagggcctgaaaatggttataaatacaataagaagtcactcccatataattctaaatgtttattctgacaaatataataaaatgattatagcagtactctgtctgctaatataaggctactgctattgtcatgcacagaattctcccaatattagagttttattttttgttatcagtaatcctcaggttcagtgtcatccctttctaaccaagttactcatctggaaattagtacatatcctgagaattgaagacaatacagtgttaaaagtaagaatagttgacttttcaatttcatgtttttaggcatatgataggcaggtttatattataatttttaactaatctgtcatttgaattctctattttcccccaaaaaatcttttcaaatgattagcaaagactgttcggtttcttcctttgccctgtctcaaaaaattagaggaaaggtttggaaaatgcttttgaagactaatacttttatgtaactattttctaaactacattaacctgctacatttatttataatgagtttttaataatgttatgttttgttttcccaaaagtatcacctattttattcaactaaaagttctatttatatgtaatacataaaactcagatataccttagacttgaaagaattggaataaagttggagaataaagaaattaagggaccttcaaactttatatagttggtgttaaatattgatgtctttccaaaattcatatatagaagccctaactcccaatgtgatgatattaggacttggggtctttgggaggcaatgaggtttagatgaggttgtgagggtacatctcccatgatgagattagtgtccttataagaaaaggaagaggccaggctcagtggctcacacctgtactcctagcattttgggaggccgaggcgggcagatcacaaggtcaggagttcaagaccagcctggcctgaacatagtgaaaccccatctctactaaaaatacaaaacattagccaggtgtggtggcatgcgcctgtagtcccagctacttgggaggtggaggcaagagaatctgttgaacccgggaggtggacgttgcagtgagccaagatcacgccactgcactccagcctgggcgacagagtgagactccatctcaaaaaaagaaaagagacactagagcttcttctctgccatgtgaagatacagcaagaagtagtcagcaaggcaggaagagagccctcaacaagaactaaatgtgctagcaccttgatcttggacttcccagcctctggaactatgaaatatatgcctgttatttaagccatctagtctgtggtattttgtagtatagcaactgtgctaagacattcagattttcaggttctgagagcttaatatgaaataaaaaactgttgctgacatggtaggtaatattttaaggatggtttgtattttttccctatggctgtccacatagctaccccacactattgtcttatacttacaagcaggacattaaatattagtgcaacattagttcttacctttaaatgattgtttttctctagtggaacttcaaattggtctgaaaacttaaatacataggttgtaagtttaaactttttaaaaagttaaactgtccttatatggactgctggaaagcataatatcctaagaaaacgaagtaaattattttaaagggaaaaggattagtcttcaaaatgggaaaaacttgagttcattttttccccttttcaacagaatctaggatggcaaaatgacataggaaatgccacctcaaaatctagacagtatacataatcagtcttacatcccgtgggtcacaataaaggagctgtttcagcatcgtaaacattgttgcaaaatgaatttgaatgggttttggcagcaacagagcagagaaaataaccacctttcagaatacataacttaaaaattcacttgtaagcccacaagctatccaccatttttacattcttaaaacatctcattgcccatctttaatttaaaaatatttcaaaatcagtaatattttcaggtaagtttcaggtatttgttgttatgctttggttaaactgaaaggatttgcaggcatacaaaatcagagcccttcaaataatgcctcacataattaaatgcaatcttgtgtttggtttgagttatttccatctctctttattctgcaatctgttgacaatagccagccaacttacattctttggactgatgatggcatattttttaaatcccttcagtgttggcattactaagctttataaaggtgttatatctctcagaggccactgttgccagcattgcagtaaaaatgtgtaagaatcttgtctatgttacttctttaaccttttcatttcttttagttttgtataaaaattcataagcttgtaaaagtattaatccagataacttggaatgatttttctttttcattctggatttctaacagatagatgttagccttgcatgaagaggaaatccagaacattgttgattttggttaaaaaaaaagaaaacacaagtctataggatttattctagggcttaaaatttttgcaaaaaacatggagtttttatggtcacactaataaaaattatttgcttgaatttttattttcatcctgcaactatttacttccaaattgaagatgtttttccctgatagactctgtgatcctctgtgatcacttttagaaatagtctatcttcttactttctaattgtgttacttagaaatgtttcatttcctctattgcatttcttgtctttttaaaaaatatctgtgtgagtgtctttagatatgtgttacaaattggattttaaagatctgtgccagtgtacctgcctgaaattctttactgcctctgccagtgtatcaagtttaataccatgaacagccgtgaataacttcagtctactcttcattttaaatcttcctaaattaattgctttgtaaaggtattgctaatcccttgcaatccagagatataaaaaatattatactctaacacttagtacagcacagagataatttacagcattagtcaaacagttccaaagatgtcatcatttataatgaccccaccctagggccattattttactacataatatgattaatgtgctgtcatttctttctgcttaaactgtagccgaaagtaaaaagtaacacattttggccttcagttttcttagcctgaaagaactggttatttttttaaaaatttagcagcttatttcacttcaggtttttcaaaatattcatatctgagataacatctccattgctgaggatagtgaatgagttatattcttgaatgttacttggttgattctgaacatcatttaaatgccccctttttcatatgagatatagatccagtgtaaatattgtttgaatgtatctggtgtggtaatatttgaagatatgggatcaaaatttacaagatccaaagtcaaatcttcacatttattttagctatttactgcctttaaaaaaactagaaaagtttatttctatcatccataattttctttatggccgtgtcctcaaaggacttaacttctgttgattctccaatctggctgcctacatctttttacctatatgactttcctcacatttttctctttgcctagaataacttccattcccccatgttcaatgtctatctaacacttaagctcaggtcatatgacacttccttcaggaaaccttcctggactcccccacaaacaataataagtctgtttctcatctgaaattatatggtaatttatatatatatttttaactgtgcatattttctaaataggttcaaataaataatgtacataccactaaatattctaaagtctaggggtcctgtcttattcatcttcatatgccctagagtaccaagtaggtcctcaatctatgtttgtcaaataaataatgtatatagaaaaacggtggtcattttgggggaaaagaacgatcttacctaaattggttgattaaaaacatttttacaaatatgctatataaagtgttaaaatatcaataattaaaagcaaaattatatatattacagacaacttcctagcattagttgagggggaaaaagaaaacagccaaacaaccaaagaaacccttgccaccaatgtaaaattatgtttagcataagctgttggaggatctaagaatgaatgtagtaagatattgctaaggtaatttttattaaggtttgatttttaaaaattagatttgttgcttttggccacaaatgatataagttacctaggaatcaattgaatcaaagatgtgaaagatctctacagggaaaactataaaacactgatgaacgaaattgaagagggcacaaaaaaatgaaaagatattccatgcttatgaatttgaagaattaatattgttatgacaagcagctcacagatccaattcaatccctatcaaaataccagtgatattcttcacagaaatagaaaaaaaatcataaaatgtatatggaaccaccaaagaccccatatagccaaagcaattctgagcaaaagaacaatgctggaggcaacccactaccttgacttcaaaatagactataaagctatagtaaccaaatcagcatggtagtggtataaaaacagatacatagaccaatggaacagaatagaggacccagatataaatccacgcatttagagccaactcattttcaacaaaagcaccaaaatatgcaatggggaaaggacagtctcttcagtaaattgtgctgggaaaactggataaccatacacaaaataatgaaactagaccccatctttcaccatataccaatatcaaataaaaatgtataaaagactcaaatataagcctgatgctatgaaactcctgaaagaaaactttggggaaatgcttcaggacattggtctgggcaaaacatttttgtatgagacatgaaaagcacaggcaacaaaagcaaaagtaggcaaatggaattacatccagcctaaaagcttttgcacagcaaaggaaagaatcaaagtgaagagacaacctacagaatgagagaaaatatttgtaaactatccatcaacaagggataagtaactagaatatataaggagctcaaacaacttagtagcacacacacgaaaaatctgatttaaaaagggcacggctgggcactgtggctcatgcctataatcccggcactttgggaggccgaggcaggcagatcacctgagatcaggagtttaataccagcctggccaacatggtgaaaccccgtctctacaaaaatacaaaaattagccgggtgtggtggtgtgcacctgtaatcccagctacttgggaggctgaggcagaagaatcacttgaacccgggaattgcttgaacctgggaggcagaggttgtggtgagcagagaccgtgccattgcactccagcctggcaacagactgcgactgtatctcaaaaaaaaaaaaaaaaaaaaagaaaagatctgaacagacatgtatcaaaataagatatgcaaatggccaataggtatattttaaaatgctcaacatcgctaatatcagagaaatactaatcaaaaacaaggagatatcatgttatcccagtttagatggttttatcaaaaagacaacgaaaaatggatgctggcgaggtatggagaaaggggaaccatatatgtactcttggtgggaatgtaaattagtagagtcactatgaaaggactatggaggtttatccaaaagctaaaaatagaactaccatatgtagtttcactactggatgtgtagccaaaagaaaaatcaacttattaaagagatatctacactccatgtttactccagcactagtcacaactgccaaaatatggaatcaacctgagtgtccatcagtgaatgaatggataaagaaaatgtatacctacaaatggaacattattcagccttagaaagaatgaaatccaggtgggcgcggtggctcacgcctgtaatcccagccctttgggaggctgaggtgggcggatcatgaggtcaggagatcgagaccatcctggctaacacggtgaaaccctgtctctactaaaaatacaaaaaattagccgggcatggtggcacacgcctatggtcccagctactcgggaggctgaggcaggagaatggcttgaacctgggaggtggaggttgcagtgagccgaggtcacgccactgcagtccagtctgggtaacagagactctgtctcaaaaaaaaaaaaaaaagaaaaaaagaaaaaaaaatcctgtcattttcagcaccatggctggaaccagaagtcgttatgtttagtgaaattagcacaaaaagtgaaatgggcacaaaatttagtgaaatgggcacaaaaagatgactattgcaggttctcacttatatatgggagcttaaaaaaacgtggatttcatgaagatagagagtgattggagcttaccagaggccaggaagtgtagagggaaggggggaaatgaagattgattgattaatgggcacaaatatcagtacagtgactacagttaatattaatcaattgtacatttctaaagagctaggagagaacaatttgaatgtttctagagtaaagaaaagacaaatatttaaggtgataaataattacccaaatttgatatgaatatatcaaattatcacatacactgcaaaaacatgtacaactatgtgttaataaaatataaatcaatttaaaaagaaaaaatatgtattttgataaaatgtgtaatatatttggcaactttaaatagagggctacactggtaaacctgaaggaaagcaaatttaccatggattttgtgacctttccataccattttgatggataatttgggccttctaatccataagttgagagaagaacatcaattacctgtaggctcatacagatcactcaccttgcccaggacgctgcctccaaacaggtaagaaacatatatcacagaagggcatgattactggcattaacatcagccaatggccaggaacttgatccaacatatcctggctattctcttcctactctaatgaacaccttcctacttattcatccttcaaggttgaaatcaatgtcaccttctttggaaagctttcccaagcctaattaattactttctcctttatgcttttaaagcacttctacctatatctgtaaaataacttaatccagtagctttccccttatctgtagtttcactttccacagtttcagttacctgtggtcagtcattgttcaaaaatattaaatgaggaattccagaaataaacaattcataagtgttaagtgctatcttatgatgcctgtgacattcacctcacttcatctcattacatcagcattttatcttctccaatcatcacaaggaaaagggtgagtacagtacaataaaatatttggagagaggccacattcacatagtatgcaggattgttataattattctgttttattattagttactgttggttatctcttactctgcctaatttgtaaattaaactttatcataggtatgtacatataggaagaaaacatagtatatttaggggttggtactatctgcggtttcaggcatccactgggggtcttggaatgtatgccccattgataagaaggaactgctttatttatatctctgcatgatctctaactgcctgagactcagagacaaagtctagttttctgtacaagtctaccttctagcatagtttttggcacttgtgacttttccctttcattataatcatagtacttcatcttatggtacacatattctctcatcttttaaagtttttctaattttcatttctgtgaaacctgcaaagaagtgtaaaagatcacatgatcaaggacacagtgaatagacagccagcttcccatgcctcttgaaatcttttagagagaagtgagaaatttggtaagtcagagaaacctagattcccagtcgcaagtcttttatagaattaggcagtatggggatcactgctctcaggtgcaggctattactatgtgatccttgctgtgtctaaattccatccttccatagtcagtttcctatttcatctagcttacagcaggcctaccatcacttactatattacataggttctagcatgcataccaaatacttgtattttggcttcagttttcacttctttccagttgtctaatttgatggttcagtaatttcttactcctctacaccttaaacaagtcacagcatgcccttctaatattcccatagtgcaattcctatgctttacccaactcatcagcctttctccaaagctttgttgaagcttcacttggtcctggtttaaatatgtattgctgaagcagaatgctttgaccctactaggtactcacactcactcaaataccctttgctccaataaataaataggcccaacttttttgtctcaaattcataacaaatattctgatagaaataacaaacaagaaaataaaacttacaatggctgaattttacctggagaggacagtaaagaatcatgacgtctttgtgaaaacaacagtggcccagggaaaatcagatcttagtaaaagtaatgaacacaaaatagaacttacaccaactaaaacagtaacaaggtgtcatttgttgtggaacacaaattgacagaagaatcaaagcttggtactatttagatcatgtacagtgaaatttcatataattaatggccaaacgtacacatttataatggtagaattgtagttgataattcttgtctataattgataaaacttgatatgggcaaaaagttttccatgaatcaaacccctatttaatttacagaaaaatgatagcattggagcattttagaaagataaaaatgaaggtgaacaaaaagtgaaaatggttcaagtgcattgaatagacaattcatctagtagttaaattcatttaatgaaattcactctggaatataccttttccacaaaaattcatctatgtcagtatacttattgaaacacttgtaattttaagcatggggtcaaaacatctccatgtcaaaatagctggatcaaaatgctgtttgcccatttcatgccagaagttcctccattataaccactgatgcttcccttagaagtctgtatgtaaatgatttgggacttcactgggccatatgtcaccattaataacagaaagtgtttgtgggtttgcttttcttctttagaaaatgaagagattgtttttatggataatggtatttagggatttttttttctattgtttaaattaatagtcaatatattttaaaggattaggtgttggggaggaaataacaggaaaattaagtttactctgccaaacaggcattatccctgagaagtagttccttcttattctgcactataaatccttttatcaccatgtatatttctacaggggctactgctatcttgctttggtagttacagtaaatcaagataaagacaccagtctgcttggacttgtggagaggtagcaaacaggtatggaagacctggaatcgacttcagaaatgctcacgatgcttgggtaccctgatgtggtactacctagcctacttgggtcaaatgacttttgcaaaattctataagatacttagcattctcctgtggcaattatttgttaacaaaatgctggaaggaagagctctaaagattttcttaaatatatctgtcccagggatatcaaatgtttaggagaaatagtgtagtaacagaggtaagctatcaatttaatttcacttgacatctaatctagttgtgttaccatgatgttccctgactacgtagggcttctgcctgccattggacactaaataattaagaattagtttcttgggttgttgattatatcagaaagtcccaggttataaacgggattaaacagtgaacacactaaaggtataaagttatttattcagtatatttataaggcctcaacataatttatagaatttacatttagctatgtatttatccaagagagatttgttaagctacatttcagaaagatttactaactatatgtgtacatcaaattcaaagtaggcttatacatttgagctttatattggacagaattattctaatgacatagtaagctagacaattgagttctcctatagaaaacttatacttttttaaactaccaataaccattaccctattaaaaatggcttcacaaatatgacagtacaggagaagactcataggagaacttctcagtgggtagactggccattctgatctgagtgcaaataacaccaaggcagagtttacttaagcttatgtctataaaatttaagtgttgaagtgggaagatattaatttatatgcatggcctgttaaatggctagtttagagctatcaaataatcttgtatatgatgttatactatgttattctttgtgaaaaggtaataaggacagtgtaaatttcagggctacttcctactcataccttgttgataaaaatgtagattggttgaatacttcgaagagcagtttggcaatattgaatatgagctgtaaaaatacataaccattgtaacatgaagaccttatgtaaattaacaagaaaaactcatctgcagtaagccttatcgaaccccttgcctgggctaaatgctctattccaaataaataaataaatagtttgtaattagaggagggtttttatgttcaattgtgagatcaatctttaagaaattttaaggatttaatagtcttatataattagagcttgaagttaaagggaaaagatgttaaatgaggtgaaagtgagcagaaagaaatcttctgcatatagaggtaacatctcaatcagaagaaagaaggttaaaaaaagacccgcatcagttaggaagtggtaattacactaatatttcattattaacttcaatcgtaattgattgacttttttgacttactgttgtgatgaaatggcaacagagtagattattaactttcagacagaaatattaattttccctttgatcaatagcttaagatagagataaaataaaatgaataaggagaattatgcttgttcgtgttaaaaatttactaaccagcaaaggcatgagaatgatataatggactttggggacttggggagaagggtgggagcgggatgagggataaaagaccacatattgggtacagtgtacactgcttgggtgacaggtgcactaaaatctcagaaatcaccactaaagaacttattatccacgtaaccaaagaccatctgtaccacaaaaactaatgaaatacaaaaaaaatttatgagccaaagggaaatatcagtgtgtggctatattctaagtacatccagtttaaagtaatgaatatcgtttctcatctgacccatttaaagctgggcttccatgtgccactgtgtatcaataaaggcatctatgaaagagcacgggggaggaagtcagaatctctaaaaactagctactcattctcatgtacaagttagattatttggggatttgatttttctatccattgtgtagtcataccatttatgttttagatattaataagcaaaactttggacataccaggacactcatagatgatttaaactttgtaatttatgttacccatttgacccccattcaaagactcactaatgaacttttaacccttaacttttcttggcaagagcattatatttaaactggaaatgcatagaaatcatcattggaacatttataaggatcattcctactgtaattcgctaacaactcactactaggtggattgctttttgttcagttttgctcttttctggtttacttccaacctgtttactgagactgtcttggtaatgcaaatctttcttctttgttagtccacagacagtttgctcatttcggaagaaagctcctgactgaggttctttagatgcgtttaacggagggacagctgtgcagaagcatcactgtctcactcttttccagactgatcaaatgaagcgtctgtcatgtcacacatatggagttctctaccaacagcaaaggctatttagtcaaggttagaaacaaatattgtgttggatttttgcttatgatatgttttggatttttctttgaagctctgatttgaaagatatacagaaagatatggcttgagggaggaaatatgaatattatcctcaactactcccatgttcataccatcctgagagttggaggcatcatgctgcaccttgggtatccttgaggagaaatcctttggtaaagactctagtcctatggattggcagaaattcccagtctggtgtctgacagctcctcctgtgcacgttttgaatttactgggcatgtgtcagactcctgaggggaagacatctcctgctctccaaagaactgagattccatcacaacggatttcaattgttcgagaataacaagtagaattacctttattttaagttggcttggcaattataattcatgttgtgccctatcacaattatcaaagtgaggaactcctcacaaagtaaacaaaggtctttcaatccataaaattagtatctcaattcaacttattttgagtttatttattttgcttttgagaacaaaatgtctagtgtgtagatagttaaaaattaaatgcagtagctatttataatgcctgcatttttctgcataccttatgctatatattagttacataactcaaatactcaagtctaagagtcagagtgttggaagggacttggtctgtacttctgagtcttctgagccagcaaggccacactctttccccatcattgccttgccagcagttattctatatcctatattcaagttcatcagataaagaaacttgaacagtttctaatgaaggagagcaggctcaatatcctgtcccgctttctaagaggtgagtgtgctatgcagggtccagggatgagatgtagcctgctttgtaccagatgcctgtcagtcacagaaataactgcttgctgtttgactatatgtataactggatgctatgaagtggagaatatttaagaggacctgaaaccatgtctcttctgggacttaagagtgtgtgggcttctgagagcagaggaggtaccaagaaaaccccactgcaaggatagctgtgaaagaaaataaccagggaatttgctaggccaatgtcctcaggaccttaagttagcagtgtgtgggaaacaacaaagcctggtaaatattaattaaattgcacaccagaaacagagataaagaactatatatttgcttcaataagcaagcacctgcaagatttcttgttttctgcctgcatagtagcatcctaatcgtcaaccatcaactgtccctagtctccctttccaggtaccagaatttcttacttataatgcgttaaatcaagtttagcctaaagttgcctccttacatatttttgagttcaacctaaacttttctctgtacattgtgaattataacaagtggaggtgtaaacagactgtagcctacacttgtgccagtcactgagttttggccaatcaaatgtagccaactgttcgaaccatgttcaaataaggcaaacaccaagatgtaaccaatccagctgtttctgtacctcactttcattttctgtatgtcactttcctttttctgtccataaatcttcttccaccacgtggctgtgctggagtctctgagcctactctggcttgaaggctgcccaatccatgacttgttcattactcaaactcttttaatttgtttgaagtgtttcttatatcaaatgcaacttacattttcaaatggcattggaatacaaactattttttcaaatatcttttatactatgttctaaatgcagccagccctctgtatccaaggggttccacctccatggattcaaccaaccataaaaatgttcagagaaatcattccacaaagttacaaaaagcaaaaacggaactggatacacatcaagtattatgtttaatccacaagaattaagtgatgtataggcattatattaggtatcataaataacctggagatgttttaaagtatatggaaggatgcacataggttgaatgaaaatactaggccaattaatataagggacttgagtattttgtatctgtaggggatcctgaaaccagttcccctcagatatcaagggacaactttaatgcacaagatgacccaggatatatgtcttatttctactttattataacaattaagaaatcatggcttggtggcctctgatctctttcacaagttaaaatgtgatccttcagggctctacatgaaaggtgatggtgatgtgggttccttccctaattacaggaacagtctagactacggtagccccagacaactacggagatgtctagataatgcatttacctaagaaaacatctcagctcatacactataaacattaaaattataaattataattgatatctatatagaaaaaagtgttactgtttggattcacataaaaattagaagtccatggaaaacatgtgctctagttaagtatctgatatcgtacataccaacctatctatttaaagatcttaaaagtatgaggcccatgcaccattgtattgatgctgtatatatgcaaaatatgaaagtatttattccattataaactatgtaacaatattattaaagtctccataaggctagggatcctggtggactagacagataacacaaattacatggctcaaaagcttacacttgggtgtacaaaaacacctagttttcctgaaaatccactgcacatttctgaaacaatcagactatattatggtgacagatattaaggttctgttggtacatgttttaaagtaaataggtattcaggcagagaatgttccagggagtataagcagaaaatctataaatcatctcataataatgttaaattttataaagaaatcaattatttcttcccttgttcaattggggaaactggattcaagaagtatctagattcataggaccgtctcgctgggtgttacctttatcttaccaccagtatcctgtgaccctgtcttcaggcatttaattcccagaacaaattgtgtacactggtgaacatgaacaaaagttttacaggtatttttataatatattcaaaaataacacataaaactgtgatttcagagttactagctaaagataaaattaaaaagaaagcttgaagcttgtccttaaaaaaatgaacaatagtatagatgatacaggagtgtgacaaaaatcatgatccttgcctaaaaacatgacaggagtttggaaagcaatggaagagaggcatacaggggcgctgagtgtgaggagctgcggatgtgtcttgcttcagtgtatgctgcagaaatctataattagtgtgaagcactgtcagagtacatcttcagtagtaaatgttattcttcctaaactgccatcaagtttgttatattgatgtggaatataaaaatcgacaaactttttaacacatgagagaacacagtaagtgaaagtatggatcatctcactgggaggattttggagatttagacatcagttagaccatttctagtatttatcagattatagatactttcaaattagattgactaaaaaaagttttccacactgtatttagagatatcagaaaataggtcaggctcatgcctgtaatcctaacactttgggaggcccaggtgggaggattacttgagcccaggagttcgagaccagcctgcggtacatactgggaccctgtctttacaaaaacataaataaataaaattagccaggtgtggtgacaggctcctgtagtcccagctacttgggagcctgaggagggagaatcactacagtctgggatgtcgaggctgcagtgagccatgatcatgccactacactctagtctgggtaacagagcaagatcctatcttggaaaaaaaagaaatatgggaaaataaatgaaaaagagacaaaatatagttgaaatgtgttccccaacttgcttgaattgtttacttactagggatgcagacttaaatagcataatttgttgttatactctcaacctaaaatcagtttcacagtgatgttatatgcatctacttttttttttttttttttttttgagacagagtctcactcttttgcccagctggagtgcagaggtgcaatcttagctcactgcaacctctgcctctcaggttcaagtgattctcctgccccagcctcctgaggagctgggattacaggcacatgtcaccatacctggctaatttttgtatttttagtagagatgggggtttcaccattttggtcagactggtctccaactcctgacctcgtaacctgcctgcctcagcctcccaaaatgctgggattacaggcttgaaccactgcgcccggccatacctacgtattttaaatatattcgtatatgcctctaatatgtaaaaatgaaccccaaagatcctgatataatttatctaaaatataattgtctaaaatataatttggacaaattattttaccatataaatgacttcatcaattttcagatatcctgcccacattggccaaattctacattttgtggggaaagggaaaagaagaaatagacatagagatggccaagtgctatggtttggatatggttgttttcaccaaaactcatgttgaaacttgatttctgctgtggtgatgttgggaggtggggcctatgggaggtgtttaggttgtatggtcagatcccccatgaatggcttgctgctgtcattgcagtagtgaatgagttctcactcttgtgagactggattagttcttaggggaatagatgagtttccttgagagtgagttgttgtaaagccaggacgccactcaggtttcctcttctttgctcctgtgtgcttcccctttggtctctgtggcaccacacaaaagccctcaagataaaccagggctatgccattgaactcagcctgcagaactgtgagctaaataagcctctttttatttataaattacccagtctgaggtatttttgctatagcaacccaaaacagactaatgtacaagaaatttgcaaagcccctctccctctatgccagacacttgcctaataatgttcaggaattatatgtaatgtatacaagctgcagtaaaaacaaaaaaaatctatatgggactctttaactgcaaagaccttgagatgacacatctttttcaatgtattttgattttactacaacaactagctcagagggagctttatagggagcaatattactcattaactctttgttgaatgaattaatgaactagtgagtggattaataaaattaggccagttaagggaacacactgtttctacgccagttggctattttgggtttaaatatttttaaaattactgttggttctgctctttttttttgaaacaaggtcttgctctgtcacccaggctgcagtgcagtcgctccatcataactcactgcagccttgaactcctgggctcaagcagttcttctgcctcagactcccaagtagctgggactacaggagtgtgccaccatgcccagctagttgtaatttttcttttttttttttaatagagacaaggtcttgctacattgcccaggctggtctcaaacttctgggctcaagcaatcttcctgtctcagcctcccaaagtgttgggattacaggcatgagccaccatgcccagcttaacgcttctctcttgaaggctgagaactaataaattaatctgcctttgattggctaattttctcaataagaaaaacaaaaaaccacatatcagtcatccacatgcccatctcagtaatttattccccaaatattattcttctcagttacaaaatttgagaggaaacttagttttttcaccaaagataggtgggataaaaataatatagtgtgagggatttcaattagacatattacaatatttaattagacattttaaaaccatataataaggtatgttcatagtaacaaaccttaatacagtttgataaaattttgtaaaatcctcttccctggaagtcattataaaggcattcttagtgattttaataacttaatgctttagtttccggtttaaagccaccagctgtctaatgacagccgaatgcactgatctttaaaaaactcccttaaagttttatgattcaataaacacaagacctagcatttatttaggatttcacgtttcacaaaagcccttttaaaaacatttttatcatttaatcattaccacaatcctaattagtatgcctaattatgtccatgtctttactgcagaaacttattcttgattgagtgattttcataatgtactacagatttgtgcagcacagaccttggattcaaactaaacttagtcacatccaattacatcatgttttatcgtgttgctgataatcatgatggcaaccacctctactctacagagaaataagttcactttaagacaggctttcactgtttaacaggttttccctcagctataaatagcatagtataaaattccattctttcacattgttgcacttaaaagatcaagtcttatctggtattaaaaagggaaaggatctgccttttcctgtatgtaaattttatctgaatgaaaagattaacagaattattaataaccaataatgctatgaggtaaaagctactcagtaataggagttattgctaacaaaatgaactctggaatagagaatccagaaatagacccacacatatatagtcaactgatctttgacaagagtgaagacaattcaatggaggaaggacagtctttttaacaaatgatgctggacatctgcatgcaaaataatgaatctagacacggagcttgcatctttcacaaaaattaatctaaaaaggattatagccctcaatggaaaatgcaaaaccataaaactcctagaaaataacataggataaaacctgggtaaccttgggtttgatgatgactttttagatacaaagccaaagcaaaatccatgaaagaaaaattggtagttgaacttcattaaaaattcaaaacttctgttttgtgaaagatgctgttaagataatgaaaagacaagacaaaaaaatctttgaaaagcatataaaggtctctacaaggagaactacaaaacactgctgaaataaatcacagatgacacaaacaaatggaaatacatcccttgctcatggattggaagaatcaatatcataaaaaatgaccatacttcccaaagcaatctacagattcagtactgttactattaaaataccaacatcatttttcacagaattagaaaataatcctaaaattcatatggaatagaaaaagaccttcaatagccagagcaatcctaagcaaaagaacaaatctggaggcatcacatcaccagacttcaaattatactacaaggctacagaaactaaaacggcatggtattggtataaatatagataaacagatcaatggagtagaatatagaatctagaaataaagtcagatatacccagctgatctttgacaaagcataagagcaaataaattagggaaaggacatcctattcaataaatggtgctgagaaaactggatagccacatgtagaagaatgaaactggatccctctctctctcaccatattacaaaaatcaactcaaggtggattaaagacttaaatctaagacgtgaaaccataaaaaattctgtaagaaaacctagaaaaaactcctttggaccctggcctaggcaaagaatttatgattaagaccccaaaatcaaattcaatgaaagcaaaaataaggaaataggacctaattaaactaaaaagcttctgcacagcaaaagaaataatcatcagagtaaacagacaacccacaatgagagaaaatatttgcaaactatgcacctgacaaaggacttatatccagaatctacaaggaactcaaacaaatcagcaagaaaaaacaaatagtctcatcaaaaagtgggtaaatgacatgaatagacaatcctcaaaagaagatatataaatagccaacaaaaatatgaaaaaatgctcagcgtcactaatcatcagggaaatgcaaactaaaaccacaatgagataccaccttactccagccagaatggtcattgttaacaagtcaaaaaaaacaatggatgttggtgtggatgtggtgaagagggaatgcttataaactgctggggggaatgtaaacgagtacaacctctctggaaaatagtatggagatttctcaaacaactaaaagtaattctaccatttgacccagaaatcccactactgagtatctactcaaaggaaaataaataattatgtcaaaaagacacctgcatgtgtgtgtttatcgcagtatagttcacaattgcaaagatgtgaaaccaacctaagtgcccatcaatcagtggataaagaaaatgtgctactatacacatggaatactactcagccacaaaataacaaaataatgtcttttgtagcaactcggatggagctggaggccattattctaagtgaagtgactcaggaatgcaaagtaaatactgtatgttctcacatataggtgggagctaagctacaggtacacaaaaccatgcagggtggtataatggatattggagactcagaaggagggtgatggataaaaaactatatattgagtacaatgtacacagctagggtgacaggtgcactaaaatctcagattgcaccattgtataatttgcctatgtaaccaaaaaccacttgtactcaaaaagctattgaaatatcatatatatatataatttatatattatatataaacatatctgataaagggctggtatacaaaatatacaaaaaaaactcttaaagctgaacagtaagaaaacaactcaatttaaaatggggaaaaatctgaacagacacctcattaaagaagacatgtagatggccaataaatacatgagaaattgccaacatcatgtatctttagaaaactgcaagttaaaacaataatgaaataccactacacatctattagaatgactaaaatcacaaacacaacactgaatgtgacgatgtagagtaacaagtggtctcattcattgctgatggaaacgcaaaatggtatagctgcttgggaatgcagtctgacaatttctcacataactaaacatactcttaatataagatcctgcagttgcactccttggtattaacccaaatgaattgaaaacttatatttacacaaaaaactgcatgtgagtatttatagcagatttattcagaattaccaaaacttggaagcaactaagatgtccttcagtaggtgaattaataaactatggtaaattcacacaatggaatattattcagtgattatcaatccacaaaaaatcatggaggaaccttaaatacatactgccgagtgaaaaaaaggggatctggaaaggctacacaccatatgattccaactatataacattctgaaaaaggcactcttatggagataataaaaagatcagtggttgccgtgggcttagtggggaggggagaagggatgaataagtgaatggagagggcatttttaggaaggtgaaactattctgtacaataccataatggtgggtacataatatatttgtcaaaacccacagaacacacaacacagcgtgaaccttaatatgaactatggacttttagttaattatgtatcaatattggctcatcaattttaataaatgtaccacacgaataaaatatgttaataatagaggaaatgagcagtattgtggagggcagcagtaagagaagggtatataggaactctgtattttccacttaatttttctgtaaacttgaaactgttctaaaaaataaagtctattcaaaaatctacatgattcaaggccaggctggcaaacattttatctctatttataagcaagatagacttagtatagtgtgattattcagaattagaaaacatacatatatatttgtttatctctcccaggaaaatacaaaaaagtatcaaaactgtaagaattaaatgactacttcttaagaaacccaaaccataaagatttagaatattcttacaaaagtatagtttcagttgtcttgaagacattgtatttatgttcttctgtttaactcagtatttactaatccagtttaaataaggagaatttgatttattaaatatgtcctaaccacaaagagaaaattttctggacaattaattttgaaattagcctttttctcatgcttattttatccataatttagcttttgagaacagaggatgattgtcagaacatttcagtaatcagtatttatcaatcctttattagaactctggtcctaaaatataacagttatagaagaaaatctgtgtagacaatcacccaagacttttcccaccatacatacattcccagatctaaatatagtagatctataaaattctaaataaaaatgttcaaagaatttcaaatcaatatttttttttagggtggaatgagttcccagtgggcccaagatcaactctataatttgtcttggtagttaattatcataatagactaactatattacattctatataaaaataagacttgtgcagcaacattcatttgaatttgttagtcctcagtaggattttatttctgttgcattgtaaaactggtgtttcaatttgtgtactcttcatcctatttacgtagactgtacatacttaatgttaagctatgaatattgtaaatattataaataccaggtaacttatttatgttccagaacaactcgggaggaattattattttttgtgtcaaagtacttcaaggcaaaggtgataacaaatatcgaaaataaatgatttgatgaagagctatgtttcattacaacagtgcttgacatgtatatattaacaggtatttgtagaatgaaagactgggtgaatatatactcctaaacttaacaaaacaataaaggaaggttactacatttattgaacatctactatgtactaggcagtctgcacattatcatgaaacagcacagcaaactaccattatataaacaattaaagatgaaaatggtggctcatgcctgtaatcccagtactttgggaggccgaggcgagcagatcacgagatcaggagattgggaccatcctggctaacacagtgaaaccccgtctctactaaaaatacaaaaaaaattagctgggcgtggtggtgggtgcctgtagtcccagctactcaggaggctgaggcaggagaatggcgtgaacccagcaggcggagcttgcagtgagccgagatcacgtcactgcactccagcctgggcaacagagtgagactccatctcaaaaaaaaaagaaaaaaaagatgaaaaaggctaagtaacttgcccaagtttacacagctgttaagtggcagagttagaatgcaaactgggaatgtttctgacccctgttcttacttttactcattctatgttgcctaatagagatgagtagttggaatcatatggtctgtagatctgaaaatttgaaatcataacatcctcaaacttgggtaaaaaaccctctcttctccaagttttgggatgtactctgtgcccaacagaagaaggtagaattaagagcatgctaacagtccttaaaatactgcagtgagtatatctacgaatacctgttaatatgtacatgccaagcacagctgtaatcaaacatagctcttcatcacatcatttatttttgatatttgttatcacctttgccttggagtactttgacacaaaaaataataattcctcctgagttgttctggaacataaatcatattttgacttttctttggtacaacacagcagataaggtataatgtccagaggaccccaagatgggtcatcaacctaaccactttttcacaaaattttcaactaagctatgggaaatatttttattttcaaagagagctttgttaacatgcatctatttctcattgacataaaacagaggtgagattttgacaaaaactggaatcacatttctcatattgcttgcccaatttcggcttccaccaattcatcaaatttctcctgaaagtcaagacagtagggatgagcataggcacttttctccacctcatctcctccaatccactgtcccaatcccaaaggttctctgtgaactgcatgtttggaaggctgttcaaaactaattttattgacctaatgacactaggaaaattgttgcagttgctgtgagttttcttttgctacttagaactgacatgagctgtagaagtcagtagacttactttacagacactgtcaatgttagtcacctttactaattcaaaaactcagtgatagtcacaggtttatcataatccaaacatggaacatagaaacaaaccctattagtggtgtgaacctttcaaccctgattaactcatctgcctaagacttgaaattttatgccaagcaaggatgattatcctaccgaaggaagtctgactgacatactcatttaggaccaaaatatgcctatcatttcccacttcttcagcccctggggacttcagcatcttcccagtctttgcaaaactccgtcttagaccttttttttggtggctcctatattttagtctacactttccctgccttttgactaacagggttttttctgtccttctagtctggcctcagtcagctgctggcagtcttaagttattaccttggtccacttccttatttccattcttgatatttagggtaaggcacagttagtcccaaaagacacaaaacatcagctgatgcatgaattctcctgttcaggaaccattgcagtgaactgtagcaactcatagctccaaaccacatgccactgtacccaaacagaaagaatctatccgcagtccatgaccaatactaatcatcataacaattttttttttgagatggaatctcgctcagcaccatgcctggcctataatgttttttttttcattcgtcagtaggcatttatttccatctttcagttattacgaataatggttatgagcatagatgtacagatacctgtttgtgtccctgccttcaattttttagggcatatgcccagaaatggaattgctagatcaaatcgtaattctatctgtaattttttgaggaactgccatactattttccacagtgattgtaccattttacactcccacaagcagtgcacaagggttcaatttctccatatctttgccaacacttgttattttattttgtcttcttttcctttttgatagtagccctctgtattagttcattctcacattgctataaagaaatacctgagattggataatttataaattatgaagaaaagaggtttaattggctcatggggttctgcagactacaggaagcctgatgctggaatctacttggcttctggggaggcctcaggaaatttacaatcatggcggaaggcaaaggaggtgccatggccagagcaggagcaagaaagagagagggtaccacacacttttaaacagctgaatctcatgataattcactccctatcatgaggacagcatcaaggggatggtggtaaaccattcatgagaaatccactcccatgatccaatcacctcccatcaggccccacctctaacactgaggatttcatttccacatgagatttgggggtaaagtgatatctcattgtggttttgatttgcatttccctgttggttacaaatgtcgagcatgtctttctttatttgattttaaatgctgaatttgagcaataggaattgtatcaaattagcaaaatgggcaccgttcacaagtaccttaagactgtccctgttcctcatatcccttggcatcaacatttgcgattggatcatgggagcggatttctcatgaatggtttaccaccatccccttggtgctgtcctcatgatagggagtgaattatcatgagattcagctgtttaaaagtgtgtggtaccctctctctttcttgctcctgctctggccatggcacctcctttgccttccaccatgattgtaagtttcctgaggcctccccagaagccaagcagatgccagcatcaggcttcctgtacagcctgcagaaccatgagccaattaaacctcttttcttcataatttataaattatccagtctcaggtatttctttatagcaatgtgagaatgaactaatacagagggctactatcaaaaaggaaaagaagacaaaataacaagtgtcggcaaagatatggagaaaatgaacccttgcgcactgcttgtgggagtgtaaaatggtacaatcactatggaaaatagtatggcagttcctcaaaaaattacagatagaattatgatttgatctagcaattccacttcagggcatatgccctaaaaaactgaaggcagggacacaaacaggtatctgtacatctatgctcataacatcattattcataataactgaaagatggaaataaatgtctattgacaaatgaatgaaaaaaaagtattataggccaggtattgtggctcagatctgtaatttcagcactttaggaggccaagacaggtggattgcttgagctcaggagttcaagactagcctgggcaacatgatgaaacccagactctagaaaaagtacaaaaattagcaaggtgtggtggtacatgcctgtagtcccggctacttggcacactgaggtgggaggatcacttgagccaaggaggcagaggttactgtgtgttgagattgcaccactgtgctctggcctgggtgacaaagccagactctgtctcaaagataaaaataatgtagtatacatatatacatacaatggaatattatttagccttaaaaaggagagaaattcaaattctgacacatcctacatcatggatgaactttgaagatattatgctaagttacatagccagatataaaaggaaaatattgtatgatttcactcatatgaattacttagagtaggcaactttgtgtacagagagaggagcatggcagtttccaggaactgggggcagagggaatggaaagttactgtttgatggggatgaagttttagtatgggcagatgaaattctggaaaccggtgatggtagtggatgcacaacactgtgaatgtatttaatgccacttaagaatgattaaaaaggtaaattttatgatatatatgttttactgcaataagaatataataaaaatttaaaaatcaaataaaaatacaactggaaatgaccaaaaagattcacatatcaatgctccttgatttttgtgtatgcagaagctgaggccacaagagattaaacttctgagttaagaaaacacatctagttagtatggcagagctaaaacaagaacctcatgatcctgagactccaaaaccaggatatttccattatcccagggttatcgccctttcctgctaagttgcttatttcacttagccactttgatttctggccttctcacaaagctctggtgtgtccccaggcatgactctacataactatggtctctttttggtgatggttgacattcttgatacatggccctttctagaagaaggggaggattgctaatcttcaacaaaaatactagtggatttccaattctcaatactattacttatggctggataatattctgagacaggctagcatagtttgacatctggtaaggtgtcttaaccagcatgccaacttagtgaaagagccgggtgttaaataagcacaaggaccagtgatctgatcttttcctgtcttgttaatttctttttaaactatatgaccaaagtcttgcaacacactgtgatgaggggtgatcacagcaagctatgaccctgataggtgaatcctagcaccttcattaatccctgtgaaactcccctgccccatcctaacttgggtgaacctattctgacattggttctcatgggagactcctgccaatcatacaaaatagtggtatgtgacagcagtcatattcaggagtacccctgttcaattttctcctagttggccgagcacggtggctcacgcctgtaatcctagcactttgggaggcctaggcggctggatcacctgaggtcaggagttcgggatcagcctgaccaacatggtgaaaccccgtcttactactaaaaatacaaaaactagctgggtgtggtggcaggcgcctgtaatcccagctactcaggaggctggggcaggagaataacttgaacctgggaggcagaggttgcagtgagccaagattgtgccattgcactccagccagggcgacagagcgagactctgtctcaaaaaaaaaaaaaaaaaattctcttagtttcaggcatttcccttgtagctaaaatcttgcaacattggagtcttcatctgactatggcccatcagtagtggaattatgtaaagccccacatctaggagccagacattaaggagcttcctttactctatctctactcctaagatcagttctgcaagcttaatctcattttgaagattgagaaacagagactcagatttaataagtttcatcaaattccttataaacaatcaatatacccttgagttctagcctctcacacattctaatcatggctggcccgtaatcattccttcagcattcctaactccagatggtcattcacaccttttccttgtccagaccagtgcttctcaagctttaatgtgcatgggaatcacctgaatatcttgataatatgcaggttttgattcattaggtctgagatggagcataagattctgcatttctaacatttttccagccaatgcgtctgaatccagataataaattgtgcttcccaacaaggtagtcttcagccacaaattgtgattacacacttgaaatgtactagtttgaactgagatgtgctttcagtgtaaatgacacaccagattttgaagacatagtctaaaaagaagtgtataaaaatctcacaatttttatattgatcacatgttgaaataatattttgaatatattgggttaaataaaaagtataattaaaatcaacgtctccttttttacctttttaaattgaagattagaaaatttaaattgacaaatatgtttcatattatatttctattggacagtctgctttagagaattctcctaaatcttctctacccatttatcatttagcacatactgctttgtagtgataaaagtcacatatgcacatcttgctggctatgcagtgagctcttgaaattccaggcttgtatctcattcctcattgtgtaagactatatcttattccttcttgtatctacagcccccaaaaaagtacctaccttctaatagattctcaatgatcaccactgaataaaatttgaacccttttgaaattttgcagtgcttagcacaatgcatttctaatagaaggtcttagattaaggtatgggtcagttccagccaacttcagtgctttacttacagtgtttatggattgcctgacctgctgtactctctactaagggaattctcaataactataatataaacctaatcaaaacataattagaaggcaaactactgtaaaaaagccatcatctaatgcattcctaaaagagatttggggattatatctgcaccactggttttctccttcaggataattaaaagttgattgaaagagaattgcttaaaaataaagaaggtgactgtttctttttcagtaccattgtcatgattgaaatgtggatcttgagaaggcacttggctagaagtaaggggcacatcgcaaatgttatgtccaacaggatttaagaaacatttactcatcttcaattagaggttcaaaggtcacttcctcttagagttaaatgtacttcctggcacatcttcattcattccttattcactcattcattcactcactcacttgcttactacttattcgccccctcacttaactcacaggctcattctttcaacaagcaattttctgggcacctacaataaaccaagtgctggtgatttcagcactcataagctagtctagtgtaagagacagacacatataatttcttaagtaaaagggagttttcagaccatcctctttgcttactattctctaaactaaatctggtagtttgctctacttttctgaccaatcatttacacattagtatcatcatataaagaatttatagtattctctgatggtagtttgtatttctgtgggatcggtgatgatatcccctttatcattttttattgcatctatttgattcttctctcttttcttctttattaatcttgctagtggtctatcaattttgtcaatcttttcaaaaaaccagcttctggattcattgattttttgaagggtttttttgtgtctctatctccttcagttctgctctgatcttagttatttcttgccttctgctagcttttgaatgtgtttactcttgcttctgtagttcttttaattgtgatgttagggtgtcaattttagatcttttctgctttctcctgtgggcattttgtgctataaatttccctctacacactgctttaaatgtgtcccagagattctggtatgttgtgtctttgttctcattggtttcgaagaacatctttatttctgccttcatttcgttatgtacccagtagtcattcaggagcaggttgttcagtttccatgtagttgagcagttttaagtgagtttcttaatcctgagttctagtttgattgcactgtggtctgagagccagtttgttataatttctgttcttttacatttgctgaggagtgctttattttcaactatgtggtcaattttggaataagtgcgatgtggtgctgagaagaatgtatattctgttgatttggggtggagagctctgtagatgtctattaggtctgcttggtgcagagctgagttcaattcctggatatccttttcaactttctgtctcgttgatctgtctaatgttgacagtggggtgttaaagtctcccattattattgtgtgggagtctaagtctctttgtaggtctctaagaatttgctttatgaatctgggtgctccggtattgggtgcatatatatttaggatagttagctcttcttgttgaattgatccatttaccattatgtaatggccttctttttctcttttgatctttgttgttttaaagaaaaaatgctcatcattagtggctctcagagaaatgcaaatcaaaaccacaatgagataccatctcacaccagttagaatggcgatcattaaaaagtcaggaaacaacaggtgctggagaggatgtggagaaataggaacacttttacactgttggtgggactgtaaactagttcaaccattgcggaagacagtgtggcgattcctcaaggacctagaactagaaatatcatttgacccagccatcccattactgggtatataccccaaggattataaatcatgctctcctaaagacacatgcacacatatgtttattgcggcactagtcacaatagcaaagacttggaaccaacccaaatgtccatcaatgatagactggattaagaaaatgtggcacatatacaccatggaatgctatgcagccataaaaaaggatgagttcatgtcctttgtagggacatggatgaagctggaaaccatcattctcagcaaactatcgcaaggacaaaaaaccaaacaccgcatgttctcacccataggtgagaattgaacaatgagaacacttgggcacaggaaggggaacatcacacactggggcctgtcatggggtggggggaggggggaggggggagggatagcattaggagatatacctaatgtaaatgaccagttaatgggtgcagcacagcaatatggcacatgtatacatatgtaacacacctgcacgttgtgcacatgtaccctagaacttaaagtataattaaacaaaaaaataatttaagttttttttaacatatctaatcttgaagtcgctttgagaatttaaacttattattttccaatctgcaatttttaaaagtctcctcgtacttgtataacagagcaatactatggaaaagagtaccttaaaatttaacatatgcaactgttatattctaataacatttggaatttcgcattcatttcatttttaagacttgcctggctcttgccagtagcattctcctacatattttcaccttacccacgcaagagctgcagtttcactgcaaggcgagggcagatgctcagtcaaaatccttgtctgcaacgactcaggcctgttgttctcatgcatccatttactctgtcttccagataggaaggtccagctaatagtgattatctgaagccacgtttattaaagaaaactctgtctgttggaactttaccttatttatcatgtaaaaaaaggatgaaatgctagtttggaaactcattttcagtaaaaaatgtgtatttgcatgtgttatatgcatatatcagtgtatcttgatgggatcatatatcccctgccataatataagttcttgtctttttcagcattgtactccccagattatgcacaagaaagttttctaaattgaaatggaatctatgaccacataagctaggcatgacagaagggagaggcattttatttctaagtctcatttcatcactatcatcacaacaaatttaacattccttattttctgagaaaaataatctatttgatatcccagtataatcatatctttggagaaaagggattctgctcatttttctggagccacacatggctgtgcatttggggagttccctgcagctaggctttacacacgacagtcattggtctagcggtgacactggaacaggacaaaattaatttcttgccctgagaaatatggaaggaaaaaaaagaaacataaaaatctattatttggacagctttaagctttgacctactcaacaaagctaatgcaatagtgatgttcactcattaattaaaattcttctaatatgaattttatattaattatgtattttatattcatattatgcattacctgttagaggcttgtatgcccgcagcactaatgctagtaattaaagatctgttggcaacctgctttttagcaacacggttttgaatcataggaagctgaaatctggcatacaatttgtcattcatgctgaagtgggtatttttcttcaaaacgcaattagaattagttcatgtcattttagtttaaaagcaacaaaggcaaatggtttgttgctttacgttggcattgagtccagtggatcgattttcaaattctgccttaaaatataagtttttggttttccatgcgtatgaatcaaatcccctttggtattcaaagaataaaaattatcctttagtttgtatcagttttcaagttactatattgtataatatgtttatttgttttagccataaaaaataggcccaacaggttatttcagacctgagatctggaggatctggggtgctaagatgatcagaaggagacaatgcattgcttaggaggtcagcaatgggagagaattctagggcctcatgcccttgccaggggtcaactgtttacaggagaatgagatactccagagatcagatatatagttgtgatcctgacctaagatacagtcttacacaatgaggaatgagatataagcctggaaagttcccttttgaggactttaaaaaaagtcttttattttataaggagtgcaacgaagagcttagatacttgcttaagatcatagggcttattaagaactaactcctgattccttcccagtccaattttctgacacaagcatacactgagaatttgagtaacttaatgagttgaaatagttttaaattgatgtgaaagttttcaatgtaatttagcaaatgcttattgagtaccttctacagagagagggtaatgtaggcctaaagcccaagctccctcaaatagttctggacaacaggctggagtagattataaagaaggcaggagggctgggttggggacatcagagctcaacatatcatggggagaggctgaagaccacttggatgcaggaatgaaggtgggcacctaggagaggggtgggaagagctccagagatgctccatgggtgcactaggtcaatatgccagggctgaggatctgatacatgtgcctctatgagccaaggctgacaattatgtcaattcagccagattatggagtagaagatgtggaagatgtttacttttatttatttatttttattttttatttttttatttttgatacagagtcttgctctgtcacccaggctggagtgcagtggcaggatctctacccactgcaacctctgcctcccgggttcaagtgattctcctgcctcagcctccggagtagctgggattacaggcacctgccaccacacccagctaatttttctatttttagtagagatggggtttcaccatgttgtccaggctggtctcaaactcctgacctcaggtgatccccgccttggcctcccaaagtgctgggattacaggcatgagccaccgtgccctgccagatgtttacttttaaactgtcagaacttactatgagctttttcactcataacctcgagactctcttttctggaataatggagacccacaggacatttatgcacagattcagccccatgccagtcttgccttagctaaggaaaaattaagaggccatactcaatcctaagaaaatacatcctttgaccggggtattaaataccaataacagtttctccttgttcctgagatcaatccctcccaaattgctgcatccctacacaggtcccaatatctacattggatttctgtgtcaggattcacctgacaggacatcccatctctctagagatgggatcagtccccatctcccttacccagggctgacacagtcccctggtggcagttgcctaagctcttccaatagcacctacttctgtttttgtttttgttttctttttttgagacggagtcttgctctgtcgctcaggctggagtgcagtgacgcgatctcgactcactgcaagctctgtctcccgggttcacgccgttctcctgcctcagcctcccaagtagctgggactacaggtgcccgccaccatgcccggctaattttttgtattttcagtagagatagggtttcaccatatttccaggatggtctctatctcctgatcttgtgatcctcctgcctcggcctcccaaagtgctgggattacaggcatgccaatgaatagcacctacttctaatcctcatggtgttattctgtctagccatgaagatacccattacatctgaaacttgctgaaatattataggctttggattcagccagatctgccaactaaatgccatcagaggtcttgttcagaggaccagctctgccaagctttttctgccataatgaatcatctcatatctggttgcatcacaggatctcacaaaagatttaggaggatgatctactaaaaccatgaactttgaagtttgttagaccttattaaaatatttgggttactttttaaaattatttattttctaaaaattgtggtaaaatatacataacaaaatttatcattgtaatgattttaaagtgtgtagttcagtggcattaagttcattaacgttgttgtgcaatcatcaccatcatccatatccagaactttttaccttctcacaccgaaactcaacccattaaacatgaattcctcattcctgcctctccccagccctggcaaccagcaatctactttctgtctataaatttgcctactctaagcaccttttatgaacagaattatgcagaacttgtcctttgtgactggttcactgagcagaatatctttaagtttcatccatgttatggcatatgtctgaatttcctccctttttaagctgaataatacttgactgtatgtgtatactgcatttctttatgtgtgtctctgtctatggacacttggattgcttctaccatttggctattgtgaataatgctgctgtgaacataggtgcacaaatattttatccctggtttgtttctttgggatatatatcaaaaagtggaattgctggatcatatggtaattctagttttaattttctgagaaacttccaaactgttttaggactaccttttagacctgacattgaacaaaaacattttaccatttccacttcttcacatagatgtacttcggaggtaacagtaaaatgattttgaatgcatgcatgcttattggggttaagagagaagcttacttcattatctttaaaatagagcttatgtgtgttgaagtttgggcaaataaaagtatgttacagcctattagaaagtaaaaacaaaacaaaaaactctatctactaagacctaactatgtggatcatctagagaacatgtcagctagagcaatccacattgtctcactggcataatatgatgttttttagataaggacagtaggagttaaaaattaaatggatcactaggcttaaatgcttttttaaaagagaaaatttaaattataatgagaacagagtttaaaagattataaaatgtgttaatatagagaaagatacccttatttaaattatacctaagtctttctaaaaataaagtgaaaatcttcaatctaagatacatgggttgtgcacacatagatgaaatctacttttacaaaatgatttactgtgtacctaaagaatggattcactcaggggaaccaaataccaagttatggtttattgcagaataataaatctgcaatttggaaaagtcttgggtcagcatggcatggtttttagcaattatgaaatggctaggttttaaatcttgtgatttaatcacgtattaaaatactctcttaaaaattgttgcaagacagctctgttaaaacaaacaaacaaagaaccacagcttctaactggatttctgctaattgtcctgaagcttagcattaggagaagagcccactctttatttctgtgctgtttactgtttaaattgtattggatcttgagtatttgtagcctcagtttgaaatcagatgctcttccagatatgaaccaactgactaacttccaggagatatcagggaatcattatccaatatgtgatttcatagtttgttctcagctgtgatttattaagctggtggctattgtcattaaggattgcttgtgtatggtaatagtatagattcagcatagagaattgaaaaattatatttgtttcactttgtttcaaaggctaattgtttggtgttttcatcatttctatgataggcgaaacgccccaagtgaaagggttaaatcatcaaattatatttttatccttataaaaagtattaaatacttattctaacacactccattatgtcatggtttaagtctcgtacccacaatatatatggtatagttgaaatgtcatcaatacacacacatgcatgttatatatatttagtgattcataatgattatacatatttatggggtacgtgtgatgttttgatatatgcatacaatgcttaatgatcaaatcagggcatttaggacatttatcacctcaaatatttatcatttctttgtgttgggaacattccaaatcttctgccaaatttgaaacatataataaactattgttaactacagttactacactgtgctaccaaatactggaattattccttctaactgtatgttttatccattaaccaacctctcttcattccctgacccttccctttctctgataaccataattctaccctctacctccatgagatcaactttttaagctcccacatatgagtgagaacatgcaatatttgtctttctgtgcctggcttatttcacctaacataacgacctacagttccaaccatgttcctgcaatgataagatttcattctttttttgtggctgaatagtatgccattgtgtatatatatcacattttctttgtctattcatccattgatgaacacttaggttggttccacatcttggctattgtgaatagtgctgcaataactataggggttcaggtatctgttgatatactgatttcctttcctttaaataaatacccagtggtgggattgctgcatagtactgctgttctatttttagttttttgagaagactccatggttttttccataatggctgtactattataatttacattcccaacagtgtatgaatatccttttctctgcatccttgtcagcatttcttatttcctgtctttttgacaatagccattctaactggggcaagatgctatcttgtggttttgattggcattttcctgatgatagtgacattgaatatttttttcatatacttgttggtcatttatgttttcttttgagaaatgtctattcaaatcctttgcccattttaaatggaattgtttgggtttctcttttttttttgctgttcaacatctatattattactaatcattactctaatgtgtttctacattcttggttaacagaattatccagacttttctcatttcatcatacaacctttattctactatgtgttgggcagagtagtgggtgctggtgaaatatagataaataaaattgcaaccaggcgcggtggctcacgcctctaatcccagcactttgggaggctgaggcaggcagatcacctgaggtcgggagttccagaccagcctgaccaacatggagaaaccccatctctactaaaaaaaaaaaaaatagaaaaattagccgggcatggggcacatgcctgtaatcccagctattcgggaggcagaggcaggagaatcgtttgaatctgggaggcagaggttgtggcgagctgagatcgcgccactgcactccagtctgggcaacaagagtgaaactccgtctcaaaaaaaaaaaaagattgcacttttgtcttcaagacactcaacatctaattaggcagaagttggataaatgttgatggctattatttgatagatttgaactataatatattgtactgacagaaaaataagtgagtgcctgaatgatgctatttgttctacaaattttcttcaagagcttattaatcatgtcatctttgccacctgaccccagcctttaggacattcctgacatagccatcaaggtgttcatggtctcttctaccctaatgtcaatgtccttttttgctaagccagtagtctcactgtttcttgacttctactcctagagatttggtatcctacatgctactcatatggctcccttcgaacttagtattccctcgtattgcacagtaagagatgagtctggttcgatggttgtgaatgttctccaggaacattcaatttgaggataaaaagaagtatcaaattctgaatcaaactgttctcaactgtctctgaagggaaaatctcatggttgtgctcttaggctgtaactcaaatgaatgattttagccctatttgggtactaaatgactctttttaaattaatctatcctattaagactatattttattacagttatttgtttatgcatctatcactcctatttagaccaagatttgcaagtgtagaaacagtgttggtataatacaatatgtgagaaaaagttttagcattttcataatttccatcagtaactctcctctgccattttaatattaatacaactgatattttctcagttttatggaaaatatgagtgaagacatcttcataaaactttgctagttttttaaattaatctataacatataatcttaaactaacttcacttgaaatgcaaacacagcctcatgacaaatcccttagctcctaaattaccgtccctaaacttctaaacagaaattctggagatgccatggggcgggagctgggcatttttcatctttggatcactaacttgtaaattcatgccaagaagacagtaggctctccttacatgtttcctaaaaaatttaggttcaagagaaatctgtgtatcaagagctttcattcctttaaaagaaatatttatggtttgccatgatgtaagaaacttttgggagtgatatctacaaggagggaatttcaattgtgagagtttcaatttaaaaaaaattcatccagcagttggtttctcttccaaacttccttgagaaacagcctcaaccatatcatattgcgctgggttttattttaggcatcctaacccaaaccaagtttatttatcccctcattagtttatttgaaaagcagtaagtaaagaaatcttacatcccagccttaaaacttttcacgtgttccaggaactccctttgcactaattatacttataacactggaactagattatttcctttatagaactcagaggcttccaaagaatacctgaaactcttaacctgaaatcaaatgagcagtttgaggatctcagtaacaccataacaacaatctttacccttttatttcttttgttaatacttttctcagctctcagtttcatcagttacttaataaccttgtttatcaatttccttattaataaaagaaaacttcattcctaggagcttaggtgaagtgaattgcctctatcctcctcctcattaagcttttggaaggcaccttggacaaatgagcctaaattaccgtgcctgccaacagcaaatattttccacaagaaggcctttttaaggagaaatttaggtcaaaagcagcaaaatttaaagagtttacagtttacagtgactactgaactagcgctatgagagagagagtgagagggagagagagacagagaaagacttctttataaacataatgccatttaataaatgtggaatgaattgatataactaaaacaaaattcccattttatacttctcaatatgaataaatgattaaggcaagattaagatcaatgatggattacaaccattagctgaaatgttgttctgaaactgagtgttcaaatggtcacaaagtttctccatgcatgttacttacgaattacaaatggaaaacgcccctttataccaaagagatccagcatgcatcatcttacaactacgtgatcaaacttgctctcacccacagggaacccatctgactttatttgccacctgatgggatgcaattagtactcaatatcacgtatgtagttttcttgctaaaaaccagagcctgtatcaaattgtgaagaaataatcatacacatctagaatgtggaacattcttcaagacactgatctggattcaaaaaaagtgaatgtcatgagaaacagaatagggagaatactgctcctgataaagtgatcaaacagaccaaaacaacaacagcagaaagcaaagtacaaatcttgatttgacccaggattttttaaatctatgaaagatagtattaagacaatcaaaaaatttaaatatagcccgtgtaaaatggtaatccatgtatttaattcttatgaatagttaatggtattttggttatatagaagaaagtgttaactcttaagtaactacacagttcagcataaacatgcatatctgtctgttttagatccatttgtatgtacacacagaaacacatacatacatatacatagaaagaaagcaaatgggtgaaatgttaatttgtgaatcttggtgaaaggtatacggtattcctattcaatttgttaatatttctgcaggtttaatttttttcaaagtaaaaagtaggggaaaaataagaaaagggatgtacactttttaccagaaacattgtatggctgtcaataccttaataaaaattataaatcagctttttaaaaaaagtcttatttctcctgtctctgccatttcatatgtgtgtgaccatagatgggctattaagttctgaataaatttttctaatctgtaaaatgaggagataatgctcattttaaagaagaataaagagaccaagaagatcctaaaacttgtgtttgctatcttctcctacgtactatggtatgaaagggaaaagtgctcacattacttctctcctctcatccctttcctttctcaagcaacacttggatcaaacgatggaaaatgttattttcatttttcattaacatgggaattctactattcttgtcttttggtgtgtgatgacacgtgcagctcacagggtagaagatttgaggtggaagggctaaaacatggtcgccctatgatcatttctattgttgcatcacaatagaggataagggttaaattcaaccattttttttccaggtttcaaaaaatgtttttgtttttttttttttctgctgtggccagcagaccttgatttctgttgctaggaaacctggaaggtactttttagtcctcatagaaaccatgttttaatgcaatcactttcaatgactctttattggctgttttgcttggtgccaactcaaagaaggttcacatcaaacccttacaaggtgaacctgatcgtgtcaaactgcgctagccctggggactttgtggaagtgcctcaggggtttcttggggataggaaagggtgggagccagggggcaatacccctccccacttcaagcagagcaattctactttgatctgctttaatgttaggctttctttgaagaaaatgctttatgggagggagtatttgaaaagccttgacctaatctaacacacaagaaagctgaatttctgcgaagtgacttgcccaaagttacccagttcccaaacaccaagactgggattaaacctgagtgttctgattccagatctctttctattaccccacacttcctgctcctcctcaccatgcctacctggtccttcctttcaccatgttccggagatccctggcctgactctgtgcccagaactgtgaaggacagtagaccctggagggcagtgttgtagtgggcccaaaactgttgacccctggatattttcctgaggatgctgcgatctctagttaactactgacagcactttccccaggttcctttcagagagaatggctttaagcagtcgtatggaaaaacatttttttctactgtggctgtgagcatttgggaacttgttcctgagaataaataggaggatctggctcagcaatactggggatgatataatctgaaccacctcctgtgacgaacatctagtaattcttttttttttttttttgagatggagttttgctcttgtcgcccaggctggagtgcagtgacaagatctcagctcgctgcaacctctgcctcccaggttcaagcgattcttctgcctcagcctcccgaatagctgggactacaggcacgtgcaaccacgcccagctaattttttgtattgttagtagagacagggtttcatcgtgttagccaggatggtctcgatctcctgacctcgtgatccgcctgccttggcctcccaaagtgctgggattgcaggcgtgagccaccaaaacacctagtaatgtttttaagcatttaaaaaatgcctagcagagctcagaagactgaaaaaggttcaaaagcaaagcaggaaaagaaagccagagcacatagatatgatctgattttgctactttaagaaggtggggggcagtttattaacccaattcaggtgtcaatgtcaatttaaggacagcagttgagacatgttcaagatggaggtgaagctgacccaatagtcccatagaccagaggtctccaaacctggggccatggaccggtctgtggcctgttaggaactaggcggcacagcaggaggtgagcaacaggtaagcaagcattactgcctgagctccatctcctgtcagagcattgatggcattagattctcataggagcatgaaccctgttgtgaactgtgcatatgggaaatctagattgtgtgctccttatgagaatctaactaatacctggtgaggtgaaacaatttcatctgaaaccatccccctggtcccccaacccctggctgtagaaaaattgtcttccacgaaactaggccctgttgccaaaaaggttagggaccactgccatagacagttgttttgggataaacatagaaattgatccttctggtcttaaagcttgaaacttatatttgttttaagagttccttcctcaggaaaggatccctcgggccaaggatccctcgggcctctcaaagtatcaaacaagcaaaactcaccagatcaccacatccagacaataagatactggacccattaattcatcatgattgctttcttacccctccctagttcctgttttcttacacattgttgcatttctccctgctatataaaccccaagttttagccgtcagggagatggatttaagagtgatctcccatttcctccattgcagcacatgattaaaaccttcttccttggcaatactcgttgtctcaggcattggctatctgtgtggcaagcagcaggacctaaaccaagcccctggtgttttggtaacagaaggctggaactgaacaagctcctaacccctaacatacataacgctgggacttatgaggactacacacacaacaaaagggtaagccagaaaaattcagcacagggtgaagacaaggagattgctctcttcctggctaggcttcaggtagaagcatgaaaattctactctgagaattcataagtatgggccttatggatttagagtacaaactgatgctttctaaacatcaggaactcccctaacctggtcaattaaaaaaaattgatctcagccaagtgataaatctaaaagagtacattttggaagcagaagtaaacacatttttgaaaaaaaaattttaaaaatttttcactggattcccatagttaaaatctcacagaagttgttttagcctcagacctgtgtgtgctgtgtgatcccacaaaccccatttaaaaaactttaggaagaaaaaaatccaccagtagaaaaagaagacaaagcaataccacatttagagttcctaaaattccagataacataacattctggcagatgagaaaataataatttttaaaaggattaaaagtacaaaaaataaaacccaaagaaataagacactcttacaattaagtagattaaaataggtagataaaaagccaagtaaaattttgagaaataaaaagcaatcattatattaaaaattaaattgacagattaaataacaaagtcagaactgaagcaggaatttgtgaatggcaaaatagttctgaggatattatgcagagtggactaccaagaaatggtgaagaaatgtggagggtagaatgaaaatcagcaatacatgtcagacagaaatgtcagaaagaaatgataaggatctgagaggcagaaatttctaaaatttatgaaattcataaatgctcagattcatgtagtacaattaatgccaagcataataaaaagaaatttgcatctagacacatgatagtgaaattacagaacaccaaagacaaggagaagatcttaggagaaaccagaaagaaaaagaacaaatattttatcaatagcaaacttctccaaagcaatactggaggctagaaaagaatagaataacttaagaatgctaaaagaggccaggtgcagtggctcatgcctgtaattccagcaatttgggaggccaagacaggcagatcacctgaggtcaggagtttgagaccagcctggccaatatagcaaaaccccgtctttactaaaaaaatacaaatattagctgggcatggtggtgtgtgcctgtaatctcagctatgcaggaggctgaggcaggagaattgctttaatctgggaggcagaggttgcagtgagctgagattgggccactgcactccagcccgagggacagagcaagactttgtctttaaaaaaaaaaaaaagaatgctaaaagaaaatgtctaaaaagctagatctctgtatttaactaaacaataactatgagtacagttgaaatatagaccagtccagacaaaaatatagagagttttctactcacagatctttgcccaaagacataccaaatttggctgggtgctgtggctctcacctgtaatcctagcactttgggaggccaagggaggattgcttgagtccaggattttgagacaagcctgggcaacacagtgagaccctatctctaccaaacattaaaaaattagctgggtgtggtggtgtgagcctgtagtcccagctacttgggagcctgaggtggaaggatggcttgagctcaggagtttgaagttgcagtgagccatgacagtaccactgcactccagcctgggtgacagagccagatcctgtctcaaaaaaaaaaaaaaaaaagaagaaaaagataaattttatccagagtgttgctcaggctgctctcaaactcccgggctcaagtgatcctcctgcctcagcctcccaaagtgttggaactacaggagtaagtcaccacatccagtcttgttttattttttatctagtatttcttcttgagtcagttttaagttatagttttctaagacagagcttctaaatttatcaaagaccaacacttttgtaaaatacaaaattatgtgcttggatgctgcagtagggtaacaacaacaacaaaaaaatgctttaacaggttttaagcacttactctcggtttctgtacttactttgtggcagagtggcaagaaataatttgctgatcagtcagctgaccacactttgaatagcgctgttctaggaaaacatctggttgtcaaagttttcaaatctcttaatagagtactgtgcataatattttcatattaaacattgttagtgatgtgtagttatgttgttttaccagtcctaatattgtttatttccactgtttttctagatatatcaggccatagttctacttcggtagtctcttgaaagaaacaaatttgggatgtcgattctctttattgcatttttgtttagttagatgactaatgtgcttgttaaggacatggactctagagtctggggtatgggcttgagccccaatttctctacatactagctgagcaagttacttaatctcttcatgcctcagatgcctcaactgaaaaaaggtgacaggccaagcacggtgggtcgtgcttgtaatcccagcactttgggaagcctaggtgggtggatcaactgaggtcatgagttcaaaaccagcctggccaacatggtgaaaccccatctctactaaaaataacaaaaattagctgggtgtagtggcaggtatctgtaatcctagctactcaggaggctgagacaggagaactgcttggactccggaggtggaggttgcagtgagccaagatcgcaccattgcactccagcctgggcaacaagagcaaaactccatctcaaaaagaaaaaaagaaaaaatgcaataataatacctatatataaggttattgtaagaaagaaaagggttaatatgtgtaaaacatgtagaatatttctcaggatattataagttcttaaaatattagctttattttcactatcgcattaatttctgcttttcctttaatgatttttcttccattttttgcatttactctgctattaatctaacttcttgggttgtatactttattatctgaaatttttttcagtatgggcattttaaggctgtctactttctataattactgccttaacagaatctcaaaagctttgatatgtaacattattattttatgtagtttttaatttccactggtgtattagttttcttttgctgctgtaaagaaattaccacaaatgtagtggcttaaaataacacaaatgtcttatagttctacagatcaaaagtctaacactggtgttattgggctgaaatccaggcgatggcagagctgcgctcctttctggaggctccggggagaattctcttccttaacctttcaagcttctcgaggccctctgcactccctggtatgctgcatctttcagaccgcttcttctgcctctctcccaggcactttaggaccctttcatttacactgggtgcacctggataatccgggttaatctctttgtttaaggtcagctcattagcagccttaattcatctgctaccttcattccttttgtcacgtgacctagcatttcacagttcccagggattacaaagtggatacttgggggacagttttgtttttttttttttgcctaccgcaactgatttatacatttttaagtgtcccaatatatgtgaaatttttggttgattttgatttttaattttaaagcactgaagttacacaatgcactaataataaaaataataacaaaaataaaacaaaaacatggtgtttaagattacgagtgagttagtttgtcagctatcattgtttcttttttttttttttttgagacagaacctcgctctatcacccaggctggagtgcagtggcgcaatctcagctcactgcaacctccgcctcctgggttcaaatgattctcctgcctcagcctccaagtatctgggactacaggtgcgtgccaccacacctggctaattttttgtatttttagtagagatgaggtttcactgtcttagccaggatggtctggatctcctgacctggtgatccgcctgcctcagcctcccaaagtgctgggattacaggtgtgagccaccacgcctggcccattgtttcttttctgatggtgcaaattggaggcaggagaggttaaaaagttaaactgattagaaaggaagaaaaaaaattcattcttgatattatcgtccacacagttaatcctagaatttatgcaaactattagaacaaataaaaaatgttggattgtatttagatacaagatataatataaaatattatttgcattacaataactaagcaacaaataatcagatgacataattttgaaagacacaatttatgttaataataaaatctaaaagctgcccagaaaaaaaagtaatgaaaatgtccaatatctctaaagaaaccgttttttagagatagagtctcactttgttacccaggctggagtacaatggcacaatcctagcctttggcagcctcaaactcctgggctcaagcgatcctcccacctcaggctttggaatagctgggactacaggcatgtgccaccatgccctttttttcttattttttgtagagatggggtctcactatgttgctcagactggtctggaactccaggcctcaagttatctttctgccttggcctcccaaagtactgggattacaggtgcaagccactgtgcccagcccatgaaaacatttttaaaagacatgcaagaagaacttattgagagatgcattgctttcacaatggaaagactaaatatcataaagatgtccattctcccaaaattacttaatacatttaatataattgcactcatagtctcaataggcatttttagggatctggacaagctgattctgaaatattatgaaagagtaaatggccaacaagtgccaagaaaatctagaagaaagaaaaataggaagagggaaaaataggggaaaaatccataagactttataaaatttagtaattttaaaagtatagaactgattcagagatagaaaagtaaatcaatgagcaaacatagaaatcagcacacaaaatagggaaacaatatgacaggtagtatcataattcagtggtgataaggtagactcttcaacagatagtgtagaacagttcattacatacatgaaaaagttaaatccctatttcatgatatacaaattcacattcccagattcaggcttaaagattgaaattaaaaaaaagaaagtcttagagtgaagcatggagaaatcttcatagaactaaaaaaaggatgaaatattgatacaggctgggcccgatggctcacgcctgtaatcccagcactttgggaggccgaggcgggaggatcacaaggtcaggagatctagaccatcctggctaacacggtgaaaccctgtctctactaaaaatacaaaaaattagccgggcgtggtggcgggcgcctgtagtcccagctactcgggaggctgaggcaggagaatggcgtgaacccgggaggcggagcttgcagtgagccgagattgcgccactgcactccagcctgggcgacagagcgagactccgtctcaaaaaaaaaaaaaaaaaaaaaaatattgatacatttaactacattgaaaattaaattttaactatattaaaatttaaaagacaccataaacaaagtaaaaaggaaaatcatatactggaaaatgtgtagaaaccacatataaattgcaaatttattttaaaaactctgcaataacacaatagaaatgtcgcaaagtatgtaaatacgcagcttaagcaaaaagctcaaatggacaacagcatatgaaaatatgctcaacttcactagttctcacggaattgaaaagtcaagcggccaggtaccacttgaaaccgtcatgtcagcaaatacaattaatcgggtgcactaagttttggtgaaaatcttgatcattgctggtgagcttgaaaattaacatagccctcttggagagcaatttgtcaatatttggcaatgttgaaactgacctatggcccaggaattctacttctaatttctttctttctttttttttttttttgagatggagtctcgctgtgttgcccaggctggagtgcagtggcaggacctcggctcactgcaagctccacctcccgggttcacgtcattctcctgcctcagcctcccaaatagctgggattacaggcacccaccaccacgcccggctaattttttgtatttttagtagagacgtggtttcaccgtgttagccaggagatgatctctgtctcctgacctcgtgatctgcccgcctcggcctcccaaagtgctgggattacaggcgtgagccactgcgcccggcctctacttcttcgttctttagggtctactcccatatacactaggcatgtgtgctagtgtaaatgtacaaacatgctaattgtattctttgtaatttaaaaagtggggaaaaaagtcatgctcctgaatagaatcgatttaaaaaataattgtttttattgaaaagtttattaaacaatcttaaagctagatttacattgatattcacaatgataaattcctaaagtggccggttaagtgcaaaatgtaaattgtaaaaagatatttaaaggatatcatttacataaatttaaaaaccatgcaagatcatatttaaataaaactatgcatggaaaaaataagaaaaatcacgtgggaacaatatagacaaatttaaggaggttcactctggggaggggagggatgaaggtggggccttactgtatcttcaaagtcttacttatttaaggagaaaaaaaagcaagttgtttccagtaatactaacatctaaacatcttggtgatgatatatttgttacttttattgttaaaaacaaaatttctcattttattttgcattttgaaaaaggagacaggaggagagaagaatcatggactccctgggcacagcaccgcaggtggctttgccagttctcccagccccgcgctgctcctgcgcctgcgctgagcctccacgtgtcctcaggagacttagcctagcctgggtatcaccagcagtgggccaggccgctttgccttcaactcccaacagtaaccttgcagaggtcagcctggggccaccaggaggagttagtaagagcttatcctgtgggggcactcactggggctggtggccgggaaatcccaggtgttttgttggtttgagttttgttgtgtttttatttttcttccgctgagatcaggactgaagcagggacgcagtgctcagcacgcccagcccaccgcgggccactgcgcggagaacctctgccagggtcgcctgctcacgtcccctaatccgctcctggcgcgcgttcctgtcctcctcctgctgtgactagtgtgcatggaagggcacagtggtggcagaaagacttgtggcgagatatcaagatccacaggaagtcataagagaaaaagcattttgtttgaactccacccactgaccttttgtgggtgagctttcggtgaaacagcaacatcctcagaaatcttagagacacggctttgtaacccgggggagagacaccgcttccaaatataattgacgtggctttcctgccttaattcggggtatcctttttccaccacataatcttccctttgtccgcgctgattcctgtttagtttggcagggccagctgctggcaggctcccccagtgctgaatgctccgcgctccactgtgctgggcctgctgaaaaagcagacagcgctccctctcccccagaatcaggagccaaatgccacaccgattgtgcaacttgtctctggttaccaggaaaacgtaaagaaatgccaatgaagcagaaaggtcgacaaaattctttccaacgcttgaacaaaaaaggtatttttagggccctagatttatggaagtcaattcttccactcctcgccaggctttcaaacctcctattctttgcactacattatttgaataaaccgtaaatacccttagttgctctaatagcaactgctggtccatattgtgcaaggcggccatggtctgaagaccttgttgaatttgaaagacagaagttccgtttctggcacataaacttgaatcagggctatagttaagagtgccagtgaggtccacattttgacagctagataagcaggtcatttattcaaaaggactttgaatccatgcccagagtcaaatgcagtcctttgtaaagcccagcaggcttgaaataaaaacttcttaactgagttgatcagtgtcctgcattttaggggtcaggaaagtatttatgataagttggaaatggacagggcaggaaattctgggcctggaaggatggcttcctcaccagggaccgcaccaccatattttctaatttgtgtcttgagggaaagtttatattttttgctgaaaatattatctccttgtgacaaaaccacaagtctgggaagagaacacaaaaggaataaagaacaaatgagatctgtgatgcctcctggataaaactttaaaaacccataggcattgatcaatccaatttactgaataaatatgtaccaggtgttgtgttaggttctaaggggctaaaataactaagatactgaactaaagtagaactattgggctcctaatgtgatagtttttccactatagacagccctcttcttccaagggtccctgccagggcttcccctaccctaaacagtgccttggtaaaaattaggaaagtcaccccttccttaagacacttgactttccaacagtgccttggtaagaattaggcgagtccttaagacacttgactttcctctggcagaaaattgcaaagaaagtgtgcacaaacctacaatgtgaatgatgccttcctgtgtgtgtgtgcctttgtttagggcacaacctgaccggtctgatcatcagacacggtgatccacactcaagatgggaaagaaagccaggggcacagcctcctggaagcccctactccctgcctcatccacaccttgttgcaaaaaccgcaccatcctttaagacttctccatgaagcatcacttcagggaggctgttttctttttctcttgtctattccccttctgggaatatacccattcaccctggccatcagacagccctgtatatgtcaacccaaggtctcactcaagctctctctcaaagggctcctgggccccatgcaaatttagaatggagtaaatttgcattaaacagtttaatgtgttgcagaaaatatcagagaatggcaaactcctgtggcctggacttctcagagtacacaaaagaccgaagactgttctaacttcacagatgttctgtcaaaggctcatgtggccccccagataatctgttatgcaagtaaaaacagttaataagttgcctaaaggctcgtcttccagtcattttttcctctttagatctgaaagaactcttttgagcaacttcaaagttcaaattgtggtattaagtttgagttgaaatgggtcctttctctttttctcagaattatactgaaatgaatgtgctctgctgcatcctggcatgcactggagatgggggttaggtcaaaaatgaataggatggttcctgccttcaagcagccaataggaataaaaatactttgcatgtgtagtttccaaattgttttcacatatatcacaacacccacagcagctttgagagggagatgttattacatatattttataggtaaagtggatgaggctcagaaagggtgagtctaagcttacacagtagtgaattgaagtgacacccgaaactctgctctaaattttatctttccccaggctgaagctatagtccacagagcaaagtagtgtgattagtgtcaccttagtagtgcaaacaaagttgtgggcacagaattagagggagtagttttccctgagggtgcagtaaggtggtgtgaggaatggggaaatggaagagagaagagatagggttgcaactggtgagtcccagaggaagggcgaatggcagcaggaatggcctggcttagccaagcacccagaaaggagaaagtcaggccttggtgaatgttgagtggataaccaagcaccattggtctggaagcttgagggctggtctggaggcttgcaggctgtcaaactcttgaaggagtgagagaatgaaggtcctgacaggacaggctttgagcataaagtgatttcagtggacgtgggagccactcggatagtgacaagctcagatttgtgtttggtggagaaatgttaatttagcagcagggtgaggaagggattatcagaaggggtgggaaaggacacaaaagaacttccaggtccttttagggctaaaagtgcagatgtgagatctcaacccaggcagcaacagtgggagcagaaggcaggggagaagcatgagattacaaagaaacacacctcagctgttttagggtgttcagatggggacttctaagtgcacatgaacatagtcagttgtattcttttccagtggagggatcctagctttcagacatccccttttgtggaagccaattaaatgttttaaaattaaagcagattaaagcagagctgatctggccgaagaggggtgcttggatgcctggtgctccagcttcctgaggtagagcccttggcaaccagctcagcttgaaaaccagagctccagtgctccagcaggacccgaaggctgcctaaatagaccgtatctctatggatacattctccgtgtgtgtgtgtgtgtgtgtgtgtgtttcttggaaaattggaattagagtctttcctactgtctgtgattgattgcagccaaatattgctatgtaaaagtttcagaatttcaggatccagaaaagtaactggtccctttgagaccaatgttgaccctacttgcattttcagccagctggtgggccacaggtgttcactgagtgtggattctgtgtccacccttccgcatgtcaggggtgctgcactgactggcaaagtctcagagctcaaggagcttctgtattagtgggggacacaggcaacacatatacgtgagcaaataatacttttaaacataatcaagtgccatgaaaaaaacaaaacaaaacagggtaatgtgattgagagccaaggaggccagacaatctgacaaggtggtgtttgacctgtgattttcaagaagcagaggctcccaagtagatctgggggacatacatttcaaacagcaaggccagcaagcatcaagtgcatgagcctggtgctggctcagtgtgctagagggtcaaagacaaggctggggaggggtgagtgagtgcaagagggaaagaagataggattctcgttaggcaggcaccgatcacatggggcctggctggaccaaccagtaggatttcattctaaatgtttttggaaactgtcagggtccagttgacatggtagggctcacccaagctgccaggtgcataagggactttaaaggacaagaatagaagaaaagaggccagttaggagagggaggatactgacttggacaacaatttaatcaacaagagaatagggttagagatatattctggaggtagagtcaacagaacttactaatgaatttaagtgggatgtcagggaacaaaagcaatccgcaaaaacccctgtgtttttgcctggagcaatttagtgggtggtggtgtcatttaaagagatggggggacttgagggtgggagtcaatttggcctaaggcaagggttggggactgtgggcagaagccatggttctgctttggctcctaagtagcagaggtacaggaggagatgctgagtgtggacagctggttgctgatactcagaggaaaactggactggacatatggatttttaaacttaaagatccacaagcattatctttgagtgcttactatgtgcttggcaccactgatttacataaaaagtattttccattgttggagaagtgcttctctgctgagaactggctcccagaatagcacagagctaagacagaactgggttgtgccttgggctggatagtgagatggaacaccccacctgttaccgagaagaaactttccagggtaaccatctggcatcctctgcagcatgccagatctttggcacaaatctgtctttaaaacaacaacacaattaagcttctgcaaagcatggtgctgtgcaaatccagtgttagagatatcatcatgacatccaggttcctttccaatagcatcgctctgcacccaaagaagcctttcagtgtggtttgtgtttaacctcagatggaaataactatgtgggaaaataaattactcaagggctcaaagtactattcagaccaattaatactaattgcgtacctatagtattgccaagtgtttaatttctttggaataatgcttgatgttgccagtccttaaatgaatcagcttgatgttgagaatgtcataccatcatttgtataatttgtattatttattttgtgttgtattatttaacatttgctagttctgtcgaggaagccaggcaaagcatattaaagacacatttcttgacagaattagatttgcttaaaaaagaaaaaggaggaaaggaaggaagacagggaaaaagagagagagagagaagcaaagaggaggggagggaaatggaggggagaagggagggaaaaggagaggagaggagagggaaaaggggaggggaatggggagaagggaagaagggaaggggagcagggaagggaagagaagggaaaaaataaagcaagaaagaaagaaaagaagaaagaccctctctagcaccctcacgtaaagtgagatctctagggacagcagtgtgctggtggttttagtagtcagcaagaagcagataatagacaacaaagactttctgctcttccgcatattttccattctctgaatgggaatctcagaaatctagactggaagagttttgagaattatccatctatccttctacccatccatgtattcagtcactaaggagaaaatattttcagccatggtggggacaaggcatgggaaaagtctatgccatccatggcaaacactgtcttaggcacttgggtatttgttcattctctttacgtatttatattgtgcctactacaagccatacatggttaggctctgaagatacacttcagaaaaagatagatatagcctctgcctttaaatttgtttatgctgtagtaattaagtaattacatgggtattaataaatcacaaaatacataactagaaaaatagtctttattttaattgaatcagaatccataacaagaggaactcacatgggtctgggagaaaggacaggtcgggaaaagtttcctcaaggaaataatgtgtcttttgagacctgagtgataagtaaaatggaccaggcaaggggacttgggtagggagcgtccctaaggaactgtgactccagataatgaggatagggtacatctgtcaacaggtggaacagcaccctatgttattagtgccattagcgtggtttaaaatggaactataagcgttgagtgcttttattcttagtttatcctcctttccctgggtttttgttttgatttggttttgatttttaaaaataatttaaactgcctgggggctgaatcataatttgatcacttagtttgtgatcatgggctgactcaataacactataaggtggttgtgatgactaaacgagttaatagtgcctggtaccatgtacagtgtatattaggcactcaataggtttggttccctcctcccatacataagcaatcagtgcttgtaaactgcacagcaaagaggtgatatctgagactacttaatagttgaagaggcatttgacttagcccttatattactatcaagggcacaggaacagaatgttatattcaggaaacattacactcacactgtactacaataaatccttcttgtattttgaatcttttttactttgtcctgtgctgcaaaagaaaattatctgctttgaaatgactcaaataattaggttcagctcacccatatcatcattttttctttaacccaactgattagtaacctgaactacatcttcaaagaacctttgaaatgttggataacataatcatagtagtaacagcaggtggtagagatcatggggccatcttagaattctgcctatgaccagaaagattttttgagtgtctactgaggaccaagcactggtataggggctgggctttacctcgaagagcccccatgaaattccagctttcacagagcttgtcacctgggaagacagataagacgatgcatatgtaaacataaaatagagaggaatatgttctctcaaggaattaaagcatgatgttatgatagaaaattggcataggtggtcctattttagagcaggaggacctctctgaaatggagacattggagttgcattttgaatgatataaggaaccatccttgcaaaaagcaaagatgcaacagcaaagtttctaaggcaggagaaagcgtcacatatgtaaatgatgaacagaaaaaggattagtgttgctgaagtgagcattctagttgttaatcaaaaatgataggatactctaaaatgactctcccataaaagtattaactctccattaatggattttacacttgttagacttttttcattatcaaatttcagtaatagtatgctagatcatcctgaaaaatctatcaatcaactctaacaacaaacatttattaagcaacttttatatgtcagtcattgaataaatcagtgaacaaaacaaaatgtcatgtcctcatggaacttgcattttagtgggagtgaaacacaaaagaaaatttaaaatgggtaaaatataaagtatgttagactgtgaaaagtgctaaggagaaaaaataatgttgagaaaagacttaacaaatttcttctacccatcccttcagtaatccaaatgtgcatacatccattcatacatgccccatatatcttacatcgatggcttgcttactatgagccagatattgaggatacaaattaaataaattgtgagacttcctcttctagctatgatacagttactgctgccagatttgctctctggcatatcataaaactggagagaaaaaaactgaatctttccatcattgaacagcaggggaactgaggtaaggaaacgtcagatgagccccatatttgtcctagcttcttgttgggggcatgttttgaactgcagtgcagggagatagagcccaagcagtgcacagtgcttttgctgagctgagaaggctaagatcagacttcaagatgacagaagcatctggaactctcagggcagggtactgaaaaggagggttctgaggagagctgggaccataagaatctgtgtgtgtgtgttttgtggattcatggccaagggatataccgtgcattcagaggaaaaaattccatgagtcctaaaagaaagtgattgcttcagggctgagagcagaccatgaaatattagaagccatgtaaagttagaagacagatttctggaacagtcagttgacaagcatctctgaaaaccgtgggcatttcgttcagaccccaaaagcaccacaacctataagcaaagaccacacctcagataagggacctaacttagaactaaagacaaaactgtactcaaacagccctaacaaagaaccaaaccgagcttgacagaacagggaagattccaagtagtttacttgtttgccagacaaaataatactctctttaataaaagacactgcaaactagactggctctgttctctagcatactgtaaagctgcagaaaaaatatgaatttttccatcattgaacagcagggaaaactgagataaggaaacatgtttgagccccatgtttgtcctagcttcttaagtaaagtagtataataattgattttactttaaatgaacctaattaacttaattttaaattaatagttttttgataagactacattattgtaattcttagaacatccactaaaaagatagctagctgaaagtataggtgtagataaaaagccaatagagaattttaaaagaatactaaaaatttttgattttacaaaaaaggtagtgaaaaaagggtaagaagagtaaaaaataaacaaaatagatgggacaaatgtaaaactaatcaataagaagatagatttgagccaaaccatatcaataataatattagatgtaaatacgttagaggccggttgcagtggctcacacctgtaatccagcactttgggaggccgaggtcggccaatcactttaggtcaggagtttgagacaagcctggccgacatggtgaaacctcatctctactaaaaaataaaaaaattagctgggcgtggtggtgcacagctcacctacccaagaggatgaagtgggaaaatctcttgaactagggagccggaggttgcagtgagctaagatcgtgccactatactccagcctgggcgacaagagcaaaactctgtctcaaagaaaaaaaaagagtgggtggaatattcttcatcaaatccatgaccataattggagattttaacacccctctttctgttatttatacaactaatagacaaatagacacaaacacaaacagtaaagaatacagcaaatttgaaaaatgctatcaacccacaagacctaattgacattcaaaaaacagtatacccaacaatgcagaatatgtattctttttcttttttcttttttttttttttgagacaaagtctcactctgtcgcccaggctggagtgcagtggcgctatctcagctcactgaaacctcttcttcccaggttcaagtgattctcctgcctccgcctcccaagtagcaaggattacaggtgcccgccaccacacctggctaatttttgtatttttagtagagacagggtttcaccttgttggtcaggctagtctcaaactcctgacctcaggtgatccacccacctcggcctctgaaagtgctgagattacaggcatgggccaccatgcccggccagaatatgcattcttttcaagtacacatgctgcattcaccaagataaactttgtcttaacacatttcacacacttaaaatcttagagtaatattaaattaaaaataaatgacaataaaatatataaataataatacatctagaaataaaaagaaacaatatagaaataacagctatatgttatataacatatataacagaatatacaaatatttgtatagataaaatataataaaaaatttaatacatagaaatgccaaaaatagttggatatttaaaaacacattatataaacctatggatcaaagaataaatccaaaaggaaatattagaaatcttaaaacatattttgaattaagtaataatgaaaacacacagtatgctaaaatttgtgagatgcagctaaagaagtgtttagaagaaaagttataatattaaatgtttatattagaaaaaagatgtaaaaccagtaagtcccatcttaagaagtagaaaaagaagagcaaactaaacttaaagtagaagagtgaaaattaaaaaagcatataaactgaagtagaaaatgtgtaaacaataaagaaaattaataaagtcaaacagttttttgaaaataataaaattggtaagcacttagcaagaaaaagtgaaaacaaattattaacatcagcagtaacagaggaactattgctgcatatagaagaatagtgaaaatatattagaaaaaagtttcttttaataaatttgataatagataaaattaacaaactctttgaaaaactcatcttaataaaacactaaaaaaaatttaaaaactggccgggcacagtcgcttacgcctgtaatcccagcactttgggaggccgaggtgggcagatcaccaggtcaggaggtcaagaccatcctggctaacatggtgaaaccctgtctctactaaaaatacaaaaagaaattagccgggtgtggtggtgggtgcctgtagtcccagctactcgggaggctgaggcagaagaatggcgtgaacccgggaggcagagcttgcagtgagccgagaacacgccattgcactccagcctgggcgacagagcgagactcagtctccaaaaaaaaaaaaaaaaaaaaattcaaaaatctgagaagcttatatatattaaaagaattgaatttataattcaaaacatttccacaaagaaaaactgcaggcccagatggttgcacttgcaatttttttttcttttttttttggacgaagtctcgctcttgtcatccaggctggagtgcaggggcatgatcatggctcactgcaacctccccctcccgggttcaagcgattctcctacctcagcctcctgagtagctgggattacaggtgcccaccaccacgcccggctaatttttgtacttttagtagagaaggggtttcaccatgttggccaggctggtcacgaactcctgacctcaggtgatccacccgccttagcctcccaaagtgctgggattacaggtgtgagccactgtggaggcctgcacttgcaatttctgtcaaaccttataaaaaacaaaaagaaaaaaatcaaccaattccaccaaatgttgtcagagcatagtggaagaggaaatatttatcagctcatttatggggcgaaaataaccctattaccaaaacctgacaaagacattagaaatgaagaccaccatctgtatgaacatagacataaaatctaacactttaatctagtaaatcactccagtaccgtgtaaaaagaataataagttgaccaaatgggccaggctcacgcctgtaatcccaacactttgggaggccaaggcgggtggatcatttgaggtcaggagctcgagaccagcctggccaacatgtcgaagccccgtctctactaaaaatacaaaaaactagtcgggcgtactagcaggcgcctgtagtcccagctactagggaggcagacgcaggagaatggcgtgaacccgggaggtggagcttgcactccagtctcggcgacagagcgagactccgtctcaaaaaaaaaaaaaaaaaaaaaaaaaggctgggcgtggtggctcaagcctgtactcccagcactttgggaggctgaggcgggcggatcacgaggtcaggagatcgagaccatcctggctaacatggtaaaaccccatctctactaaaaatacaaaaattagccgggcgtggtggcgcatgcctgtagtcccagctactcgggaggctgaggcaggagaatcccttgaaccagggagtcagaggttgcagtgagccgagatcacgccacagcactctagcctggcgacagagcaaaactctgtctaaaaaaaaaaaaaaagaaagaaaatgcaaaaatcagctgggtgtggtggcacacgcctgtagtcccagctactcaggaggctgaggcaggagaattgcttgaacctgggaggcggaggttgcagtgagctgagattgtgccatgcactccagtgtaggcagcagagggagactccatctcaaaagtaaaataaaataaaataaaaataaattgaccaaatggattttatctcagaaatgcaatcagtgagatcgatcagataatttaccacatttaaagaataatattgcagaaacatcttgaaaatgagatataaaatgttttaatgccattttcaatgtcataacatgcacaaacattattttgagaccccaacataaaacttaaaaccacaaattttgtagaaaaataatacaaaatatttttcaactttgaagtgggtgaaatttgcctagaaaagacacaaaaagccctaaacataaaacaatgataaattgaacctcaataaagtaaaaaaaaaaaaaaaaaaaaaaaaagtctgcttctgaaaaggcaagtcacagaccagaagaaaatatttgttttctgtgtatgtatgtacatacatacaaaacctttgtcaggttttggtaatagggttattttcgccccataaatgagctgatattatttacaactacatctacatatttaatttacatctacatatttaattatctgcatctacctgtctatatactaaaaagacaaccaaatcaacaaatgagctgatattatttacatctacatctacatatttaatttacatctacgtatttaattatctacatctacctgtctatatactaaaaagacaaccaaatcaacaacaaccaaaaaaagtgttaaaaaaagacttcacaatagaagctataagaagacccaataaactcatgaaaagatgctcaacaccattcattattagagaaatgctattaaagacaccaagatagccttttacatggactagaatggcggaatattgaagagattgataaaacagtactcccagtatcagagagttgtagaataactggagctgtcatatgttgttgaagaatgtaaaataaattacaaacattttggcaaagtttggcagtgtttttgtaaaactaacatacatactacaccttccagcaaatctgctcctagaaatgagtatgtacgcctacaaaaaggcttattcaagaatattcatagctactttattcataatagttatgagctggaaaaaaactcaggcaacccaaactagtaacaacccaaatgtcctccaacaagagaacagataaacaaattgtggtatactcatacaaggcagtactaatcagcaataaaaacaaatgaactactgatgcatgcattgctaagatactgactaaatgtctgtaagggtgatcttggacacttgtgggccccgctgcgggcagagtgaggcactgcctctgtgcttttcagtgcttgaatcccacctgtgctcatcaccatcatggtgctgaaaacagcactatcagcatttatgtatttgtttacttccccatctccttacaccaagagttccttcaagttggcaatggtcttcctcacatctttaattacccaatgtcctgcccagcattggagatctagcacagactcaaccaacatttatgaaagaacaacggacactcagatgcagcttttatttcctttgagcctcctaaggccagtacaatagctattcaacagtgtctgttaaatagcaagtgagagtcattatttggatgtaggtaattggataaagtttctatcttgccagcagtttgtctagattagttatagataacttaatccaaggcaacttgcccaaggccacccagctggtcaggtgtcagatgtgggtgactgactagttgttcttcccacctcactgcagctgcctcctctcataatatgctcaaggagtcagtgcctaaaagtggtacttccttccatgcagaacaactgcaagctgtcagaatctgtacaaggaagatgtcatcctgtttggctggggtacctcggaagcagtgggaggtggagtccctcccacatgccatcctgagggcagcagtggcagttcttttgcttcctgtcccttctgaggggcagagcagagccttttctgagaatcaagtcagagcaagcctaggcacaagagtgagtggaggaggggtagggtcacagacattttagcctcttcatgcttgagaaagaaatgagaactcatcttctcagaggcaagggcagaggtagaagcccagcctgtcctgaacgagaagggtgaccttggcagtactctaagaagtagtcaagtccgggtgtggtggctcacgcctgtaatcccagcactttgggaggccgaggcgggcaggtcatgaggtcaagagattgagaccatcctggccaacatagtgaaaccccatctctactaaaaatacaaaaattagctgggtgtggtggcacacgcctgtagtcccagctactcgggaggctgaggcaggagaatcacttgaacccgggaggcagaggttgcagtgagctgagattgcaccactgcactccagcctggcgacagagcgagactgtctcaaaaataaataaataaaataaaaaagaagttgtcaaaacctgggtgtctggccttccacagaaaatcgacaataatgtctgagagcacagttaaacattaggttaattctcttggttagaaagagaattaacctaatggtacccttttttttttgagacggagtctcgctctgtcaccaggctagaatgcggtggcaccatcacagctcactgcaacctccacctcccaggttcaagcgattctcctgcctcagcctccctagtagctgggactataggttctcgccaccatacccggctaatttttgtatttttagtagagatggggtttcaccatgttggctaggatggtctcaatctcctgacctcgtgatccgtgtgccttggcctcccaacaagagaattcttaaatgtatatttctcccagtgtcactaagaaaatccaatttaaaattattctgttctgacttggccttttattctgcctctcatgaatgtaaatataaaacttttatatgagagactcttggcattgtctatagatagaccatagctacatcagaaacacacacacacacatctgcacatgtgcatacacacacagagtagctatttgagaaacagctgtgaccccttcaaagacaggaggagaaagggaggaatgggagattagtgtaaggacaaagtcaaactatctaatctttttatcctctcagctaaacagattttgtcttccttcagtacctcacgcttgacctccatctctcaaaccattctattatttctaccttatctttagctatacatgaatctaattatagaaaagataataatgcataatgatcaaatgcatgggctgaacctccaatatttgagaaaattgttggtgaaatcttcacctaccttattatctatctctctaatccatctgtctaataaaatgaaaaccaaatcaataaaaatgagcaaaataaagaaaataaagctgttattacatgcatctccagagaaagctattactgcaagtgactctcttattttagaaagtgtaggaaagtatttttctgtgagtgggattatataatctttacctactcttggaagccaacctaagaaacatgtcatccactccccttcctcatctttgcaagtggtgctatatgccagcaggctgagcattgtcattactgtaagaaagagtatgaattaatccagcacacatcccaaattcagaataacaaatctggaatgtggaggcccacctgtctgtgggtccatgttgagaagtctacacttttgattacatgtttgcctatttgtaaatgacaagatttgtcctgcactagcaaaaaaataaaataaaataaaaattctggccatcaggactaaagaatccataaaacttagaatagtatagttacaaaattggttctgataaagggaaatagaataaacctgcttcaaacttcatcaatcattgttccctttatcattttcagatcattaaaccagcttttaatcacaaacactaatattttattgtatattttctgcttaaatctagacagtgttagcttggcattgactttcccaagtagcagaattagtgatattttgaatgatataaagggtatttatctattctttcattagcaaacattatgtaagtagttactatgtgtgtagcatagtgctgtattgtaaggtaactgtcttcaacatccaggtaggattagtttctccacttgtagataggtacatctatgctataacatatgtattatgtccttggctgggtatggtggctcacgtctgtaatcccagcacttcgggaggctgaggtgggtggatcacgaggtcaggagttcaagaccagcctggccaagatggtgaaaccccgtctctactaaaaatacaaaaattggccgagtgcggtggcgggcacctgtaagtccagctactcaggaggctgagccaggagaatcactcgaacctgggaggtggaggttgcagtgagctgagaccgtgtcactgcattctagcctgggtgacagagcaagactccatctcaaaaaaaaaaaaaaaatgttcttttctgcctcaagataggttgagattgtccttcatggccctggacatggtccaaaaggtggagaggcctcagtggtcctttctgaatgtgagcacccaagcctgcccattggcctagcccttaatttatgtacatgtgtcatttatggcccatcctccagggctgcaccgtggggctcctgccttttctgacgtacagcaaccacaatagtgagatgaacatcgaagctattggagaaagtcccaccactatagtgtaaatcagcctagatttactttgcgtaattttaggctatttcttttttttctttcttttttttttttttgagacggagtctcgctctgttgccaggctggagtgcagtggcacgatctcgactcactgcaacctaattttaggctatttctaagacagtcatcttttggttgaacaaggtaatgagttgggataaatatatcttttttcattcctggactctctctcttgtaaaacacacacacacacacacacacacacacacacacacacacacaccacatgcatcatggacacatatacttctaatgtttttcttttatttatcccagaaattgaactagggatgcccctgtctctattctttctgctctgtacctggtactaattaatttattcattagtattaataacaagcctggtcacttttcatccagtcatgtttgttccctccacatcagaaagaactcttgtgaccaacatcaaaattcaagttcaggtatgtgtacgagtcagaatgggtccttctttttctcagaattacattgtaaggaacctattctaataggcattaaagtaactagctttggcttcactcagcaggaatctcacataatcagaattgaatgtgacaaaactcaatccattctgtataaacaagagacaccttagagaaatcaaatctctttgaaggactgaagtaggaaggctaagaagaaggtacacctgatacactctttctttcactctaacaggcacctgaacctccgtggcacagcagatgggaatgactgacgtggctgagcattcatctgccccagggaggcaccgcattgtaggggatgaacagagacttttcaatcagatagacctgcattcaaatcccagatcagtctcctactgccttttgatcttaggaaagttgcatcactcttcaccagagttccaaccctgagtttcattctctgtcaactggaaatggaaatagctatgatggtagcgagggttacatgagatgctatttgctcagtgccaatgatcaatagcagatggcagttatgtgattacgattactgtgggatcttttcaaaagagggtcgccagcagcttcttagctatgttgagcttgattgtctgtgaaggcagaggcctgggtggtagctgcataaagagacagctctacttcttgtatgtcttgggttgtaggccaggtccccagttcaactcctcctctacatgaggctaccccaactccacgggccaaacgccataggaaagcagatattacatttagaagtcctgatttcacttttaactatacttcattggtaagacaacaataatgtcagctcattagcaaatcaacaaataacactttaactggaaattactggacactattacttagactgtcctggaagagggctctaaagtgtgtctccatttaaacttataagaaaattgccaagagcttatgtgttgtcttgtttagaagtgaatacaatgctgccagccatatgtcttttagattctagcttgtttgttagagatttctagatagagccaaatttgtggcttggccttaacataaatattcaaatgattcataaggattttttactgggctttcactttgtctagaaactaatatgcatgtgttctagaaaaaacactaagttttgagattaaatctattttaaattaagtaagagataaatgtgagaattatgtatgagactatatggcattccttgttataagcatataacctataagctggtgtctttagatgtgtaagaatataaagcaaacagaaaagaaatactgctgaattttaacatcattttttgaactgtcaagagccaaggaatagctgggcaaaaaatcaatactgtctcattgcctctttccctgacccctttctatctgaaacactatctccggttgtaaatgtttaatttacttctaatgtggcaaaaatctcaggtttgcagttttctagatgagtaacacaagctcaatatcatttagtttatgaatataaaaaaataaaatgcacgtcaaaggcaaatgaaagccttttattgaatctgatataatttacataatatgttctgatagtccttgttattctttcacatttacataatttttgtatatttacaaaagtcttcaagcttgcttttatggactgtttctcacagccaccctatgaagtaggtgtagtagcttgctttaaagcaaagtgcaagaggaatagaaaaatgaagtgtttcccagagcgactcagcaaagcagctgctgatccagattgcaaattcctggtcctgcgtccctccctcattagccactaggtcccagctcctctcatttttttgcatcctcagacactcctttccctctgcctattttaatgaggcccctgagaccctcttttggccagctttcctacctcttcaccactttcctagcccctaggaagcttttctttaagcctaggaaaaaattaatttgctgatacttcttccaaattggcctgctgccgccaccacataatgattttcccttcagaggtgtagattgcgtaccttgcgtgcagagattcaacgtagtcactctgcaagatgcaatattaggctctgaaccacatttcaccaagtccctagtgacctatagccactttgacttgctaatataattttatccaagagttatgggtaggaaaaattaaatgaagaggaagaatttttgtaaagacccaagtctgtggaattgtatcttgttcttcatagtgctggatatgtgctagccggtagagccacctactgaaacacaagttttcttgtacacctttggtactgagagcccatgagtcccaccatcctaatcctccttcaccttccctcatcatctccttggccattatgtggtagatgcaagaaagacatttgtttctcttctaacacgtttcccatccttgtcttactggtatagttactgagatagaaagattcagatcttcctaagcagtaattaactcattggcattcattatgaatccctttgagatatgagcctgcatttaaaaacaaaaaccaaaaaactcagtctttgtaaattagatcccatgttctgctgtcagcccagtgtgcattatataccggtggaaataatcagtgctctgtccagccctggaaagtgttaaataaatcacacagttttatgagcttacaacaagactcacttggtagcctctttcttacccaataatcttttactaataaaagcactagggatttataaacactacatgtacttttagtgatcttccaaaatatgttaccctccttccttctgaagaaatggcaggttgacacctatctatctaaaaccatttatccagttctcaaaataagcaggtattgtgctgaactaaaaccaaaattgtccggagtattcataaaatcaggtagacatttaagagtatgatttccattttcttttctaaaagcacttagaatagcctcttcatgttcttacattggtaaatcatgtataagagatatggtttcatcttcttggtgattacggaagtgctgagcattccaggtcctaatgctgatgcctatacctcatggtacaagacatgtgaatgcagttatgagctttgggctcaacagtgcgaaactagggaataacctagaagatttgtgtttgtttattttaatcaaatgtctatgatagttatatttgttgaatttgattaattgaaatgtagatttctggagtacaacaacaagatgctattaatatatgctatgattttttactttatttctttaaatatctatgtaaatacaaaagcttctagtattcaaaataccatattcagagatcaggttaaaatattttcatgatatctggtgagcacataaaagtaatttgcgttaaaaattttggttacagtaatgggaagaaagaatgcttcatggtaacacacttccactaaatttgaaataagaagaaaatcacccatcataaaaatttaaatagagtttatcaggtaatggtcacaataaaaattcctgatcgtagtgttgtcaaaggaagccagtttttgccatttaatggaatcattactttgcatttactagctttatttagcaaatggtgctcaatgatacaagttgatagtgatactatccatctatagttaatacatataatcaacacactgtaggcaatttacttaaagccaaagaacacatatgagtaattgaggataggctaagacatgaactcttgagctctcataaaatcacatttcctgagccattcctcttgcttgctccctatggaaaatgttccggtacattctagcctagtgagccaattcatcaccaatattcagcactactttgacccaatattttatgtagaaccttgtgaatgagtctatggtattcttccagaattatatagttatagtttgatataaattataaggtgaccatgaatcatattcagaatatcattggtaagccaacttcctttccactatgtctatattgtacctacatgtctttatatcaacttgggtgtattcaagggattttgctccaaagtatcccttaagttcagaaaatgggttggaatctaagtgggagcaaaagcttttggtgctttcgtagaaaaaagatattcacaaaattatcaccaaacttgaccacttctcttcactggcatatattttattttctagccttctgatttgtgggttttactctgctagaaaaatgtatttcaggggaaataaatcaattggctacctactttcctataagtataaagtctcattgtttttctacagattgatcactatgccatgatgttctatattctttttttttttttcatttctatttaagaggcaataagcaagacgtaatttctttcaagagcacagtgatcattcatggaactgaataatgatcaatgaaatgataacccaagacctgaataaacatagcattaatgctagaaaatgtcagtgctgtcacttcaaaagggcacagtgtcactagaccaggctgttattttttattttgttcaatggacttatcttgaaattctccaaaaatttatttaattcctactaagaggggtatgttgtaaataacaataatgataaaaagtgcttgataatattggctgtagtattcagcatgccacttactgcatttgacccttgtgggtacttagaaagccctcaccttctaaattcctcttgtcatccaaatgctgcctagtgctaaggaaagatttgatggtttcctttattcacttgatatcctcttttttatggtacataaatggaagttctaaatgaatgctagagcctcatattagattcttgtaaatggaatcgtagatcatctcacttctgccttagtcacaagattgactccaagtgtacctaacacaaagaaacaacatatactggcctctaaagatatacatatatacttagtcattatccagtttagtggatattaaattgcaggaaaaaagtggaagaaaacgcacatttgccgctaaatgtccttcacagattgcatctgcagcttccttttttgtgtttagctctacatgaatgattggcataacttttaaaatgtaatcactgcacataacaactaggttatatttgattgcatcttctgaataatgtttaaaaagtaaaaggcagatgttatcatgtactttcctctcaggctggttccaggtttttttattcaacaattttatgtgaaaggcaattgcagaatggaagaatttagcatggtttctaaggtcacaaggagaaggtgacgtgactctgcaaacagcacccccagtcttgcctctctgcccagggcggtgttattaaatgagtaggcacagtggagggctcattttccctcctgaccaccctcttggggctccctgtgtgacctctgtacactgggctttcagaaggccacagagatgacaacaagaccacatttgtttttatctttcagtcaaatagattcatcagacagtctagacactactcttttgtctatcagaggacaaaactacatttgatgattcaatgatcatttttaatgtattgaaaagaatttttgttaaaagatggccatcatataaacatggattgtttaaataacctcatttttctcttacctcataacagaaaggaagatttcttacataccttattcatgttacaacctgatttatatccctgagctaagaattctgagtggcatcatagcatctgaaagcttttgccaaagacatgtcagaactcctttaaggagcagatcaccccatgaattactgacttacccagcctcagttacctcacagttaaagtatgccttcatgatccaatgggagaagctgttcagtaaatgcatagaatatttctcattgtcatcagggggtgtttcccagaactttggaaccgtttctaaacccatagccccagggtgttttcaaagtttgatttacaaaataaatagacatctaaaagagattttagtcccaagctatttttttctttttgcagaagttattagatttgaatagatacctcaaagccattttttgaaatcaaaattctcctttcttacatccaaaatcctgaaaggagcctcgagaggtcactacactgcttctatgttgtaccagaactgaatagttcaaattactgttgcgttttgataaacaccgccctgccccgccgccacacacacacatgcacacacacacagttttcttctcctacttctctctcgcttggttgaattaccccactgacagagagaaaaacaacattcactggcctccagggaaagtggtgtcgctgcgaatgaagggtggatagaggtggtgaaccagaagacatgctctgtgttggctgcaaaggctctggctctgtcatttccccagaatgtcccctgcagatgcctggcagtggaagatcagcagtgaagggcaggagagaggcagctatgcaccagctcttctttggagatactaccaaaggggaacatttgagatgcattcaggtctttttaaaggcatttttaaaccatatgttaaagaaccaaacaaagtggatatggatcgcttacgaagtaaagccagttcttgccttcgctttagaaaatgcttccctaggctcagagaaaccttttaaagtgcccactctgtggaccctccacttcatgtacaggatgtacaaaagaacagcacagcagagcagggcactgaccatagcaccagactgcccggggttaaaatcccgtttctaacatgtgctgctctatatccttgatttagtttccctaataaatggaaactaaatacctacctcacagagttgtgagaaaatggatataaaaacacttagcaggccggttgtggtggctcacgcctgtaatcccagcactttgggaggctgaggtgggtggatcatgaggtcaggagatcgagaccatcctggctaacatggtgaaaccccatctctactaaaaaatagaaaaaattagccgggtgtggtggtgggcgcctgtagtcccagctactcgggaggctgaggcaggagaatggagtgaacctgggaggcagagcttgcagtgagctgagattgtgccaccgcaccactccagcctgggcgagagagcaagactccatctcaaaaacaaaacaaacaaacaaaaaaaacacttagcacaggctgggcgcagtggttcacacctgtaatcccagcattttgggaggctgaggtgggcagatcacttgaggtcaggagttcaagaccagcctggccaatgtggcgacaccccgtctctactaaaaatacaaaaaattagccgggtgtggtggcgggcacctgtactcccagctacctgggagactgaggcaggagaatggcgtgaacccgggaggcagagcttgcggtgagctgagataacgccactgcacttcagcctgggcgacagagtgagactccatctcaaaaaaacattagctgggcatggttgtgggcacccgtaatcccagctactcgggagtctgagacaggagaatagcttgaacccaggaagtggaggttgcagtgagccaagatcataccattgcactagcctgggtgacagagcgagactctgtctcaaaaaaaaaaaaaaaaaaaaaagcacatagcagaacttagcagagatcatcactcatagtaaatacactaaatgctcagtatatggtagtaagactgattgcgatgatttttgtagcccctgacacttgctttctccttagtcttctattttaaagaacacaagaaacatgatttgtccctgctctcctagaaaggggaaacttggaggctcagcagcttttctcgccatgactcttgctgtgattgcattttgagtagggaacgtgtaaaattcattatccaaacccggctactttggagagtgaaatggagtgtgaatgcgatgggacaccagggcaataggcataaaccgggactctcccaggaacactgggagtttggttaccctaattatgggactattcaagaaactgaaattctaaaccttcttcctgtttcaaagtctgaagctcaactggaggctaaggtgataattttctcagaagtctattcctgtatctccagaagaataggagataattgcacttgctattttatcttatacttgccattttacccagaaactatttttaaaaaatgagtcacaacaagaaagcattattgctacttttatattcctttgtcaaaaaccttggctgggtcgtcaggaccctggatccattgccctgcttggattatcacaatcctcgtccaagttataccacttacacaaccaggcagctggttctagggacctctgagacctctaagggtttagaattgtttttaatctcctggagtattattatgtaataatgtcagtggtgttatcttttctaaactcagattttgcctccttttggaagtagagttcaatctaggttgtgagcaacacactactcctgaaagcaccatgaaggaatgaatagtacccttactcatccttatttggaatgttttatgtgccagacactataatttcatgtaatccccacagcaaacctctgtggtaggtactgtcatcatctggaaagaggggtcactgagacacagagagaaggtaaatgactaatcaaggtcttacgactagtaagctgaagcatggctttaaatggagagagtgtgacttctctggccatgttctaaactctgagccattcaacaaagtcgggtggcctgaaggaggggaagaggcctctacatttccaccaccacattacaggaaacaaaatttattttgatcttagaagctgaaatagtcatttgcatggcccataccctcaaagtgctaccttctggcctagggggtaaatgagaacaaaacttgtcgtgagaaggataaacagccacagggtatgttttaacacatagccctctgaagaatgctgtttccattgtgtaactggaaagatctggaatatcaatattattttgatttctctctgtgctcattgggaactcatttcaagggctcaccaatctgtgttgcagaccaacatgtgatccaactttcaactaacatggcattttctatcaggcttcttagcagttcacacttactattttgcagctcattcaagggctatgataattaccttgtcaaagactgaaaaatagtttctaatcaactcacacattttatcctatggaaagaaattcaaggaagttacaattaatgctaacccagataatttgcttcaaggaaataattaaaaacaggagttaaattgacttgaattatattgctaagtaaaattcttataaaatgtaaaataaatgggtctgagttttgaattttaatttttgcagagtcaactttattaacaggttaaaaaaattcatgaaacatcagctattgaactcaattttccagatttctttagtcacttgatttgcttcagtcatagtaccaatactgtcttttattctgttgatgaaaagagtcaaactctgtaaaatatttgaagggatttattctgagccaaatatgagtgactaatggcccatgacagagccctggctctcctagaaaggagagaattggaggctcagcagcttctctccatgactcagaagatcctgaggacatgtacccagggtagttgggctacagctcggttttacacattttagacataagacatcaatcaatacatgtaagatacatgtcatcaatacattttagtgagacataagacataagtgagacataagacataagtgagacataagacataagacatcaatcaatacatgtaagatatacactggttccttccagaaaagcaggacacctggaaggaggggagccttccaggtcataagcagattcaaagatttccttattggcaattggttgaaagagttattatctaaagacctgaaatcaatagaaaagagtgtctgggttaagataagggattgtagagaccaagttccttatcatgcagatgaagcctccaggtagcaggcttcagagagaatagattgtaaatgtttcttttcagacttaaaaagtcttttctatcagtcttaaggtctctgttttaatgttagtgctggtcatctgtgcctgaattctaaaaggaggaaggcataatgaggcatgtctgacccgcacttcgcagtacgtcctgaactagttttttggattaactttggaatgcccttggctgagggtagggcccatcagtcacttgggggtcttagaattttatttttggtttataatttttttgttcaaagctgttagttttaaacttctaaccaaacttgtggttatgttttatttattcattcattcacttacatactttttttagctaacctttttttttggcatctaatgacctcaatttacaaattcattctttccgcagatatttgtgaaccagacatttttctaggggctggagataaagtagtgaataaaagtgaaaattttctgctctcaagtagtttgcagcataaggggaaaagaaaggaagaaatgagaaacaaatggacaaataagataatgccagatgatgaccaatgctgcaaagccataacaagggtgagatgatgaagagttggagagttaacaggaggaggttgcttaagttcgagtggtctgagaggcctctcaagaagaattagggtggaattcagtcatgggaatacttgtaccaaggccatgtgggactgagggagaagcaggtcccaggccttgagcatctgctatctgccagggctgtctgggagacggatgattcaaagttgcacaagaacagccgtggtctttgcccttgtgaagtttattgtctgcaggaaaataaagtcctgcctccaaggaagtcctgattggttgagaaaatagatatgtaagtcactgtaatatagaaaaattctcctagtaggtaccaacatgaaagcagaaagaagggaatgatccagtttccctggtgttaaattatgtttagcccaaagctgcctccttacatatttgaagtttagattaatggtttctctgtatgtagtgaactgtaacctaactggatgtgtaaacagactgtcacttactcctgtgccaatcaccaacttttggccaaaggcagacaactgttcaaacttcattcaaataaggcaaaagccaaactgtaatcaacccagctgttctgtacctcacttccgttttctgtacatcactttcctttttctgttcataaatcctttccaatcacatggccacatggagtctctctgaatctattctagttggtgggtggcggggactacccgattcatgaatcattctttgcccaatgaaactttgttaaattgtacttgtcaatgggtttttctctcgacattgggtagagcaatgggtgagaggagaccttctaggggaatttgcctggggatagtgagtcacattgctggcttcctaaagcaggtgtacaatctaccatgagttgctgttttcagtcatagagaaagatattctccttgtgcttctgcctagttttcccttaacaggcccacaagggtgtcagtgatttctgtgtcttaggcaccatttctcattgtgatctctacacagcaggttgtggtgtgcccagagcttctgcaagctgcccgtatctgcaagctgcccatatctttgtctttaaaccagaatcctttcttgaaaacaaatgagctttccctaaaccctgtaattcgactacaaatgcaatattcaaatagcctgtaattggaatataaataacttctaataggccatgtaaatgagggtgttaatgtattatgaatcagctgaggaaaatagcaaggactgtattctcttccctcttcactctccctccagcctggagttccattcagtgagtgtttcactgaaaacataccacctccttccttccctcactaagcacaagagacccagagtccctgccatttaatcatggatttggcagatggttttgttatttgtcaaataaatctcattctatcaattacttgtgagaatcttcagacaggagatccttcagttccatgcaggcttgtaaatgtccctgctcagaaatacaatttgaggaaagctcttaaggcaccaagaggaagtgagtacatgagaatctcctggttgggactgatcccaatctcagatcaaggagtgaagggagggaaaaacactgatagtaggtggagaataggaattgtttttcttttttcctccttttctaatataagggaagctgggaggaatctcttggcctccctgaagttcaaaggtcactgatatgaggcacatgaataggagaaaaggcatacacatttatttaatgtgtatacacaggagccttcagaatgaagacccaaagacacagggggaattgttcatctttaggcttaggttcaacaaagtatgcacagccatgtagaaataggactagacacaaagggtatgatctaatgctgatagactgagtggggaaacccagcaaagcctgtgtgtctagatcctgcttggcctctatgagcatgcattccttcattctgagtatggggcaggactctctctagaatagggttcttatggcctacagtcaaacaactaagtcagatcatttcctttcttttcttttttctttttcttaaacagagacagggtctcaccatgttgtcaacgctgctttcaaactcctgagctcaaatgatcctcccacctttgcctcccaaagactgctgggtttataagtgtgaggccaccacacacagctcaggtaatttatttatggccagtttttacacagaaaggtggaaggaaacttagagtcatattttaggttttatggctagctctgggaatgagagttctggtttctatgacccaccttggggaagagtgattctagtttctatggctagctttgggaaagaatgggattgagagacaggagggcaggagaagatcagagaaaaagttttgcttatgaaactacttctgaggtcttcattttggggtattgttttctgagccccaacaagcccatactttattgagtgtctactgtactcctggaaccgtgctgtatggctgttttctctcatttaatttccagaagaagcctgtgatatactgattattattctcatttgttcgagatcaggaaaccgaattccagaaaatcgagcagctggatcgtgtaacttttggtagcaaaagtttttgtctactctgtcccatacaaactactggaatagaaatgaacaggattgtgatatttttgtcatgctaatgtaaaaaggaaaaagaaatactgactctgttaattttaagctataactattgcataacaatgatagatacaactattatctaccaatggtggtgctcattctagactctaggctctttgaaaatagtaatttgtctttttcatctttgtgtcttcccttcttttctttcccgtcaccctactgaaaaacattgtattgatacagagtactggcaagagggtagttggatgaatgactaaattaatgaattgatgagggtgattgatcttttctgacgtttacctaggagaaaaggataacagtctagagggtaaagcttgggaggtagggaatgtgaataaattagagctcaaaaaataaacacctggatttaacaaatgcttaagtgagggaggtgtgatcagcaatgcagacagaaggctgcattcagcagccaatttaagaaagatgcttgagaagtttcaagacaaagagaatttgagcaaaagttggtgggcctggagcaaagctccagccagggagaagagtctgtggcaagaacacaggacggctgtgggtctggtcactcaagagtcaggcacttcctgtgcttcaggccccctgcagaaacttgtctcttcttgaaggcttccaaacattccaaggggtgactcccaggagccccgtttacaagttaatcagcagaagcttacaagatccagctgcttaattttctggacttcagtttcctgatctcaaacatccaagaggccttaaataacctgccctgagtcacacagtcagtaaatggcgcaggtgggatttagtaacatctggctgactccagcctctcctgctctgtctatcgccctgtgtttcctcaaaggccggatgacagtgggggctgtgagatccccagatactgcagaggaatgctgggaacaaacaaacaaacattaaaaaaaaaaaaaaaaaacctccctacttgcttcagaacaaataaagctgagatcaaggaagccaggtttggactgaggcaagaggtcagggtgaactcatacacaaggacagagtttccacacaataaatatttattaagcaatcgccctgcaatgaaggcctgcaagagatggatcactgcttccagctgctcgggaaaggagagccatacagctttctcacaaatatgcatgcatgtataatacgaaatgcattgctgtaccttgagattctcttaaataccagtgaagtgagttgggtactttacatagaacatgcacacacacacacacacacacacacacacacacacacacacacagatagaggaggacttttaggaagagcttgactgtcttctctggttcctcctgcagaaatcttcagcagtccctgatgcctaaaagaacgctgcgtatttgcctgttttgcctccataagggaagtgtcctgcccaccacgccttcaaaaggaatggccttcaggccttgtccttggttccatttgaccctgtcctggccacagccagctggactaggggtgggcactcagcaccagcagccaagccaacagccggctggagactcatagtgtggcccagaataaagtcagggctgagtcaaccagactctatcttgggaatgtgaattgagaaatatagacttgagatcagtttgttcacgagacacaataaaggaaattagctttggagaaagttctttgtcaggaactctcctgtcgcacacccggttcagtttggttttgcaggtcagcatactttcagctggtgaacgggtgccagtctgccatggggcaggcatcctcacttccccccagcgcctctctcacctggtctaagccgctggtgagcagctcacactgcacgcttcttaaacttccccaacaactctcctaactcagactactctcttgcatcagtgaactctccatgccctccttgcttcccccaggagattctagacatctgctgagagaggctggatggggagatgggctaagattcaaaactccagtttggacacctcttagcaagggctgcaggtaggagatatctggctgctcctccaggttctcctttaaaaattgaggactcttcctacttgttagcttcagttttgaggatttaactaaaattatgaaacaacagggaaattcccaattggcaaccttttacaaaaggatgggagctgaacctgcacagttgagaagctttaaggacaagaatggaccacccatgtgcaaaacaaggcagtgcgggagaatcggagagggttgaaagcatgggctccaggggccccacagtactggactcaggcctggtctggccatttcttgggtgtgtgacttgggacaacactaacatctttctagcctaatttcttcacctgtaaaatggagaaaataatagtccattcagataattatcacaaagttagtccaagtaagcaaaagctacctataacaggaagagccctggcccttgggggtagcatcacataggcagagatgtgaatggtgcctgattcccgaatgccgggaaaatgaattgggtactttgcacagcgcacacacagagacacgcaacactcacatacacatacagagatgacagaagtttaggaagatcttgttggtagagaggagacagagaaaaacagagatacaatgagaggcagagagagttgaagaggcgtcatgcggccatgaaagagagggggaggtcagttcctagagctgacagatttctacttccagctgttcttccactccaagcctataattgacaaaacaaaacaaaacgaaaaagcactagcaactacttgtgggtgagtctgtgttccaaaaaagcagaactaaaccaatgagcaacctcctgaaatgctccactccctcccctgggagtttctctggacagatcttaaatatgggcttttctaggaataatgacactcaaatgttgagatggctccaatataacaatatgcatgtgacagacttgcatcattagagtacaaaaccttcaagtcagaaatagtaagctaaaacacatggaaattttctttctgggcagaatcttgctgtggttttattacaaatactttggtagtagttctttgtggtagattgcttccaaagatggaagcaggagtctcttgcaacgtgacctcgccgttcctcccactaagagggggagtctctttcccttccccttgacccttggctggcattgtgacttatgttgactgataagatgtggcagaagtgaaggtgggtgatctacaagcctccgttacaagatgtcttgcagtgttcattttggccctcctgcaggccctgagacctccatgtacaaaggccttgcttagccttcttgaggcctggaaaccacagggagagaaaggcctcactaacagccagcatcaactgtcatcagtgaggccatcttagacaattcacagacagccaagctaccagatgatgtgtctataggtggattcacccagctgagctcagcccgaatcacttgcccacagaattgtgagtaaatagtgtcttcaagccacaaaagtgaggggtgttctgttacacagaaacagatcatggactcaaggatataccactttcctcattgtaagcaggtgctcttttaactatgaagtaggaaggagggcagcacattcacataaccaacctatagtagaatttgggcagccaaagtctaaagggattattgtgttaggaatttattatcattaaacaaaaaatgattgtttagccatgtgaacagcaggtgttggccctcagttctatctcttaaagatagaagcaagtggctttagagtggggtggcagagcttgctcttggggctgtttgatttgtccaaaagcttgcccacaggaatgcctgtgggggtcaacttctccttaagccagggtgtcacttaaggtggatcttatttgcaagtatcagcagcaatatcaccaaggggatttcccttttcttttccttctgacaactattgcaactaattaagaattctgtgacattttagctggagaatattacccagaaaacacatctgagtaataagggacacacggacacaggctattgtcacagagatagtaatgtttttaacacggacaaaaagcttatcaaagcaaatgcaaaatcagttaatctggttaagtccaattgcaagagtaaaacctgtaatgactgcacatactcagagagcatgtcccaggtgcatgcttttgactgtcagataggtcccgttctttttcattaaataactacactggtctataactagtcctcacccaactcattttcctttttggccaaggaaaataatctccatggtattcatataagatcttaaaacgcgacatggtaaaataaatatcctgttgctctttttgtttgtttgaatctttctatcagtggtccctgtaagggaaaaacattctgcctcgggatatacagaggtaagtggcggagaggacacgaagcactcatgggttcagtatagaggaatacaaggactctgggaagttctgcgaattcccacacatcatggctgtcggctgctcagcacttgcctaagctctagcagacctcagcaataggaaaagtcaggcatggtgtctctggggataaagttgctattggctagtttgtgatgtcacacatagaattttgctttgccatagggatgagacacaggaatcaaagctgtcattttgcagctttgaaatcacacacaagtttgactttttttttttaatgaaatttaggtcaactgtaactattctgaaattctggcaaaaggataggaggagagtgttaagatattacattcctgcaaaattcaaatcagtgaaatgttacatgcaaattcttttaaaaagtggaaggtgttatataatacaatattttatttatttgctagattttaaataaaatatttttgaaagagtaatattttatgaggaatttaaaaattcattggtacaaaaattaatgataaaaagaaattacttcatacacattgggttctccttttgtatctaacaattacatagagaagtatgcagccccccctaaaatataaaataaaaaatttaaaaggaaatgttcctttaaggaagtcttccaccagttccaacaattaacttaaaatgtttttgcattttactaatgtttgactagttcctccttaactttgatgtctacagtttaaaagggccctgcctgtagctgtcttagaagggtttgatggcatgtgaacggatttgatgtccttggaagaaaggtagaatcacacagaaattcaaaatatgtttttctttacatccacatcccatgggactcaaaaaaattttatctcccaaaacatttatctcaatcatactagtaatttctataatttacttcattgtagaaaaagcatatatttaatatttagggctaagaaaacagcttccactgtgcctttttcccagttgtacactgtcctggatgactgtctagtagttcaggtcaacagaggtcattcagcagccccttcccctccctgctccttatctcaaataaaatatttaaactgattcatgtagtttggctccataaattgatctaattcttcaaatactcacctaaaccctattttcttaatactaacaatgacagtcccattagttggaaactatcttgaaggaccttgagcaaagagtttgacatatctaggttgttgaatccctgttcataatgtggttatgtattcaagacacagtaaatgggaaagatctagcaaaggttttggtcccattgaattctgccttagtgtttggcagaataggctctaaaagcttattctgacacatgcggaaaataagctgacgcttctctttattgttttcattcctcaacatttacattgttgtgtataaatatacaatacatatataatcaaataatatacaattaaataaatatacaattaaataatcaggtattcagtgaatgaatatactcatttttaatatagtcttatctcataaaggacaatgatacgtgctctgttctaggatataggagacttaaggtctgtttctatgtgctgtgcatccttggagaaatgaaataaaagcatatttataagctgagttttattttaatctttccaactgcctcatgacaaacaagcctacatgacaaacaagtacattataaacactaaaaaggcatattatattatctctgacaaaatacacaagatgacattatggaaagtaactaaggaaggtaagaggtagacaatatgatttctattttcctgtgtggaaactgagtctcagagaaattaattgacttgccgaggctcactagctggatgagcagaggctttgaatccatgtctctcacactctgcagcccaagctcttacctactactttgggttctagtacagcggtttcagccgatctggggtcaaatcgtagctctgccacttaccagctatgcagactaggtaagttactttactttttttcgtgtttggaatacaggaatactgctatttagtccagaatattggaaggatgaaatgtggcatagtatggaaaggattcccatgtagtagtttctaagtcaacattaactccttaattttccttcttgcctaggcctcagtttccttctctgtgtattaaggaggtccttagggctttcaaaacatcaaagaacagctggttcaatcttgtcaatttataatttaaaagagaagtggctttccccaaatcacagctacttaccaaagagtttgtgttctcttagcaatagtttttatgatgctctttttttcttttctctttctttttttttttttttttttttttttgagacagaatttcgctcttgttgcccaggctggagtacaatggtgtgatctcgggtcaccgcaacctccgcctcccaggttcaagcgattctcctgcttcagccttccctagtagctgggattacaggcatgcatcaccatgcccagctaattttgtattttttttagtagagatggggtttctccatgttggtcaggctggcttgaactcccgacctgaggtgatcgcctgcctcggcctcccaaagtgctgggattacaggcatgagccactgcgcccagcctgtgatgctcttaaaatgagacttggacctaatttgaacaaattatctaggatcttgatactctagagtccagataattagcaaaattgtagttattgtattttgtttgttttgggagtttggcccaggttagctaacacacgtttattgcatatttactgctaggtgaaaggcccttcacagttattgttttttcagtctgaaatgcacttctctcgacttttcttggctttccgtttctcatttttcaggtctaagctcaaatatgttctctttgagaggccttctctgatagtcttaatcaccttctacctcccacatcccccagttactttccataacgtcatcttgtgtatttcattagagatacttaatataatatgcctttttagtgtttataatttacttgtttgtcatttctctggctataccgaatataaacatcataaagggatcttgtcagcatgttttcattgtaatatctcctgccctaagccagagcctgtcacatgataggttcaaaataaatattggtttaatgactatctccatccattacctttcctcaaaacacttgatgtcaaaacactctaaaatagagatgagggcttggtaatttaacttctgaatttaaaaaaaattgaccttggtagttagggtaaaagaggtaacaaaatctttttctcaggcaaataggaagaagccagcacattccattgctgtgagtgactctgactttaaagacagttggaagcaataaaaataaaaccaaaaccaccccaattaataaaaaataaaaattaatagtcgttgtgaaatatagtttgtctaaggttttattcttagtatttgtcataccttctaaacatttggccagggaaatttcatattcccttttttcctggctcacaggaattactctcagccacttgagtgccaaatccagacactcacatgaaacaaaccgcagcctcaactgcttctgactggggatgaagagtgacaaacagtcacttttttatttggcggtggagcctatttggtcccacacctgaatgtgacgtgactccaattttttttttttttttttttttttttttttttttttttttttttgagacggcatctcactctgtcacccagcctggagtgcagtggcgcgatctctgctcactgcaagctccgcctcccgggttcacgccattctcctgcctcagcctcccaagtagctgggactacaggcgcccgccactacgcccggctaattttttgtatttttagtagagacggggtttcaccgttttagccgggatggtctcgatctcctgacctcgtgatccgcccgcctcggcctcccaaagtgctgggattacaggcgtgagccaccgcgcccggccgactccaatttttaaaacattacattttaaagtcataagccttttggcgctttaacttagagagatctgagaattgaattcttaatctttactctaaagaagaacttgtgtaaaagtaaaattcagtaattggtcctggagggataaaacagaagccacagatgaaggtgtgcatgctatgatttgaatgtgtgtgtccctccaaaattcatatgttggaacttaactcccaaagagatgatgttaataagtgggccaattgggaggtgattacgccacaagggctctgcccctgtgaatgcagtaagtcctcttataaaaagcttagcatgagctccagagcccgctttctgcctttctaccatgtgaggacacagtgtcaatcccctctgggggaaggccttcttaaaagcagagagtggccctcgccagacactgatcttactggcaccttgatcttggaattcccagcctcaagaactgtgaaaaataaatttctgttttttctaaactacccagtctttggtggtttgttatagcaacactcatggactaagacaaggtggataatatcaaggataattctgagcttgttcatgtccacaaacattggcttttatcacaaagctttactaagcaacttccttattatgttttaaaaagctagggatgtagcaagaaacataatattttagatctgagatctgttcttcttaataaaaaatcatgatttttaaaaattaactacttttaattcccacaggtatctcacagttattgtctcgaattattccccaactcactttcattaaaaaatgaaaatgtacgcactacaggagttgtaagacatcaaagaaaaataatttaagctttttatcactttcgaagtattacatttcaatgtgttcataaactagcgtgatcatcattccgggttgcataggatagtcccatttcatgcctctaatccaagcatagtaattacttacaccccctgtcattcttaaaaatatctggtttggacaataaattatatgatttgatcattctaacaacagctcattaaactttgagatgtttgattaaggagaaagtgtctttttaatctctgtttccccaaagcctaatgccatgtctggcacaagatttttacagctggttaacaatagctgtaaattccttggtgttactctcatctggaggtgagctccagttcccttctttaggaatattagccagactgtgactactgtgcctaatagagtatgttggaattatgctacctttcaccccttctctaggagtctgaagcactctgcaagaagtccttccactctgctggcgaaagtagagaggaaatgagaatgggcctagctgagctcaccttcctctctccccaccaaggcatcagggatgtgagtgaagccatcctggacccttcaggccagatcagctgtctggcgaatatcaacaagtgacttgaatgaatgacagtgtcatgttgagcagaagaacagtgtcatgttgagcagtgccacgttgagcagaactgcccagttggtctctgcctgaattcctgacccacaagattatgatctataataaaatgcttattgtttcaatccatcaaatatttgttctaaacaatagaaaaccagaaccacagccctcaataaatctttcttgaactgaactgaccaaaatgccccagcatttgggaatttttggttatgacatttgtacagatattctccctcctcagcttcagctcagcctaattagattcatacaacatagaaatgagaggcaggaattttgataatttaacttaacactaagtttaacttaataccaagttcaaattttggtgaagacgaatttaagccacaatttgatgattgcatatgtgataaagtcacacatggactttaataaatcaaaatctctagattctaaacaataaacatcattgaaagttattctgtaatttttccccatacattttattcacaatctactcctcatatgggtacagaaagtaaaactcttaacagcttcataattccataggctataaaaacacatgaattcccaaaccattattgtcttcaaagccaatataatggagcacaaaaatattttcattaatgacatacacatgaaattaatgagtcagttatatctggttttaatttcaatgaactacttaggagaaaaaatgttgggcaagttccctaacttctttgagctttggtttctttttctgtagattgggaatagtaatagcaactaccaaaatttgtagagtagattcaatgagacaatgtgttggtcaaatatctggtatctagtaggtagtgatatctgtttcttaatgatactacttatatttctaatttttgatacattaaaaatgaccatcatatacaataaggtatgacatcaaaagaagaaaatacttaggataaatttaacaaaaatagtgccagacttttagagtggaaaaactataaaacatcactaaaagagattaagaagatgcaagttaatggagagatatctcatgcctcttggattgaacaacttaatattgttaagatagccatactgctcaaattgatatagagattcaatgtaatctctatcaaattccgagacatgtgctttgcaaaaattgagaagcagatcctaaaattcacggagaaattcaagtgatacagaatagccaaaacactcttgaggaagacgaacaaagttacaagactcaaacttccctcttcccaaacttattataaacttgcagtaatcaaaacagtgtggtagaggcagtaaggatagacatatagactaatggaataggactcagaatccaaaaataaacccatacctctgtggtcaattgatttttgacaagaatgccaatgctatttaacgggggaaagaaaagccttttcaacaaatgatgctgagacaactgaatatccatttgcaaaagaatgaagttggaaaactagtttatattatatacaaacattaactcgaaatggaccaaatacctaaatgtaggagataaaattataatgctcttagaacaaaatgtagaagaataaatctttgtggccaattaggcactagtttcttagatatgacaccaaaagtacaagcagcaaaacagaaaaaagatcaattggattttatgaaaattaaatattttgtgctgcagaggacactatcaagaaagtgaaaagataaaccacaaaattgaggaagatatttgtaaatcacttatctgataagggattaacatccagaatatacaaagatctcttacaactctacaacaaagggatgagtaacgcaatttaaaaaatgggcaaatgatttaaatagacatcttcctaaataacatatacaaatggccaacccacacatgaaaatatttccaacagcattaatcattaaggacatgcaaatcaaaaccacaatgagataccacttcacagcaactagaatggttatcataaaaaagacagacaataacaagcattggtgaacatgaggagaaattgaatcctcatacattgctagtgagaatgtaaaatggtgctgccactttggggaaagttcctcaaaaagttaaacatagttaccacatgacccagcaattccattcctaagtatgtacacaagacaaatgaaaacatgtgcatgcatgtttataatagcccaaagagtaaacaacccaaatgtccatcatctgatgaattgacaaatagaattaaagtattactcaaccataaaaaagcataaagtactgatacatgctactacatggatgaaacttgaaaatattatgctatgtgaagaagcgaaacacaaaagggtacatactgtatgatttcattgatatgaaatgtgcaaaataggcaaatctatagagacagaaagtagattagtggttgccagagcctggggaaggggagaatgggggctgactgctaatgggggcaggcatcttcttggggataatgaaaatgctctggaatttgttagtggtggtgatttaacaatgttgggaatatactgaaactactgaattgtacactttaaaagagtgaattttatagaatgtgaatcacatctcaaaaactcaaatagagtaagataaaaagtgttaaaatataatctattgaaaagtaaaacaggtacatttctgcaaactcttctgccatggtgcagaagctgttaggttagttcctgattttaccttggttagtcagacatggaaagtcttggaaatacttctgtctgattttctcacagcactgggtcttctgtagctgactgaatagaaggagactttgatagaaagaataatactccagcctcagacttagctgcttcttgtcttgtctctccagtgcctggccctgtggccattgacaagccgcacctcatggtgtgacttatttctctcttttgagttttttcagtctgctagtcccgtccctcacccctggaggtgtgttaagaactagatacacaaaataactgcatggcattttacaaatctgaatgctttagaaatacaagctaagaatccttctttgttttaattgactttaatgggacgagcagacctaatccctaatgtctttctaaattcagaagtaattattagtgagaggttaactctaatgtagatgttactctttagtggatgggcataaacaacaataataaacttttcttttgaattgcatggactaaaattctggctaaacattatgcaactgaaatgagagctgagacaatgaatagttccttcagaggaaaaatataattattggcaagaattgatggtatttttctatgaccagttccaatacatcaatccaggaggccaatatactagtcataatttaatgagaggcaagtccataataaacggtgactttgtggatcatggtgatgctctcaaattaatgcatacttagttttagtctctcccctcccagtccattccagtcctaatctctccaggtatgagtgatcactccctcatttaattccctttgtatatatttttattggaccggagacactttatgtcacctatttatgataatttttgttccttagtactagatgtaagccctttggaaaacagaggctgtgtcttttccatctttgactcccaagaattctatatagtaactggaacatagtagatatttaataaatgcatcgatgaatgaattcacaaatgcaaattgttggcaaagttttatatgagcacaggatagcaacagctagaaggaggttctggaattggttcccagaactgctgctgtcgttgcaggtttgaaatcctcagggaaatactgcagctgaccccagagaaacttgcaagaacatgcttgaaaatgggaaacatattagaagcagaggttcttagtggcaaagaatttaagtaagctaacaatgccaccactctggtccacaccagccatgagcctttgcacctactctcctccccacctttctacttaagtgggcaacttctctcctactccttatcccactttctggcttcatttttctccacagcaattatcactatgtattctaatgattttttaaaatttattattacctgtctcccctcctacctcaacagaatctaaactctgatttgatatagtctggtttctctgttctataccccgtgctagaaatagtcattggacatagtagcttctcaataaatatttatggatggaagaaagggaaaagcgatagaagggagggaaagagaagacggaatggaagaagaatgaaaggaaagaaagggaagatcaatctaagaaatatctaaaagtcttgaaagctttctacgatgtttaatatattcaggtaagcttctgtttcacagatttttttgtttgccttaaaaatattgtaaaaaattgaaaatctggacacttctcataaaaaattaggttatgagtttctcccaataagtctggttaaactaggtctagctctcgttcctcattggtcatgtagacattaatggcagctttagtagggacatgggccagagtcacctaatttgccggagaatcttaaaccaggaatggaaattgggatcattcctggattttctgagaatcttgttatggatatgtagcacaggaagtcctcagaataatttagattcctatggaaattcatattcccaaggggtgaacttctaatgcgaagagaatactcagatccttaaatctgttcatctaaaccagagatccctggaacttacctgcaagggacaactgtggctagacaaactctttcctgatccggctgccccaggtactgtcagtagagcaccctgaatcctgcagttctctagaggatcttgagcttacagatggtaggacatgtccaccactggagtgatagaatcacaaagcatgttcttaaaatagaattctaggctgagcgcggtggctcacgcctctaatcccagcactttgggaggccgaggcgggtggatcacgagatcaagagatcgagacaatcctggctaacacagtgaaaccccatctctactaaaaaatacaaaaaattagctgggcgtggtggcgggcgcctatagtcccagctactcgggaggctgaggcaggagaatggtgtgaacccgggaggcagagcttgcaatgagcagagattgtgccactgcactccagcctgggagacagtgagactccgtctcaaacaaacaaacaaagaaaaaaaacaaaaataggattccaccgtttgtcccccaatacctgattcattcaaaaaatacttgttgagcatctagtaagtgccaggccctgtgctgggcactgtatgttcagtattgaaggagtcaacatgatccctgtcgttacagaccttacagaatcatcagggaacactggaagcacaggaggtattacaggcagcagaggacttagtctggtctctgaaactgcagatttaaagttcaaagtgtagaaaatatgcaaatatactaagcttttcctgaacttagggacatgtttgggatgaattatagagaaacggatgtagttctttaacttattcttataacataggtatataaacttcctttagtgtcattaacatccttcgaaatgtttagatgtaactgtccaaaggcagtcttgcctcctctctttgtaagtcagtgagtagttgtgctcactcttctacataaacccaatcaatgtgaaggcttttttcaacctatgcattcatactaccacttacactagtaaatctactattacttctgatgattatgggtgtttttctataaagtagattttctattttatggtgtatagtgtattttttgactgtggcaaaatatacattacataaaatacatgattttaactatttttaagtgtacagtttagtggcattaaatacatttgcattgttgtgcaaccatcaccatcagccatctccagaactttttcatgatcccaaactgtactcattaaataatacttccccatgccccttcctccagtccctggtaaccaccatactacttcctgtctctctgaattggatgactctaggtacctcgtttaaatgaaatcctacaattttggtcctattgtgtctggcttatttcacttagcgtaatgtcctcgaggttcatccatgttgtagcatttgtcagaattttcttcctcttgaaggctgaagagcagtccgttgtatgtacataccgcattttgtttatccattcatccattgatagacacttgagttgcttccacatttttgctattgcgcataatgctgccatgaacatgggtgagtacaaatatgattgttttgtttatgtggtgtttttaactttgcaaaatgtttttgttgctataatatcataacccctctgagatagattagttagtattttcctcttctggtaaataagaaatccaaattttaaaaagttaaatcacttgtcaatttagggacagtttctgactcttagtctggagtatctttttctcaacatacctttcacttttcatcccaatggtccttcaccagctgaagataccagagactgtgatattgcaaaatatatatttggtcttcgtcctcctttcctggaaacaactactaaaattcttagaatcttcaaagtgatgtcttttagtatgctaagaccgtggctagcagctcccaggtagtttcaggatgggagctggtcaccagaaagactaaggcatgattagagagagagttgggactttcacttccactccccaatctctgggaagaggagaggtgctagaggttaacttggtcaccaatgggcagtgatttaatcaatcatacctacataatgaagctgtcattacaacgcacaggggacagggtttggagagcctcctgatagctgaacatgtggaggttcctggagggtggcaagcccaggaagcacatggaagctctttgcccccttcctcatatccctatgcatctgttcatctgcatccttttgtaatatcctttgtaataaactggtaaatgcatttccctgagttctgtgacccaccgtagcaaattaatgtaacacgaaaaggtgggtatgtgaactccaatttatagcctgttggtcagaagcacaggtcacaacctgggttttttcttttttttttttttttatgaagtcttgctctgttgcccaggctggagtgcagtggtgccatctcgtctcactgcaacctctgcctcccgggttcaagcaactctcctgcctcagcctcctgagtagctgcgactacaggcatatgccaccacactcagctaatttttgtgtttttagtagagatggggtttcatcatgttggccaggatggtctcaatctcctgacctcgtgatccacccgccttggcctcccagagtgctgggattacaggtgtgagccactgctcccagccaacctgtggcttttgattggcattagaagtcggagcagttgtgggactgagccctgaacctatgggacctaacactctctccaggcagatagcaccagaactgaattgagttggaagacacccagctggtgtctgctacagaaatgcttgctcgcttgcttgcttggtgcgtggggaaaacccatgctaaatgaagtcagtaggctcatattttgggggaaacctatgttttaaaatttatctttcaggcatcagttgcagctgttttttctccaagaaaatgacatcctgagctaagccagactgtctctcgcttacccctcaactgtgccatttatgagaaaattcaaactttgtctaatgctacaagctgggaaactatgtctacaaccaaaataaaggatttaaatcttgattactcatgggcttaaatcatacctgatatggttttacatgctattctttgataacaatcttcattaaattgcagagatgccaatgccatgtttgaatagagagtttgaaaagttgagaggtcctcagaggaacattgagggaggagagaagaggccaggtaggcaggtgtggccaggccagctacgctctgctcacgagggccttcccaacaatactccagcacaagcagaaccatggtttttatttttactgatttgtacttgtgggggttttcttagctgaattcatgtttttttatgtcaatgacagtaagtgagattctgtttttctgaaatagtgctattatctgtgttagttgtcatagtttttcactatttaaaaagatatttccatcagttagaacttctctaaattttaacatttctccaattgttaaaaatctctctaattacaataattccacatcagtaggaaagttgccaaatcttacattttgtctgacttgtttgcctttggccttcccttgctggtactgatcaggtgcagaccattggtgaagtacagttgtttcctttgatagtaacatttgggggtggttctctctgtactgtcagggaggtaggacactaagtaactacttgatttgtactgtgggtttgtttgtttttcaagagacaagattttcctctgttgcccaggctggagtgaagtggtgcaattataactcactgcagacttgaactcctgggctcaagtcatcctcccacctcagcctcctgagtagctggaaatagaggtgagagccaccatgtctggctacattctttattttctgtagagacaaagtctcactatgttgcacaggctggtcttgaactcctagcctcgaatgatcctcctgccttggccttccaacgtgctgggattctagatgtgaaccactgtgcctggcctgtgctgttagattcctaatggtttcactttcttggtagggttgccaaaatagcaaagaaaaacataggacatacatgtaaagttaaatttcagataaacagcaaataaatttttataaatagattccatgtgacatttggaacatacttatactgaaatattatttgttatttacctggaaattcacatttaatagggtggcttgtattatatctggcaacactattccttagatttcttccatgaacattactcaaagaataggatctcatagtgttatcaacaaatgccacttatcatgataggggctgaacttggtgatatggagtgacctaaactggaggataaattgtaatgtcaaggatacaggacaagagataatgaggacttgcctttcactgcggttctcctttggaagcagaagcagacttcggtagtttaccgtcccaggtggttaacctgaaatgcaggatttgtgagaccagccaagggaagaggaagtaagaaggcacgtccagatctgacacatactcaattttgttagtcctaaaaactgtagtgtgtgtaggtactctactggtgtatgagtccgttctcacacttctataaagagctgcccgaaactgggtaattaagaaaagaggtttaactgactcacagttccgcatggccggggaggcctcaggaaatttacagtcatggcagaaggcacttcttcacagggtggcaagagagagaatgagtgccagcaggggaaatgccatgcgcttataaaaccatcagatctcgtgagaactcactaattatcaagagaacagcatgggagaaaccgcccccatgattgaattacctccacctggtcctgcccttaacacatggggattgttacaattcaaggtgagatttgggtggggacacagagccaacccatatcaactggggagtgtacatatatgtgtatctacgtatgggagggcaagggataaggaggggaagaatcaggaatatgatctcctggcaaaaaaaaaaaaaattatgattatattctaatatacatataggttcacaaatatgtcatcattaaagtaattattttggctggtcgcggtggctcatgcctgtaatcccagcactctgggaggccgaggtgggcggatcacgaggtcaggagatcgagaccatcctggctaacacggtgaaaccccgtctctactaaaaatacaaaaaattagctgggcgtggtggtgggcgcctataatcccagctactcgggaagctgaggcaggagaatggcgtgaaccccggaggcggagcttgcagtgagccgagatcatgccactgtactacagcctgggcgacagagcaagaccccgtctcaaaaaaaaaaaaaaagttatttatttcttgcccaaccaccaaactatctgtctgggtttcccaatcagtttagagttattacatttctcttaatttgattgtatatagacactttacaggttgtataaaaatgaagtaaaaatttgctttgttttgaaaatgttgtaatggaaaggccaccggaatggatatgttaccactcctttcccaaacagccttgttggaggcccaagtgaagtgtgcacctggtcaaggtgcaagttacatctgattttgtctgtgactctccacaaatcaaaccctgcactttaacttcacgttctgccgttttcaggccatggtcacaagccaatccagttctattggaaacaaacctccccctctttatcagactgcagacaacaaagacaaatctgtgggagcagggagtataccatgcactataccccctctctatttgctgtgagattaaagatcacacaaggttaaaacgaatttttaaagctgacacccattaatttgaaaacagctacaaccctattggtcaaatgcataaggagacataaaattttcccaaggaggaaatataaaaagctaatgaatacgctctccctaaaaaaatttggtttccatagcagtaaacaataatgcaagttaaaataagacactgttttctttataaacttagcaaagtcttgagaatatatcaaattcagtgttggtgagagtgaggtgaggtatttattcctattcactgctaacagtagtttgaattgatgcaacctttctagaaaataattttctaatatcaaacaatattactttcttttttttggagatagggtctcattctgtcacccagactggagcgtagtgtgcagtggtaagaacatggctcattgcagcctcaacctcctgggctcaattgatcctcctaccttggcctcccaaagagctgggattacaggcatgagccaccatgcctggccaacgatattctttcaatgataaaaatcttaaaactgttttaaaatttaaagatacttaaaagatccaaaaatattatggacaaaaattattatggacaaaaaataatgatatcagcattttgaaaaataaaaatactgtaagaaaatgaaatgcttagctgctagggtatagtttattcattttgtacgtgaaaaaagttgaaatagtaatagtatgcaatcaacaaaaacaatgtttatgatgaattttaaaaatataaggaaacgcctttgtcatatatttagctaataagagtagtgcaaattatatttagtttgggatcaattatgttaaaatagtaggaaaagaattacaaagacatacaaaatgttaacagaggttatctaataagggagtatgactataagggaattttacttgtgttttactgttttctacattgcccaagtgttctacgacagtcagaaaaaaatagacactgagtggtcaagtggacagcagagcaggagggagcaagtcagaaaggctctctcagatcgggttaggacactctcagagtttagagcttctccaacaggaaaacaagaaaccccgggttccaaatgcctcttaatgagttcagcttccgccttacttgcctgaacctgatgctgtggcaccgttcctccgactctttccgtaatgaccagttctgccctcatcactctgaagagagactggcaacttccaacgggaagggaagcatccaaatgcttcctctgcaggcagggaggaacgcaagctgggttgtactaacaggagtgctttgtcttagtcccatcagagataaaacaggattttcctagatccaagtaaccacgaatcctttccagttgccactcaggatctgagggggaaaacgtagggatgctgaagagacactcatttctcaacttcacatttccactccattcagcgaacctgctcggggaggctcttttcactcttcccatttccttttttgtggtccactatcacatacaacactacgctaaatagggtttagtagcagacacacttattttgtttttacaattgttgttgagtttttggtgtcacagcttgacagaatacatcggcagcaggggttccgcatcaatagtacttctcacttgagggttttctctctgaaaacttacagaactgtgttgtctttggacttggtgaaaacaccttttaatgcattcacagtttgctgcatgtgatgaaacttagcaatgctctttctcaccttgaagaaatcgatttcactcttggcttcatgtcttgttcttgttgaaattgacacaagtcagttgcctgctttgaacttcagttaccgaacttaaaaaaactattgactcttttatttattgagatggagtctcggtctgttatccaggctggagtgcagtagcccaatttcagctcactgcaacctccgcctcccaggttcctgccattctcctgcctcagcctccggagtagcggggactacaggcccccgccaccacgcccggctaattttttgtatttttagtagagacgaggtttcaccacgttagccactatggtctcgatcccctgacctcatgatccgcccgcctcggcctcccaaagtgttgggattacaggcgtgagccactacgcccggccaaaaactacttactcttttacttaccttactcatcctgacggaaaagataaaataagatcctgtgtgagaaatgttttgtaaactgtgttgcaaacgtcacaatgacgagaacgaaggagggacagaggaagtggagaccctgttactgtggcgagcatttcagggtcaggggcctgtcaaggaagcatccaacaacagaatccagattgctcaaaggtaaagtcctgcttcttatttaagggaagttcttgatcatgttttacctaatgctcccttgttgagtggtgactgaactggagaaaacctgaatcccttgacgttttatgcaatttatgcaataaattttcaaaggagtgcctctgtggcatttttcatattctgaagaagtatttaattaaaaaaaatccaaataaacttttgaccagatgcaacaagacatgcaagaagctatcgagttgaagatagaacataagaaaaaacaatacacagatatttaatcttgttatggtcaagaattaatggctactcttgtacctttaattaagaaataagaccatttaagttatctctcgatgagcagttaaatgacagcaatattttctttcaccagctcccttctcctgccagttgctttgtgctggttaattttgatggaaagacaatgcctaataggattatttcagacaatggaggaattactatcaaggataattttttctcttataggagaacgtgcatctttattttgactttcctatttttcttccaataatgaggtgaactaatgctgtttaatcaactgaaagctttctggctttcagaggcagccattcggaaaaggctgatgttaaatgagagaagagggaaacattaagctagaaataaaatggactccaagctctgactctctcctggggtctcctcggtgccataacttttgattaatgagagtctcaagggggaagatcctaagtcaatgtcactcagctggctcagtgtaaattcttgggctgcacgtgtcagtagaatccatgcttgaccacagggacctggaatgaaccaaggcacaaaaagacctctgacttgtccctgaagaaagagaagctgctgctaacatgagactaggccatgtggtaatgtctacacattcctttgaccccagccttcttacagaatctctgggaatgctatggcatgcttcctaatctctaaatggaggaaaatttctagatcacttccatggatctcaggagaaatagccaaagtttctctgaattcattttgcattgttgttttaatgttactaatacattgattagaacttatcatataaaattacattcataggctggaaataattttttttgttgtttttggttttttttgagagagagtctcgctctgtcccctaggctggagtgcggtggcacgatctcggctcactgcaagctccacctcccaggttcacgccgttctcctgcctcagcctcccaagtagctgggactgcaggcacatgccaccatgcccggctaattttttttgtatttttagtagagatgggatttcactgtgttagccaggatggtctcgatctcctgacttcgtgatctgcccgcctcagcctcccaaagtgctgggatcacaggcgtgagccactgcacccagcctatttattttttaagacagagtcacgctctgtcacccaggctgttgggtgcagtggcgcgatctcgactcactgcaacctctgctttcccggttcaagcaattttactgcctcagcctcccaagtagctgggattacaggctcccaccaccacacccggctaattttttgtatttttagtagagacagggtttcaccatgttggccaggctggtctcgaacccctgacctcatgtgatccaccttcctcagcttcccaaagtgctgggattacaggcgggagccccaaacccagcctaaaatgtattattaaccacatatatttaaaaagtggatggatgaatagatggataaattttaggtcccaaactttgggacaaatgctgtgaagacagaatttacttccgttaaccacaaataacccaagaatgttcaccaaacatcatgtagactgaatagatgcttccattatatataacttagcactttttaaaatgtattattaaccacatatattttcctctctgaccacattgttcattcttgccatttctgttatctctgtttaagaagcttctgaaagatatgatgataagtgcagacaacagcgatgatatggaaaggagagtttgactatggaaatgttattgagggacaaacagcattatcttgagaatctcaagctttaccctccatggtagggatgctgctgtacctgttggaagagaatagaatgcctatgtggtttttatctctttgtgggaatagaatgtctatatgatttttatctggtttttcagaaaaatgttcaaaaatatctactttgctctctcagaactcatgtactcattttactttaaatttactttcattttctagttcatatagatgcacatgtaggcaattaagcaagtagttttaggtgcatttgtgtgtatgtgtgaatgtgtccatttatcttctcaactattgcatctcttcacttctaagacaccatcctctgtgagatgcaccattagataatgtatcattaagaaagaaaaacaacactgtcaattaaactaccacttgctatcagttgtaaaatgcatctcaatttcagagatgtaaaaatgtgaaaagatcctgaatactcttcattggtaacaatgtttttcatgtggtctgttacaaaaacatccctttcaatggatgctgaagagtcatgttaaatgagcattagcctaaagctgcctccttacatatcttaagttcagcctaaaggttcctctgtacatcatgaaccataacatgtgaaggtgtaaacagacacgggccatagcctacacttgtgcctgtcactgagttttggccaatcaaatgtagccaactgtttgaaccctgttcaaataaggagacactgagctataaacaatccggttgtttctgtccttcacttccattttctttacatcactttcctttttctgtccatagattttcttccaccatgtggctgcgctggagtctctgagcctactctcgttcaagaggctgcccaattcggggatcattcattgctcaatgaaactgttctaaatttaattcggctgaagtttttcttttatcagttgttgaactgaaacactttgcacctacctaattgtttcaaatatctattaaaaaatggcaaatatctgttcaaaaatggacctctaggaaaaatcgaactgctaaaaccaagtcctaggtcttttattagacatgcaaacttgaatatttgaataaatgaaatgatgatgtcttagtttcacttcaccagcaacctggtggtgggcattgtgggagagtatgggtgagggtggctatgagttgacaattggtcaaactggattgctaggacaggggggcttatgatagtattcacttaaaattccaagaaaagaagagtttctgcctgtatagtagtgacagaacaggaataggactgtgctcccatgtgcccaagaggtagtctctatgcccaaggtagtagattacagatggagactaaagagaacgtgtttcctggaaccctgagtgagaagatgagtgaaagatgatgctcaccgctagttcttcaccttccttctgaaggccctattttgttaaagctgactgggtcctaccttttgttacagggatggttggctagtcctcataattgcatctagccctgaagatcacatgctattttacattggtgtttgctcagcttcagggagtgaagaaagctggcatagaggctaactaaaaacagcaaaaatagcaattaaaattttcattgaatggtccagctgtgctaagtagtttaccacatattgttttatttaattgtcttaacaaccctgacaggtaatactaatattacctctacttttacccatgggaaaatggacagagaaaagttaaatgcatttcccaaaactggcaagtggcaggtcctggatcacaatgtaaacttgtgctctaagtcacagccatgtattgccttattttctgttgcaccaagttaagagcaatggaaagcacatcctactgagaatggcttgcagaataggactaaagactcagccttcagcctataatccgcagaagcagatgggtgtaaaggaacacagacacaggaaatgaccctcatagaaacaaataaaaaaggaatgcagaaacctctactaagtagataaatgtagttctgtccaggacagacagaagaggccggcttctctgattttcatcccctcctgagtctttaaaccttatcagagtatgctcatgctttctccagcctctcatgcctgggttcactggtgtgtggcacaccatcgccagtggtcctttgggacttccaccgcttgctcacctccatctggaatcttacccatgctcactaactgctatgataagaagaggatgttctttttttttttttttttttttttgagacagaatctcactctgtcacccagactggagtgcagtggtgtgatctcagctcactgcaacctctgccgcctgggttcaagcaattctcctgcctcagcctcccgagtagctgggattacaggcacctgccaccgcacccggctaacttttgtatttttaatagagactgggtttcatcattttggctaggctgatcttgaactcctgacctcgtgatccacccactttggcctcccaaagtgctgggattacaggcgtgagccaccacacccggccagaagaggatgttcttcttatcctactcttgtatgtcccttaagagccctatctgtccaaatgtactttgttacaaaatctaatcattattctttacacttgtgcagatttgaagattgttcctgccctggtaggccaactactaccaccttctccatatttacccacaaatgcctgagtaacatttaaataaatagaacttttggagtgggaagtgttggaatcaccttctggattggctgatcatttgggctgcaggatcctgagggtagctcaaggattacatatgtattcacaagcaaggaaagccacagggggatgagactacgatacaggctgtgacttgcacagggcttggcatatagtatgccaagtatcttatattcttcctctgtgtttctaataatgtcaccaaatatcacattgaacttcagtgggacattttgaaaatccttcatggtatcattgcagacaagattaagaatatgggcagcgctaatgcaactaggcagattaataactcattgaacgaacataattggagaatgtcaccaaagatcgcgttgcatttttttgtctataacatatggaatttactatcaactaaaatcctaaagtcttatttcacaagtacaaattcttccaatgagggcttgtgcacttatgattatgaaccaaaataaataatcttatatttgtcacagttacttaggtctaggtagcttgagctcattattccaacctgttaagatctgtttttgttttgatgctgtcgtcacataagtgcattcttccttttggcgttatattcagaaatttactaaacgtgcatttatccaagacactgatagaaatgcttatcaggacaggaccaagaacaaggtttttagtaagtcaccagacatcccctcccccgagttgcttataagcaccctctacgtaagttcattcaactagttattaatctgcctcattgcattagctaggcccatatttcttcatcttgtctcccatgataccatgaaggatttacaaaaatgccccactgaagttcaagtgtattttgtctattgcatttccttgaactattgtttcccgttaatttgcccaaattcaatttgcctaaaagcaatttgacaaaaagcaatttggttaaaaagataatttcttcaaaactatggtctagttaaaagggaataatgctgataggtattttttcaaagttggtctgaattgccacccattttgcaccctatgtattttgtgcgtgtattgcttttcctcaatagtttgattttttatttctaattattttccagctggttattcctattaggcattgcttataatgtagaataattgaaacaatctaactgttcagcaattaattaaaataatgcaaatgtccaacagttgatggattgctttaaatttatgatagtttccaattaccatatggtagttaaaagaccatatgtcttccaatatggaagcctaccatgcactaatgtgcaatcattggctagcccttcttgaataggattatgtttaaaattggttttctggtttgcattcattatttcccagtaaaatgcatatgttattttaaaatcctaaaataggatggtcgtgatcacacctgtaatcccaacactgagaggctgaggcaggaggaacagttgagtcaggagttcaagaccggcctgggcaacatagcatggcctcctgtctacaaaaaatacaaaaattaacttggtgtggtggtgcatacttttattcccagctactttggaggctgaggcaagatgatcccttgaatctaggaatttcaggttatagtgggctatgactgggccactgctcttcagcctgggaaacagagcaagaccctgtctctaaataaataaataaatacaattaaataattaaataaataaatacaattaaatttaataatgaatgaaaagcctaaaataatacataagtcacaattatagtcacaattatagttcaaccactctatcaatttcaaataatttgcttctattattaaatccttagcttgtcccttttacactgttggtgggagtgtaaattagttcaaccattgtggaagacagtgtggcaattcttcaaagatctagaaccagaaataccatttgacccagcaatcccattactgggtatatacccaaaggattataaatcattctactataaagacacatgcacatgtatgtttattgcagcactgttcacaatatcaaagacttggaaccaacccaaatgcccatcaatgatagactggataaagaaaatgtggcacatataccatggaatactatgcagccataaaaaagaatgggttcatgtcctttgcagggacatggatgtggctagaaaccaacattctcagcaaactaacacaggaacagaaaaccaaacaccacatgttctcactcataagtgggagctgaacaatgagaacacatggacacagggaagggaacatcacacactggggcctgtcacagggtggggacaaggggagggagagcattaggacaaacacctaatgcatgcagggcttaaaacctagataatgggttgacaggtgcagcaaaccaccatggcacatgtattcctatgtaacaaacctgcacgttctgcacatgtatcccagaacttaaaataaaataaataactaaataaaatttaaaaaatccttagcttatcctctaagcaattccttagttgttcaaacttttcacaatacaaagtaattacttgaagatgaattcattatacataatgacaaaaataagagttctgaaaactgttaaacaatatttaaagatacagtgttataaagctgtcccatgtttgatcacccatacttgaatatataatgatgggaaataattatttgcaaccaatttatcacgttgaccaatttgctttgatgaaattactttcgactaaataacatgctatccatctacaggctagtaacacaagaacaaaacaatataactatattgattatttccattttagtgaatctgttctgaatgctaggatccattggcatctcttttggatgtcttacaagccattcctttaataatctattttagaatattgccaatttaaggcaatttaagcatatgcataagttccttttagagtggttcaaagaccccagtgggggacaacctcctgcttgagctaagcactgacaaatgaagctaggatgctatccacgcattttattccaagtgttttgtgctgattgattctcaaggaaatggcttgacttctccatcctctggcatctctacagaatcaattcaagaatatcacgtgtttaatattcttatgttcttattttcttactccatccttagaggtttcccaatattatttccctttgacctattttactattatttaaaaatcagtgtgattctagggctgtgagtactgcttggctctgctcatggcctacatttgtggccatctgagagggcaggtgcataagagttgcaaaactcctagaaattcccaataaactctttgtgagtcctctaagtgttgacaccaggcatataggtagtaagttacaccttacatgattttgccatattagataagacagaatatatacattagttttttttcttgtctatagatggaagcagtcagaactattaactctttttttttttgagacagagtctcactctgtcaccatgctggagtgcagtggcacaatcttggctcactgcaacctccacctccctggttcaagcaattctcctgcctcagcctcctgattagctggaactacaggcacacaccaccacacccagctaatttttgtatttttagtagagacagggttttgccatgttagccaggatggtcatctcctgtcctgtgatctgcctgccttggcctcccaaagtcctggaattacaggtgtgagccactgagctaggcccagaattattaactcttttactctttttttttttctttttttctgaggaagagtcgctctgtctcccaggctggagtgcagtggtgcgatctcggctcatggcaacctccacctcctgggttcaagcagttctcctgcctcagcctcccgagtagctggaattacaggcatgcaccacatgcccagctaaattttgtatttttagtagagacagggtttcaccatgttggccaggctggtctccaactcctgacctcagatgatctgcccaccttggcctcccagagtgctaggattacaggcgtgagccaccgcaccaggccagaattattatctttaaatatcatattcctcactgtcttagggtttaaaatacaacggtctaattgcatctcttcatgtttgttcatgaagagttgcattcccacctaatcttagtgaaaatttctacaatgaaatattcttcaaatgggacatgaaatcataatagttaatttcagctatttcttcagcctttcattcattcaataaaaaatgaaaagtaaaactaagaaaaataaagaaaactattagctctacagacaaatgacatattctttaaatgtgagctctgtaatggtgtggtttcatcaggatttggttcttagcatagaccaatgaataggaatagcagtaagaccaatgaagaggaataatcttattcctcgagtttataattccagtgcatttctctaccttttggggactgtcccccaggcattcctatgctgagaaatcagggtctgagtgcagccacgagggaaagaccccagactgtcaaagatgaaaaccaccagaacctgagtgaatctttcaataaagaaagtgtcatctttagtaaaagaaacagagaaatcttgaaatttttttctggtgattttttttctaaattgacacagtaacatatttttgtttcccccctattattccttttcattttattaaaacaagaaaagaaattgccgagaatggctctgatgtcgtgtctggttaatgaaactaacacattacttaaatatttatcctcacatacatagtatttggatgcagatgtggagaaatgttgtcaagttaaaaataactctttcagtaaggcaatggcacactggaatgctaatccaagcccactgctattcttcacacctacatcctgggtgtcctggctgcatgaagtaaacagcccagcttcccttccttaggaaccttcacctttcggctagagccatttttaaaatgtgtgccaagattagcaagaaacagagtgacaggagaaagagaaaaatcctcagagagccactctcagttccagagacccccacaatgtttatggcatgcctgttggggaaattttcttccctccaggacaaaggtagcttcaacattctaatccttagagtgaatgagcacctaccctaatctgtgcgcagctaatcagtcatgtggttcaaagcataaagccatgagaatacctaaagtcaggtgaagcagcttagttctggaaaggaaaatgtctggaggagagagttttcaggccaagactccactactgctgcaccctcagattttaggtaggatgtcctttggggttcacctactcaatatgtaggtaggagagaacctgtgtcatgggaatatgccctggggacttacatggaaatataagcccctatcaaggatgagaaaggatatggagcaagaatatggtttgctttttgtggagggagatatggatgcagattggtgctctctgtgaaaagggtacagtgagggtttggagatctcaggggaagtaacaattaacttagtccctgtatatctgataaaggcaaaggaggagagtaggaacatgtggacaaagatttaagaaaatagatgcagtttgattatcatctacgtcttctcttttaagttctctagggcacaaaaagaagactcaacatcttattttccccagtgagagagaaatattatacagtgatgccctcttaggaacagatcaatgagctagctaaaagcatcgagtattctacctctggaggcagatcagacttgaacaaaaatattaaaagttcctgtacatttctacaggaagatcggattttgttaacaacattagacaaataattgccttctatattgttgaacttgttctacctccttttatgtctgataaatccttggctcctagtctgtactataattactttcaactttccaatttaatttgccgcaatcacaggaaactggactgtacacactaacacctgatcccaacagatttttcacatcttacagagcagtgccaatgaagttgtagcggcggagtttaatcccctcccatgcctaagcaagcaggaagcgacattcaggataaagtcctgcggatcgggactgccatttggttacagttgcactggtgttttctctctatgggattggacctgcacccagaccccctttcaactggcaaggataatttgatcccatttttaagcatactgatttacagagagcagagagaaaacccagtctattctggacacttccacacatgtgtaaaagtacaacaaatctacatgaccgtttcattatggaagacattttattttttaaacagtggtgagttttttccttttaagtcagagctgtgcgtgcacgtttgacagtgagctgttattcctaaaggcaggaggttaggcagcatgttagagtttcatattaaacaacaaagagttttaaggagcgtcctcaaattacactcacagtttcaaagttcaagaattgtggctgagcactccttaccttacaatttcgggtccaaagaggtctttaagtttaaagcagtacatcaaatgtgcaggatttattttcttgcatgaaagtctcatctgtcatagcactccactccccgagaagagcccagcctcctcttcctgaacaccaatgaggaaaccagaagagcacatgggggacgtggcttccctgaaagcctgtcagagtctgcacatgctctttgtgacagaggtgccaaattaaccttggcatgaggctcacaatgcacctcattgtgaggtcctgggcacctcttaggggaagaaaaaggttataaaatgttcgagccaattgaaagttttcacacttttgctgagatgtgcctcttattcattaaaaataaaagagacaatttttttttcctgttaattagcttcctgaggtacaagtaagacggcaccaacatgttaagataagagagaaggctatcttttggaattctactactgtttcaggctagtgagagggagtaatttataaagcttcatctcaccacctagaaaagtgcctattctgtaagagctgacaggaagttttattggaatgaagttcatgattatcagtgtacaatgtaaaataatgtttgctaaccatgttccaccaggaccaagggtaaaatgaaaatctactgcatctgggttataaaatcaatctgtgatattgacataatatttcaagtggactctccccatcaaggtaactagaagtcattgtgaggaggaagtccacaccttcttacaggacacagacatacaatgaccaggaaaacatctgcctgttgctttctcacctgtgtatttatctaccgattacaatgtgacacagaaaagggatattgggtagaaaaaatatatagccaagtcaaaataattaaacttcttaaaatcaaaatgttaagacttaagtcctgattactgtttgcatagagcttgatgctgttcattctatcctccttgctgggacaggagcctgaagcagttcaccatggtgagcagttggtcatagatgtgaagaagagagaaagatagcacctggaagtagaaagtgctgcagagacccgtgtttgttcgagatctggttttggttgtacaaataataaactctcagcccagggaactcttagggtatttctgggtctcagtcagtttctttccttttcttttctttttttttttttttttttttttgagaccgagtctgtcgcccaggctggagtgcagtggcgcaatcgagactcactgcaacctctgccacctgggttcaaggaattctcctgcctcggcctcccgagtagctgggattacaggcgcaggccgccatgcccggctaatttttttgtgttttagtagagacggggtttcaccgtgttgcccaggctggtcttgaactcctgagctcaggcaatcagccctccgtgacctcccaaagtgctaggattataggcgtgagccactgctcccagccctgggtctcagttgctttttctgtcgagtgagggaattgaactagtttagggatggaaaattgattacctgcaagggctcggagtgcagagtgcacttccctgggtgggcgctaaggggagatg

SEQ ID NO: 589 - DNA, 149272 bp, Homo sapiens
  source 1..149272: mol_type = genomic DNA
ggttccagccattcttatgcctcagcctcccgagtagctgggaatacaggtgtgccaccacgcctggctaatttttgtatttttagtagagacggggtttcaccatgttggtcaggctggtctcaaactcctgacctcaagtgatccacccgactcggcctcccaaagtgctaggattacaggcttgagccactgcgcctggtggcttctcagaataatattttcaagtgtgtaatataaagcacatagattacaaatgaaaccaatcatatggaatacaggtaacaaaatactggaaaacctgtatatattttgtatgtgatatatatgcccatgtaatgtgatatatggatgtatatacacatatgcacgttaaataacaagatctagtaataggtctaatagctactgtaatttcaaagtgataaaaatattttgagatctctaccacagctgcaatgtgatatgaaatatctgggatttctactggtgacagtcacagctactgctaatactactacagtttgtagtaaaactaaagaccaaatcttttgccatccagataccaagacaccctgaattctacatatggatccattgtgggaagagtctatggacccaaagttaagaaagcctgaatcgtgtttcagaggcatggcagacagattcttttaaatacggcagggatggctagtggctaggcatctgtacgacccttgattagttcaagtggcagttgagtgagacacgggaggtatgccagaaacacctctggcagaaggtccaggtttgaaccttataggcgtcacttacagtgttttgagaactggcttgacccttccctttgcctagtgcccatttcctcatctagaaaatgagaatgagcctggtgtggtggggggtggctcacacctgtaattccagctgtttgggaggctgagacaggaggattgcttgaagccgggagtttgagaccagcctgggcaacatagtgatcccccctgccctgtcgcctgtctccacaaaaaaaagccaggcaccgtggctcatgcctataatcctagctactcaggaggataaagtgggaggatcatctgagcccaagagtttgaggttacggtgaaccatgatcatgccactgcactccagcctgggtgatagggagaccctgtctctaaaaaaataataaatacataaaatgggaatgatggtgtcttcctccgattgttgaaaggattcagtacattaacaggtgaaaactttttggggtcaatgaatgtttgttgttaaatgagaatgatattaaatgtctgtagagaacatgccccatgacatgctctctctcagccaagcataatgtctttccaaagagaaacccgaagtctgagctgccgtatgacctgggaggcacctgcgtacttggaagataagccctttcttgccgggtgagtatggttaagtgtgccctgctttccaccccaatccaaaagaacaacctgaacggcaaataaccttgttattttattagaagcatatttacattcttgtagttaactttccagagaacattttacaaaaattttgtataaagtctggaaactacataaaaataatttctatctttcataaagggaaaataaaagttagttacatttactctaaaaccagacagaggaaaaaaacccagttctgtctgtcccttatacagaaagcactaacacagggcacgaggaataccgcgtgggcctctcagagatgggcattgcacggtggctccacggtgaggctaggtgaccccgccagtccccatccagaaaagcacaggggagctctgagggctcaggcggcactgagcggggacgcggcaactccttgaagggcaaaagtgatgtgaaggacgagccacgaggggaatgatcacagactttcacctgaaccatgaaactggcatttcacctaatactttctcacacgccaggctacacatggaaatactgtaagcaaagcccaaagcagccctgtctggtggttcccaacgctggcctggcctggtagaactgggtctatgttctgcagttacactgccgctagttcatgtttccccagcaccaatgcaccaaagagaataaaaggagacaattgtttcgcttgtctcatttgtgagagacctaaaaaacacccccatctgggtcaaattctgcagcaggcaagctaaatgctcactaacctgagaaccattgctagctccaagagaatcttgactgtgcatttaagatttgggcagtccccttttcctgttgaagggctgcccctcccttcccaagcattcagttataaccaatgttgagaaaatttccagggaattgctttagaaagacagagtatacagaaccttaacctagctgggtgcagtagcatgtatctgtcgtcccagctactcaaggttgaagcgggagaatcagttgagccacgagtttgagatcagcttgggcaacatattagagaccctgtctcaaagaattttttttttttttttttttgagagacagagtctcgccctgtcacctaggctggagtgcagtggtgtgaccttggcttactgcaacctctgcctcctgggttcaagcgattctcctgcctcagcctcccgagtagctgggattataggcatgcaccaccacgcctggctaatttttgtacttttagtagagacagggttttgccatgttggccaggctagtctcgaactcctcacctcaggtgagtcaccatgcccggcctaaaaataaagaatcttaaatctgtaggagtgaaggcggaaaaagtcctcccaggaagtctcaaccactctaccaccagcgaaacactacccagactcaatatgcccgcatgattactccaaatcattaccagttttgtgttgttgttcttgtttgttgttttaaaaagcagatatcttcctggagaaaccatacattttatagttgtttcaataaaataattagaaatcagggtgaaaaaaggtttccttgtaagtaaacccgcatactggttcaaacatttgcttttattgcgttatatacattctgcagctgtagaatcagaatctgggggaagccaactgagaccccgaaggcccagcaggagtccatctgaggtacagaacctgtgcttctgccatgttcctggggcaggggcattccatttccccctgatgctttttcttcctgaagagaagtccaacagactgccagcccaggtctgaaatgcaaggtgggactcctgaacacagtcggggggatggggcagaggcaaacagccctcctgtttcacctgcagacagggtgggccagagtgctatggagcagactgggttgtggaagcctcgtgtgctgaggaatcagtccctgcacacaggagcctgtgcgggggccagcacgcatcgcagcctggcagtacagcctgtgcttttccatgcctccggtgccaacaccccgcacgtgccacaccaactgctccacctaacatgctcagtggcacaggctcaggcagcaaacgtgttccaacccacctgggcagaagaggccaggccagcagaccaagtcctgtgtgtacgcgtatgtgtgtgcattcacacccatgtgcaggaagggggacgcgagatggcatgaaacacgggagaagcagaataaacatttcagcctccctctttccccggtccccgccccccacatagacaaggctttgtcttaagtggaaagcaaactgggagaacaggaggaatgaggccatctcctgagcagccagctgcaggcctggctcctctgggaacagaaatggctgtgagggacttgatgattgagtgactctgcagggaatggctgaaaaaccaagaattccagcccggatgagcccacggggacttcatcagcagtgctttgtcccacagagagcaaaactggtattttcgcaaacaggagaggactcgaggccacagaacacccattcctcttggaccctgaccccaccaacagccccatcccttccagcttgaagggatctggggctcaaggagaatatacattaggttcaggtgacaaataattacacctcaccctccacaggccagcaagaagtcaggaacgctggggcaggtctatcaggcacagttggggtggcacagggcgaggggctggatttgagctggcacagacgcaagagggaaaaggggtcctgagttacatgttcacagagaatgaaggagaaggccctggggcccaccaagctgccagccacagccccgggcggttgttaagaagcatccgcagaactgtaggggaagaacttggcggccttgcttggggtggaggggtttgggcactccgcctcctcgctcagcttgaagaacatctcctgctcccgcttcttctggttcagatcctcttccagagcctagggaagagagaggatggatggcacttggtgagatctgcaggccacacgtgggtctcccactcacaggacccccactgacatggccttctctggaacattcccttccaggcctcagtgcttgagaaactacggcttccctatttcctaccctagagctcctcccacaggaggtaagtaccacctcctgccaccgccactcagaagctccctgtggactgaagggtacagttgggggaaatgtcaatctagacggggcagggaggaaaaaaaagcagatgcaaatcccctggcaggaaaacagccaaatgactggagaaaaacccgagggagaagatggagagagactgagcagcaaaggaagcagagatgtcagaagttttttttttcaaaatacacatgcctgagttgagattgcgccactgcactccaacttgggcgacggtgcgagactccatctcaaaaacaaaaacaaaaacaaaaacaaaatacacgtgcctttgcctaaacccagaggttcggattttgaagatctgtggtgggaccaaggccttctgtactgtacaaactcttcaggtaactcagaggagagctctagttgaaaagcactgcgggaggttcccttgggcacaagcaagtttatctaggtaaattggatcctaccagaaatatttttcttttttttgagacagagttttgctctgtcgcccaggctggagtgcagtggcactatcttggctcactgcaaattcagcctcacaggttcaagtgattctcctgactcagcctccccagtagctgggattacaggcacctgccaccatgactggctaatttttgtatttttaatagagaaggggtttcatcgtgttggccagactggtctcaaactcctgacttcatgtgatccacccaccttggcctcccaaagtgcttggattacaggcgtgagccaccgcgcctggcctaggattttctaaagaaactggaaatcaagattttaatgtaaaatctccttatatacttaaaagtggacatcttttaaacaatttacaggccaggtgcggtgtctcagccttgtaatcccagcactttgggaggccaaggcgggcggatcacctgaggtcaggagttcaagaccagcctggccaacaaggcgaaaccccatctctactaaaaacacaaaaattagccaggtctggtagtgtgtgcctgtaatcccagctacttgggaggctgaggcaggagaatcacttgaggcgaggtggaagttgcagtgagccgagatcgtgccactgcactctagcctgggtgacagagcaagactctgtctcaaaaaaaaaaaaaaaaattttttttacatcactatgttggccaaacataccatgcctgtaagccaattccagcacataggctatcagtttgggacctctgctctaggaataccaacaatttaataataatagctactactttttgagcacagaatggtttagtaacttgcccaaggtttcacaactagtaatggaggagttaggacttcatcccacctgtgtgactccaaagcctgggctgtttaagcattattctgttctacccaccacatatatttctcaatacaaccttcttacgccagagtcagcgatcttttttctgttatgtgacagatagtaaacatttttggctttgcaggacatatttggtctctattgtgactactcaactgccactgtagtacaaaatcagccacagacaatctgtaaatgaacgagcatggctgtgttccaataaaactttatttacaaatataggtggtgggccagattaggacattggcagtggtttgctaacacctactttaaggaaataaatattatctacattttacagcccgaaaagccagggttcaggagggaagatttgacttgtttgaggccacattctgtgtgaacactgacccaagcaacacttcattgactctaccagatattccgtacttactcgaaatacatctgaatttttctaaaaatactccacaatgtacaatcatctccctgcctccatacaaggcagggggttcacaggctgctgaccgtaatgcaagaatgtaaaagaccatttattctcgaatgaaaatcatcacctccgggtcattgttccagcagaaacccaagcagctaatgacagaagaattctataaagaattctgcaaagaggcagcccccacaggcaaagtccaatgctggcttcccaactgcacactcgtggtgcctcccctgagcccaggcccctctttgaagcgatctgagacataaggcaatagctagaggaaacgcgatcattcattttcaaactctctcaggataggccaagggtatagaacccccaggtaagagaaccaggtggacgttcatttcctgattgcagaaccaacctatgtcagcaggaacattattgacttgactgtcaagtatggaaagtcccagcagaccatggttacagaaactgatgagcgtgggcctaacaggaagtctgggatcttggccagcttccagccagaaagctccatgagcgcagggagggaggcctcaattcaaggactcccaaggccatcacacagctgagatgggcagttgcctcctgtccagaccacagttacagtaagcagaactgatgtacgatggcagaacaaacctcaggacttcaggacccgtgggcatgagattaagagtaacttgggcagttctctcctcagagagtttaggggaatgagtatgtccttggcctgtactatgtgctggcaacttctgacataaccttgcagtattgatagcttcactgtacaaataaccacactgaggtcccatgttttttgggtttttttttttttttttttttgagacggagtcttgctctgtcacccaggctggggtgcagtgatgcgatcttggctcactgcaacctccgcctcccgggttcaagccattctcctgcctcagccccccatgtagctgggattacaggcatgcgccactgtgcccgactgatttctgtgatggttaattttatgtgtcagcttggcaaggccacggtatccacctgtttggtcaaacaccagctagatgtcactatgaaggtattttctagatgtgattagcatttcaatcagtaaactctgagtaatgcaaattacccttcatcatgtgggtgggcctcaatcagttgaaggccttcagagaaaacaagagagaaggaattctgcctctagacagcaacaacaactgggtctccagcctgctgacctgtcctgcagatttcagacttaccagcccccacaatcgtgtaagccaattccttaaaataactaaatcaatttccctctccctctccctacacacacacacacacacacacacacacacacacacacatcctctctctatcttggttctgtttctctagagaatccagactaatacggcccagagcggggaagatggcttgcccaagatcccaaagctggtgaccagcaagaacgtctagagtgccagctagagaggaaatggacaaattcccccaacctctgataccatcctagttcaagataccaccctagtccaagctgccatcattagtcaccaaggctatcacaatggtttcctgactggtctctctgcctccactcttgacccctgagggcagccagcgggatccttttcaaaacatgagtcagaccaccttgtcctctgctcagaaccctccagtggcttccatctcacacagagtaaaagccagactttacgcaggccccccacccctctgactttacctcctatcacctcccaccgtcaccaccactctctccggccgcaggggtctccttgtttcacgagcaaggtgtccgggcctttgcagttgctcttccctgtgctgggaatgtccccctgaaaacccccacggctgcacgcctccctccctcaggtccttcagatcttggctcagatgtcatcttcttagacgacatcttcctgccacaccgtctgaagcagcctcactttgtgacccccccatgctgtttccctccctgcttcttggccccttactagaaggtcggttcttccggagggcatggacttgtcccttttgttcaatgcagtgtctctagagtctgaaacagcgtggggcacttagcaggtgttcaagaaatatgtgttgcattaatacacaaacgaatgaaccatcaagctaacgatgacacacaaatgcaatcccatgtgataaacaccatgacaggggcaaggacggggagcccagaagacaccatacagcctccgtgggggaggcctgaataatgcagacaaacagaagttggccaagcaaaggctggtgggtagagaattcctggcaaggggaacaggctgggcaaaagcccagcagggaacgagggaagcgcatatggcatggagatctatttgggtactgaaatctgctcagagcacaagtcggggatgagactcacgggagataaggcaagaacagtagttctcgaagtgtggtccacgaacccctagggggcccaaaacgctttctgggggtgggggaggggcagcaagctctagtttcctgctaagacacagtttgctttttcattgttttgatattggtgctaatggtacaaaagcaatgatgggtaaaacttctggagcttctggaggattaagacaatggcccctcctaactgaatgggtattcttcaccaccgtgcactcacatgtgtttatttttatttttattttttgagatggagtttcactctttcgcccaggctggagtgaagtggtgagatcttggctcactgcaaactctgcccgccgggttcaagtgattctcctgcctcagccgcccaagtatctgggattacaggcatgcaccaccatgtctggctaatttttgtatttttagtagagactgggtttcgccatgttggccaggctggtctcgaactcttaacctcaggtgatccacccgccttggcctcccaaagtgctgggattacaggtgtgagccaccatgccaggcccactcatagtattttagaaagtttttcaattaaaacaataaagccaattgcacttaagatcaccttgatggtgcaacacaaatggttcattttattaaatcctgaccttcaaggtcacagccctttaacgtcctgtgtgaggaaatgagaactatgcataaggcccgcctgctgccggtcaaagcatgatggctgtctagagatcctgttcttgtgcctggtattgttcttgtgcaatcatcttgagttgtgggctgaactcgccacttgattctgcagaatatcattttgattaaaaaacaactcacaactgggcatggtggcatgtgttatagttccagctacttgggaggctgagacaggagaactgcttgagcccaggtagtcgaaatgagcctgggcaacatagcaagaccccatttcaaaaaaaaattactgacaaatatgggtatttagcaaacactctcttgaaaatgaacaaactgagctgatcacgtcaagggaaacaaactaaggatatttactgccaatgacaaaatttgagcattcaagcaaaaatgagaactttggaaaacctgtgtccaccagcctgaacttgacagcttctcaattttttttttttttctttttgcgagggtctcaatctgtcacccaggcgggagtgcagtagtgcaatcatggctcactgcagccttgacttcctggcctcaagcgatcctcccatctcaggctccagagtatctgggactacaggcatgtgccactgtgcccggctaatttttgtattttttgtagagatgaggtttcactgtgttgcccaggctggtctcgaactcctgggttcacacctataatcccagcactttaggagtggtggcgggtgcctgtaatcccagctgctcaggaaggttgaggcaggagaatcgcttgaacctgggaggtggaggttgcagtgaaccgagatagcgccactccgtctcaggaaaaaaaaaaaaatccgctggtctttctcgcacttggatgtaactttgctccagccatgatcctgtaacatcatgcattggtcacttagaaaatattggtttactgagttatgcagatcttccaaaagttgacacatttcattatacaatatttaaaaaaaattatatctccaccaggcacagtggtgcacacctgtagtcccagctagtcgggaagctaaggcaggagaatcacttgaacccaggaggcagaggttgcagagagccacgttcccacgcctgtaatcccagcactttgggaggccgaggggggcggatcacttgaggtcaggagttcaagaccagcctggacaacatggtgaaaccccgtctctactaaaaatagaaaaactagccaggcatagtggcatgtgcctgtaatcccagctattcaggaggttgaggcaggaaaatcatttgaacccaggaggcagaggttgcagtgagctgagatggcaccaccgcactccagccttgggcgaaagagtgaaactgtctctaaaataaaaaataaaataaagaaatcaacagatgggtcacgagggacgttgcaaaggggctagtgacagagaagaaacccagcagaaggtgggcctaggaggacaaggcaggcgaggaagagagtgactggcagcactggctgccaccaggaggtcaagtccagccagccgtatccatgcgagtcagccaccaggatgttggtattgaccatgccagcagcggctgcagtgggctgagaaaggaatttctcagtgggtggaggaagaaattgtgacagggcttcgcagagaaagagagagacagggcagtaaagaaagatgtgggactgagcgagggcatggggtttgaaggtgaaagtatggcaggcaccattcaaaaatgacccctgtgactctctctcatataactctccccgctcctctgcgtgtgggtggaacctctgaatgtggtatcattcctgcaagcagggaggctatcccgtgaccctgatttaatcacatgagcacaaaagggttttctctagctggtggcagaaagggatatcagagacattcaaagcacgaggaggtctgaatgcatgctggctatttgaggtggaggaggccacgtgataaggagtgccggtggcttctagaaaataacccgtctgaggtcagcaaggaaacagggacctcagacctacagccataaggaactggattctgtcgaaagctgaatgggtttggaagtgattcttccccagaaacttcagctaagagcccagccacgctgacaacgttgattgcagcctggtgagaccctgagcagagaacccagagagcccacccagactcttgaactccatcactaggagagagtaaacgggcgttggtttaagctgctaagtgtgtggcagttcatcacacagcaacagaaaactaaattggcaagcagtttatcttgtgctgcgttctgactcctcagaataacttcctctaagagaaaatccccacaggctgggcttctggcccagcagcgtggctggtttgactcactgcagcgtcctctgtggacacatggcaggagtccttcggtccatgagagggagctaaacaagaggctgcccttccagaggtggaagctgcagggcgttcagccacaaagggttagaaagttcccctctctctcaggctggagatccatttgatggtgccacaaagcaagagtccaccaaaataaggagacctaacatgtcctggccagaggcctgtgcatggcacagagcagagcccgagactgagcccaccagctcggataaagttaccttcttgcgcggccgaagcttgtcccgccattccttcaggttctggttatggctctcatccagggccttcagtttctgggtttcgtgctctaccaggaggtggcacttttcattctggaacagattccaggcagaacaggtgagaaatcagaagacgcaggccctgaagactgagacacacctcacgctgtggctacgagggcaccagcatcgttcatttattatttcttcttgactataaatcccatttattcaaactctatacgtaaatcacatgcaccaagaagtgcctggaggaatagtccagaatatgttaatagttcttattaactctgtggtggggaggtatagtaaatttgcaactttctgtgaggatacagcaagaaggcagctgtccgcaagccaggaagggagccctcaccagaaccccaccctgctggcaccctgatctcagacttccagccttcagaactgtgagaaagaagtttctgttaattaaagcatcatggtttgttatggcagcccgagctaagatactctgtatgtctcacatataatttcctcagggagatctgtggcaaggaatgagggtcactgacatgggtgagactcttctaacctcgctgttctttctctgaggtaagttatctgctttacaaaatgtaaatctctctcataggcagcagtgacaagtccctgttgatttcttgcagggaatcagtcttgtcatgaggagcttataaagcagggggaagtgcctttatccagataccacgaccctactgggttggaaaagtagaatcctttgggagattttcattttgggtttcatgctagaggcttctgggagtttagaacttggctgagtgagaagtaatactcgcagcagcgctgcatgcctgtggcctgccaggagctgtgctcggcacttcatacgggctctctcagtgctcacactgaggcagggatcacccgaggcagggataggaaaacggatgcggaaggtgaatggcttggccaaaagtcacacagtggtaatcagcagagccgtgccgggcaggcctcaacacctggaatgtttcctccatgcctccccacctctccagaaattgcccgatgggtccaacagcctgagcagttcctgaggttcgaatcagccccgtccccacaagggggcttcaagtaccagctcctggggccaggaccctcaggcatggggcaaacccaggggccaggaagcttgaagaggtcaggaattaccacagcaaaagcagcccacaaggggctcggccacaccccaaccacctttgcccaaaacacagtgatgactcagaaaccctgcagcagcccactgccagctccgtcacttcattcacaagtccttgccccaatcctgcacagcaggaatggtcatccccatgcccattttaggggtgtgagagctatggcttaggagggtgatatgatttgcccaacctcacagagccctagagcagcatggcagggctggaaaccatccatcccgggcgtgtctgatgaagatccttccctgctgtggagtttctggccccctgagatctgatggccttggggaaactgaggcagcctgggggcaggggcaggggcaggcagggcggtacctgcagctgctgcagctcgctcatgttgctctcacactgcgccagcatgtcccgcatctggttctcgtgtttctgctgttgctgcagccgctccgacttctgcctcttctcctcctgctgggagaactgcaccagagagagggtgggtgcctcaggggaccagggcctggctggttgggtagggagccccactcagccctggcccagggagacccctcagggggactggtctgtgcacagccccagtacccagcaccacctcaggctgtgcccgtgttaagtcctcaccctgagctgagacccagccccagccctcgaggagcccccaggctggtggggacatgacactgcaatgtgacacacgccaggaaagtgtgtgtagcaggcaggaatcacaagggcccgtgtgcccgagccacaagggcaacacaggatgtggggaagctggccaaataaaagtgtgggagtgcggaagggaagggtgcaggagaattggcaacatagcaccaagctctacctctgtccacacacagaggtgaattcaccatgaggctgatgaagcttccagggcacgcatggtgactcgcacaccccctcccaagaccttatggcgggtgggtcggagtgcatctttcttttttgtttttttaagatggagtctcgctctgttgcccaggctggagtgcagtggttcaatcttggctcaccgcaacctctgcctcccgggctcaagcgatcctcccacctcggccttccaaatagccaccacacctggctaatatttttaaaaaattatttttttgtagagatggggttttgctgtgttgcccaggctggtctcaaactcctgggctcaagtgacccgcccgcctcggcctctcaaagtgttgggattacagacgtgagccagcctgcatcttgtttcatattctccaaaactgtataaggcccaggtcccgccaaacctggccctgcctacaccccagcacacttgcagaccccgcaggcccggcccccacctgcttgatcttctcacgctgctcagctgcgctgcccccgccgttgatgtggaggctcttcttgtacatggccatgcgcgtcttgccctcactcctctggatcttgggcagccgcgccttttcctgttgctgccgcaccttcagctgctctatcatgcgctggttgtagcgctgcatctgctcccgctcctggagaggaatatccagaggggctgagggcagctgcactctggactcagagcgtggtcacaggctaaaggtccccacactccactcaggggcccaggaccaacgcagcccacaatgttcagcagatcaaggctggtgttattttgcttctacactaataacattatttgttctcactttaaaaattcttgttaataatatcttggattcttaccttctaaatgccttttcatctaatcaatgatggcatgccatcattagctaatatctcaaagcaaaatgtacacgaaaggggatggtttaccattagtgatggcagatatgaacttatattttaaaaaatcctgatagatttgaattttttccttcccctaacacctatttgtatttcaaagctcagcatgggcatcacctcctccaagaagccttccccgatttcttcacttggttgggtagccttattctgaactcccatggccctatactgacttccatcactgcatttagataagaaactggaattatacacagctgctgtgcatccagaccttggtctgtctgtcactgtcccactatggaggctgaactgagacagacaattcccgcaggagagggtgctttggccacacagagtaggggccctcaccagctctggggagttcagggaaggcttcccagcagaggtggtgtttaagtggagacctaaaagtattgagggaatgcacaagaaagagagaaataaagacaaaatggaaagggaggacaaaaagagggaaaagagaaaaaagagcaaaagaaagacacacaccgggcaggcacagtggctcacgcctgtaatcctggcactttgggaggccaaggcgggcagatcacttgaggtcaggggtttgagaccagcctggccaacagggtgaaagcccaactctgctaaaaaaaaaaatacaaaaattagccaggcatggtggcaagcacctgtaatcccagctactcgggaggctgaggcaggagaatcacttgaacccaggaggtggaggttgcagtgagcctagatggcgccactgcactccagcctgagtgagagagcgactccatctcgaaagaaagaaagaaagaaaagaaagaagagaaagaaagaaagaaagaaggaaggaaggaaagaaaagaaagaaagaaagaaggaaagaaagaaagaaagaaagaaagaaagaaagaaagaaagagaaagaaggaaagaaagaaagaaagaaagaaagaaagaaagaaagaaagaaagaaaagaagaaagggaaaaaaaagaaaagaaagagacatacacagcaagtaacagtcagtgagggagccacttgggccattggcttccctgcatcgtttcccctattcctagccccttgagctgaagcaggacgcccctggagaacctcctggggcctcactgcagccagccctggctcctcttgggggcacttgtcatccaaagtgtgcacccaagaggtgccccatcacatacagcctcatggctctcccaggtcggcccggcagcagatccgagccccgtgccaccggcagcctcaccttctcatgcttgcgcagcagctcgtgccgctggaggaagtactggtctttgagctgctgcttcaccagctggtgcctctcctgcagctggtgctcttccatctcccacagggctgcttcccggtctgcagaggacatgccaccgagctggtgaggtgctgacaaccagagactcgacaggccccctgccccccacctctgcctggcctcctcatgctggagatgataaccaacctgctgggctcaggaattgccacatgttctacctcattagaccatgttggctgatctgagctgaggcctagaaacttcctttaagcctaaggaatgagagctcccaggagcatggtatagcaggaagtattcaaagtcaggagccacagaaactgcagctataggctggaacccagctccatcggtgggattaggaatggagaggttctctaggcatcagctgccatgtctgccagatggacacagctataccatggagggaggggacgtccttgggagaaactttgaagtgcaaagtttccacactgcatctctaccttcctgatgggcacctgggaagagctcagatggagaccccatgaagaagacagaatggcctcttgtcactatttcctcctttgaaaaatgggtgagatcctccttgtctcctgcacgtcccaggcatgcgttatgaagacaatgaagatactggcatcttaacactggaggtctattaatccacccctgtgcacagcacccgggtggggacctggggtcaaagggagaatctcacgcccttcgagacaggagattatgcttggctcagtgcgaatgttgtttatttcactgcattcctgttccgtgcaaaatggtatctgcttttggtatatcagaatagtgattctggcttccaccccaaaatcagaaccacagttctgtaaataggacggttcttaccaacatcatgggataggaaaaggaagtgagggcttttctcaaaacaactgtgctctattcagaatattgaaaactcaagaaccctgttttgctgatccacatcaaataataagaggtttatcttgcttaactgcactggtcatcaaaggcctggatgaggcctgttttataaatgagccaaaaattgccctgggatattggcctcgtgttgtttacttcctcacagcaggcttggaccgtcaaaagtccacaggcaccaaactcaaatttgtacccatcctcttgttatttttaaaacataatatgtacggccaggcacagtggctcacaccgtagtcccagcattttgggaggctgaggtgggcagatcgcttgagcctagaaacctgagaccagcctgggcaaaatggcgaaacccagtctctactaaaaatataaaaatcagctgggtgtggtggtgtgcacctgtaatcacagctgctcaggggcctaaggcatgagaattgcttgaacaggggaggcagaggctgcagtgagccaatatcgtgccactgcactccagcctgagtgacagagtaagacttggtctcaaaaaacaaaaacaaaaaaaatgtatatagttacataaaaaagctcaaacagggccaggcgcggtggctcatgcctgtaatcctagcactttgggaggccgacgcaggcagatcacaaggtcaggagattgagaccatcctggctaacacggtgagaccccgtctctactaaaaatacaaaaaaaaaaaaattagctgggcatggtggcgggcgcctgtagtcccagctactcaggaggctgaggcaggagaatggcgcagtggctcacacctgtaatcccagcactttgggaggccaaggcaggtggattgcttaaggtcaggagttcaagaccggcctggccaacatggtgaaatcccatctctcctaaaaatataaaaaattagctggacatggtggcgcaaagctgtaatcatcccagctatgaaggaggctaaggcagaagaactgcttgaacctgggaggtggaggttgcagtgagctaagattgtgccactgcactccagcctggatgacacagtgagacagcgagactctccatctcaaaaaaaaaaaaaaaaaaaaaagctcaaaccaagcagatatttagccatttggagcctgcctactttgcataccccatgaaactgcacctaacatctgccagccatagagatggaagacccaagggctccataaagaccccaagccaccgttgccctttgcagttctctgacccagagacgccccgtctgagctccccacgctggacgacatcatctagacatgtgagccccctctcagtccccttcttgcccaagagttcctttgccctcttcccctgctggatggtggcccgcaccatcatctccagaaagcctcattctgtaagggaccccctcagcgtgtcaacttgtcaaaatgccccccaagcaaagctgctggtatgctactgccatcttgtggtcatttatttttcctcaatcagcccagaaatcccttgaactcccaacagcaccagggtaggcccggcttcctgatattgtcatccaaggcccagctctatcacccattaactgtgcaacctcagtgctatgatctaaacgtttgtgtcccctccccaaatgtgtatgttggaatcttaacccctgaggtgagggtattaggagatggggctttttgggaggtgattaggtcatgagggtggagccctcgtgaatggaattagtgcctttttattaataaaagagaccccaggctgggcacgttggcttatgcctctaatcccagcactttgggaggctgagacaggcagaccacttgagcccaagactttgagaccagcctggacaacacagaagaccccatttacacaaaaaacacaaaaattagccaagcgtggtagcacgtgcctgtagtcccagctacttgggaggctgaagtcagaggactgcttgagcctcagaggcagaggtcacaatgagccatgactgtgccactgcactccagccttggctacagagctagaccctgtctcaataaataaataaataaacaaaaatccccaaaacccaaaaaaccacaaaaccccaaaaacccagagaccccagagctagtctcccttccactatgtgaggatacagtgagaaggtgccatctatgaagcagagagtaagtcctctccagaccacaaatgtgctggcaccctgactgtggatttcccagcctccagaagtgtgggaaatgaatgtctgttgttgataagccacccagtcagtggtattttgttacagcagcctgaatgaactaagatacttggccaaagaatagtaactctccaagcctcagtttcctcatctacagaaatggggataacctaggccctgcctcacagtgttaggtgaggatttgatgagataaaggtagaaaaatggactggcacatggcctggcagagtggttgctcagtccacgccaagctctctccacctcccgtaaatccagctcacttattaacatactctgcctgtttctttcttttcttctcttgacttctggaataatctcaaatagtcttggtgacaactggtgtccttacctcgttccttacttcaagtggggcttttccccaggtttccccatgaagaatgatgtttagttttggggatggagaaggcctgggaggttcttgttgcccaccccacttcccagggctgggatgtccacagcgactctgggccaagacagcgctgccacttgcacacccccacctcgaaggagctcctgcttcttcatgaggcactcgcgctccttgtcacagatctcccgcctgttgtcggtggtgagcctcttcatggccagctccaggtcctccttctgcttggctacaaagtcccggtcctgtggggagagaggaggacaggcctttatccagagccggcttgggcacctccatgtctcttcctattatgggagaaaagcccgcgtgatcagagaagaaaatgcaggaacagaaaagaaattggtggaggagaaatttaagggagacttagagacgcatcaaccaatttcaacatgtgggcttcatctggatcctggatcaaagaacagtctcggtctgtcaccagagctggagtgcagtggcatgatctcggctcactgcaacctctgcctcccgcgttcaagtgattctcctgcctcagcctcctgagtagctgggattataggtgagcaccaccactcctgactaatttttgtatttttagtagagacggggtttcaccatgttggtcaggctggtctcaaactcctgaccttgtgatctgcctgcctcgtcctcccaaagtgctgggattacaggagtgattggaaactggaatactgacaacatgacgttgttcagcaattattgttgaatttgctaggtgtgtttatggtatggtagttatttctgtgatgtttgacaggtaaaataatatgatgtctgggatttgattaaaaagaataccttggggtcagggagtgaatgagtggacatgaggtgatattactgagattaggtgacaggtatatggtagttcattatacctattcccatgttacttttcttttttctttttttttttttgagagagagtctcgctctgtcacccaggctggagtgcaatggcgtgatctcagctcgctgcaacctcagcctcccaggttcaagtgattctcccatctcagcttcctgagtagctgggactacaggtgcacaccaccacacctggctaacttttgtatttttagtagagacggggtttcaccatgttggccaggctggtcttcaactcctggcctcaagtgatccacccgcctcggcctccctattcctgtgtttttaattttccataataaagggtaaaaaaaattaaaataaaaaaatttagaaaccacggaattagtaaaactctccactcatcttatcccccagagttggcagctgcggtaggtatgtctatacaagtgtatctatagctattgttattgctgtgttacaaaaattattaaaaagggctcaaagagatatgtgtgcacccaagttcacagcagcattattcacaacagtcaagggatgaaaacagcccacgtgtccgtcgatagataaatggataaatcatgtgttatatccacacaatggaatattattcagccttaaaaaggaaggaaattctgacacatgcaacaacatggatgaaccttgaggacattacgctaagtgaaataagccagtcacaaaaggacaaatattctatgattccacttacatgaggtacctagagtagtcaaattcatagggaaagcagaataaagttaccaagggttggaggagaagaaatggagaattacggtttgatgggtgcagagtttcagttttacaagacaagagagttctggagatagatggcggagatggccgcacaatgtgaataggcttaacgccactacactgtacacttaataatggtaaagatggtaaactttatgttatgactattttaccacaattttaaaaaattattttaagaaatctttccatgttataatgtgatcttctggccaggtgcagtggctcatgcctgtaatcccagcacgttgggagactgaggcaggcggatcacctgaggtcaggagttcgagaccagcctggccaacatggtgaaaccctaactctattaaaaatacaaaaattagctaggcgtgatggcaggcacctgtagtcccagctacttgggaggctgaggcaggagaattgcttgaacccaggaggcagaggttgcagtgagctgagatcgtgccaccgcactccagcctgggcaacagagtgagactccatctcaaaaaagaaaaaaaaaaaactgggatgaaactcccagttttgaaactccgtctcagataaataaataatgtgatcttctatcacatgtgtttgaatggctgaaaatatttcatgctatggatgttatttatccaataaacaacagggtgtctctaggttttatctattttaaatagcgctacttcatattctggtagctaagtatttgtgaacctctgtgataactccttcaggattttcagattccctcaggatttctagaagcagaaaatccaagccaaaggatgtgtacatcttcaaagctctccatgcaactgcctcctccaggccaatctgctgtccctctgcgtggatgagggcctgtgtgccccgccctcaccagtcctgcgttctcttcctaatcgtgctgtaatgggacagacaggtcatagggtgtcccggagagaacacaagcttgaggcctcgaccccctccctgaatgtgaactcagcaatgttacctctctcagcctttgtttcctcttctgcgaatgggaaaatgaacagctcctaccatagtaagctatgaatgctgaagcaggtaatatacaaagcatttctaaatatggactcaaaaattctttgctttgggggctgaggaagcagaacacacaaagaccccctcgtgggggaaaataggagcattccggcaaaggatgaaaagaaggctggggaggccggccagggcacagcaaagaggcggcgcttatcttagggacaatgtgggagccactgaagggttttaaggcacagggctgtggggggaagggtgctattatcagacttggaattcacattgatcacacgcaggcaggagagaagaaactgcaggggaaaaacagctacaggaagcctcgctgggaggccactggacagtggctgggggatcatggagatggtgacgagttcatagatccagagacaggagataagaaatatacataccatgcttctggaggtgacgaaggactggagggaaaggaggcgtcaggaatgatgggccagaaaggaaggaaaatggcaccccctcagagcataacaggaccaggtctgggacatcacaagtttgatgtccttcagacttaaaagatgccaagtgggcaggggaatatactgggttggtcaaggagatgtgacttacaaataaataaccctaaaacaaggtaggaggtgctaagggtttgggaggtggtcaatgtaaagtgttggggtatccagagatggaagagcttacttccagatggaggcagggcaatcgaggaaggctgcatggaggaggggataatggggccatgaaggatgaggccagatttaggtattcagaacggggtatttgaggggcagggattgggcaaaggcagagagggggcctggtcaccattccaggtctcgcaccagcccctgcgctccccagctgaggccagggactcacaagaagctgctttttctgcgtgtgctcctccatcttctgcttcatgctttccttccgctgctgtcgggggagcttctccacctcgttcttcacctgcagcagagacagcagagagtagctgggtcagggtcctctccatgcttcctacagtataatcttcaacgcagaacccccgggccagagaaaccaaagaagaggctcagctttgcagcggccagcaccctacgcggctccccaccaagcccctctgagcaggtgctccacactggcctactcctgcctgccgctggtttcagcttccaactcccccagagtgggcaggtgctgttttcagcagcttggtatccacccccctcttctggtaacagcacctcagtttcctgcagggaagtgtttctcaacctttttaaaaaattacagtccctacagaagttcttttagacatttttccctaatccctctccccccatgaaatactagtccaacagacaatatcgtcaatctgacaaaccattgtcatatttcagttattttgcttcctttagggtaacactagccgggctgaaaatgcacttttttttttttttttttttgagatggaatcaagcaattctcctgcctaagccttccaagtagctggcattacaagtgtgcaccaccacacctggctaatttttgtatttttagtagagatggggtttcaccatgttggccaggctggtctcaaactcctgacctcaagtgatctgcctgcctgggcctcccaaagtgcagggattacaggcatgtgccaccgcgcctggccgagaatgcatactttagtatcccccttgtcagcccctgaggtccaggtgaactgacatccctacccccgctggccctgggctgagcatctgatccaggctggccaagcagcatattccatgcccttagcctcaggaactgattcagagataagcacgtgaccctcactggtccagtgtgagctttgggacgtttgctggaactactgaagaaaagctacctgctgtcctctggggttgttaaactggagggatgaaggccaaggtgagtcaccttgtcagcccctggaggggactgcctgagatgaactcagcacagggaagcaatgtccagagatgagaagaagaatccctggcaacactcctgccctcctggtcagacgccagcaagtgttctttccttcttaagccagctgggattgggtttctgtcttttataacaggagggagaagagatccatgacacttctctctaaggaccttagagttcctcagacagttccttcccaagaaacccacaccttcacaggtgcctaataacccaaaacctgcattgacagagggctcttaagagcatctgatggggggaaaggcccgcctgtgatcaaaaagagagcattccagggagttctggcatggtgaggtaagccaagacaggctgtgtctcctgataattacagtgaaaactctgcatcaaatatgaaagcagctacttgaggactctgaaaaccaaacaaaagcaggtggcacgaaggggagtcaaaacttgcagacaagactggtacaggggataagtttcctattttttttttcacccttttgctctcctggctttgcaccaattccagacctgcccagtagtgcagtagaaaagctggctaaaactctgtaagaaaccttgtgtttctggccagagaaccaggaaaagaggcctgtgcagtccagtgagtatgggatgaatcccaaagagaagggcacagaaggccaggcggagtggctcacgcctgtaatcccagcactttgggaggccgagaaaggtggatcacttgaggtcaggagttcaagaccagccttgggcaacatggtgaaaccctgtctctactaaaaatacaaaaatcagccgggtgtggtggcacatgccagttatcccagctccttgggaaggaggcatgagaatcacttgaactcaggcggcgtaggttgcagtgagccgagatcataccattgaacttccagcctgagggacagagcgagactccgtctcaaaaacaaagagaagagcgcaggaaaagggaaattcctaactgtgtgtgtgaacacagagattcacccctgagctgagtatgagtgagacaggtgccaagcagtatagcaaaaaacaaaaaaagcaaagacccaactaaactaacactgaaaccactacccacagaagatcagacagaacctgtggtctgcagggtttcctgttaaacaaaaaacatctacattcttcaaaagattataatacggacccacagtctacagaacataacactgaaatgtcagggatagccaggcacggtggctcacacctgtaatcccagcactttgggaggctgggtggatcacctgagctcaggagttcgagaccaacctgggcaacatggcaaaaacccgtctctacagaaaatattaatacaaaaaactagctgggtgtggtgccagtgcacctgtagtctcagctactcaggaggctgaagtgggaggatcactttagcccaggaggttgaggctgcagtgagctgtgactgcaccactgcactccatcctgggcaacagagcaagaccctgtctctaaataaataaatagaataaataaataaataaataaataaataaataaataaatagaataaaatgccaaggaaacaataaaaaattactctacatacaaagaatcaggaaatagaaccaattttcaaagaaaaaggcaatcaatagatgtcagctccgggatgacacagatgttgggactggcagaaagaaactttaaagcagctattataactgtactccatgaggtaaagccctttaatatttcaagtatggaaagatgaaagttcacagcccagaaaaactattttttaaaaaattagaaaatttaaaactaaacaatacaatgtctgaaattaaaataaaacaatagtggaatggtgatcacagaggagggtcattcatttgaagactgattaataaagattatataatatgaatgatagagagaaaaaaagatgaaaaagaggaaggtttcaggaacttatgggaaaattatcaaaagctcaatgaaacccaaacaggttaaattaaaagaaaaccaccctcatacatatcataataaaacttgaaaaccaaacactaaaaaaattcaggagagtagttaagagaaatgtgacatattaacacaggaaaataatgactccagtgaccatggattccccaacagacactagggaggccaaaagccaccggagtatcatccttaaagtgctgaaagaagggccgggcgcggtggctcacgcctgtaatcccagcacttggggaggctaaggcgggtggatcacgaggtcaggaattcaagacaagcctggccaagatggtgaaaccctgtctctactaaaaatacaaaaaaattagctgggtatggtgacaggcgcctgtaatcccagctactcaggaggctgaagcagagaactgcttgaacccgggaggcacaggttgcagtgagccgagatcacaccactgcactccagtctgggcgacagagcgagactctgtctcaaaaaaaaaaagtgctgagataggtatgtctagtgaaactatccttcagaaatgaaagtaaaataaagacattttcagatgaaggaaagtaggaaactttgtggtcaggaagaaaggctacattggaagttcttcaggttgaaaagaagtgagctgagaagaaaacttgtatcttcagtaaaaaagaaagagtgacagaaatggtaaatatctggataaacataatcaacactttttcccttaagatctttaaaatctcaatgaccatttaaagcaaaagttgtcacattgtctggtatggtttttaatatatgtagatataatacatgtgataggccaggtgtggtggctcacacctgtaatgccagcactttgggaggctgaggtgggcggattgcttgaggccaggcaagaccagcctggccaacatggtgaaaccctgtctctaggcatgagaactgcttgaacccaggaggcagaggttgcagtgagccaagatcataccattgcacttcagcctgggcgacagagcaagactctgcctcaaaaaaaaaaaacaaaaccaaaaacgtgacaattataacaaaattgagaaagtatcaagaaatttacatggttgtaaaggtacattttacttaaagaattacaatatcaactctaaatagatgctgagataggtatgtatattataatgccccagagcaaccattaaacacaaacacacacacacacataaaatataaactaattcatgaattaaaaaataatactaaaaatattcaaatacttcaaaaggaggtagaaaaacagggaagagaggaacaaaaaccaaaggagacaaaacaggtaataatttaattaaatataaatgccataaacacctctactaaaaaacaaagattttcagatgggattaaaaaaaatgaaagcacaactatatgctgtcaacaagaaacccatgttaaatataaagatttagacaggttaaattgaaaggatgggaaaagatactgtatgcaaacacttatcaaaagaaagtaggattggctatttattagacaaggtagacttcagaacaaggaatattatcaggaataatgatgggcattatataattataaaaggaagactcagttcactaagaaaatatgactattttagtcttagctaaagtctaggaggctgaggaggatcacttgagcccaggagtttgagggcactctgggcaacatagttagacttccattgcaaagaaaataaacaaataaataaataaaagaaaatgtgactatttaaaataacaaaataatttcaaaaatgtgaaacaaaagctgacagaactgaatgagaaatagataaatccacaattacagttggagatgttaacattcctttctcagtagccagtagaacaagtggtcagaaaatcagtaagaatagagaagacctgaacaatactatcaattaagttgacctacttgacatttatagaatactccactcaacaacagcagaatacacatccttttcaagtgcacacggaacactcagcaacacagaccacatcccggaccataaaacaagccataatacatttttaaaaactgaaatcttaaaaaatatatgggccgggcgtggtggctcatgcctgtaatcccagcactttgggaggctgaggcatgtggatcacctgaggtcaagagttcaagaccagcctggccaacatggtgaaaccctgtctctactaaaaatacaaaaattagctgggtgtggtggcatgtgcctgtaatcccagctacttggggggctgaggcaggagaatcacttgaacccgggaggcagaggttgcagtgagccgagatcatgccattgcactccagcctgggcgacaagagcaaaattccacctcaaaaaaatatatatctatatatctatatatctatatatatatgttatttgatttgatcataatgaaatcaaactaaaaaacaataagagaaagatatgagagccccaaaacattttaaaattaaacaacaagcttttaaataacctgggtcaaagaggaagttgcaaaggaaattaaaaagtaattggtattgaataaaaatgaaaatacaacatataaagatttgtggaatgaagctaaaacagtgctccatttatagcattaagtgaaatttatagcattaagtgcttaaagaatagtctcaaatcaatgttctaaatgagcttctacattaagaaaccataaaaagaagagcaatttaaacccaagactaatataacagcagaaatcaataacattgaaaagagaaaaatcaatgaaaccaaaagctggttctttgataaggtcaataaaattaataattagactgacagggaaggaggaggagaggaggaggagaaggaggatgagaagatgacaatacaaaataccaatatgagggatgaaagaaagaacatcactatagatgctacaggcattaaaaggatagtcaggaaatatttaatgccaataaatttgagtattaaaatgaaatctacaaattccttgaaagacagaagctactaaagtttacttaagaagaaacaggccaggggcggtggtgtatcccagcactttgggaggctgaggcgggcagatcacctgaaatcagaagtttaagaccagcctggctaacatggtgagagcccatgtctactaaaaatacaaaaacattagccgggtgtggtggcacgcacctgtaatcccagctactcaggaggctgagcaggagaatcgcttgaacctgggaggcagaggttgcagtgagctgagattgcaccactgctctccagcctgggcgacagagtgagacgctctctatctcaaaaaaaaaaaaaaaaaaaaaaaaaaaaagaaataggtatttcattggaaggccatgtaacaatgaaaagtttaaaaaaaaaaaaaagaagaagaaatagataactaaaactgaggcaggataggtagcaaaaaaaaaaaaaaaaaaaaaatgaccaggttctctggacacagcaactatggtgaccatacagtcaacaccataagcctcagcattctcattgtaattgagctcattcaagcacagctatcttcagtaggggattttccctgtagggagcaagcacattttgattttacctgtcctccgactgactctttgttcattgtaatagtaaaaaacacatccctgggtagagatgtaagatgctaatgagacagtgacaaatgaacaagcatgtacagctactacagctgtgcacccagaggaccacccagaacatgcttcctggcaacgcctcttcccacctacttaggaaccatcatgtaaggctccctttaaaagagtctccctagtgccagtctttgctgtctcgtccttacaagcagcccactctgaattctctctctctcagggtgtactgtctattctatacctaactttcaaaatattattttccttttgcaataaatcactctatgctgcatctcctttgctgtgtgtctcatgtttaaattctttaaagccaagaagacaagaaccgaggtatcacaacagctgtcaacaaaaccagatagacatcacaagaaaaccacagatcgatatccttcatgaacacagaccccaaaatcctcaccaaaatatcagcaaattgagtccagtaatatataaaaaggaaaatatacaataaccaagtggttcttaccccaaaaaggcaaagctgatgcaatattttaaaatcaagcaatataatttatatcaacagactaacagaagaaaaaccatatgatcatatcaattgatacatgaaacccatttgataaaattcaacacctattcataatgaaattgattggcatactaggaataggagacttaaaaaattttttttcttttcttttcttttttttttgagatggagtcttgctctgtcgcccaggctggagtgcagtggcgcaatctcggctcactgcaagatccgcctaccgggttcatgccattctcctgcctcagcctcccgagtagctgggactacaggcgcacactgccacgcctggctaattttttgtatttttagtagagatggggtttcaccctgtgttagccaggatggtctcgatctcctgaccttgtgatccgcctgcctcggcctcccaaagtgctaggattacaggcgtgagccaccgcgcctggcctcttttctttctttttaacctcagcttctgcgtctgtataaagagactttcttaatccaatgagggcagctataaacagccctattgctagcatcatacttaatgatgagatattgaatgccttccccttaaaatggggaacaaggcaaagatgtcctctctactattcctattcaacatcctactggaggccttggctagcacaataaagcaattaaaaaataaaaagcatacagattgaaaaggaagcaataagaccgtttctatttgtagatatgatgtctatgtagaaaatctcaaggaatctacaaagaaagatacgagtactaataagtgagtttaacaagattgcagtacaagattaatatataaatatcaatgtatttttacaatctagcaatgaacaattagaatttttcttttccaagttgggttttactttgttcccaggctaaagcacagtggtgcaattatggctcacttgcagcctcgaactcctgggctcaagtgatcctctctcacctcagcttcccaagcagctgggattacaggtgcatgccaccacacccagctaattatttatttatttatttattttttgagatgaagtcttgctctgtcacccaggctggagtgcagtagtggtgcgatcttggctcactgcagcctctgcctcccgggttcaagcaattctcctgcttcagcctcccaagtagctgggattacagatgcacaccaccacattggctaatttttgtatttttagtagagatgaggtttcaccatgttgaccaggctggtcttgaactcctgacctcaagtggtctgcctgcctcagccttccaaagtgctgggattacaggtatgagtcaccgcacccaacctaatttttaattttttttttgtttgttttagagacagggtttcagtatgttgcccaggctggtctcaaactcctggcctcaagtgatcctcccatctcagtctctttagttgctaggattataggcgtaagccactgcatctggcagaaattgattttttttaaaaagtatgttgcataacagcaccaaaaacatgaaataaatataattcaaggccgggagcagtggctcatgcctataatcctagcactttgggaggctgagttgggtggataatttgaggtcagaagttccagaccagcttggccaacatggtgaaaccccatctctactaaaaatagcaaaaaaaaaaaaaaaaaaaaaattagtcaggcgtggtggcacacacctgtaatcccagctacctgggaggctgaggcaagagaaacgcttgaacctgggaggcggaggttgtagtgagccaagatcacgccactacactccagtctaggtgacagagcaagactctgtctcaaataataataataataataataattcgaatataaatataaaatatatagtgaatctgtatgctcaaattaaaaacactaaggaaatgtaacaaagaagacctaagtaaatggagagatatgttatgctcaatattgttcagatgtcctatctctccacactgatctatgaattcaactcaatcccaatcaaaaactcagcaggtatttcacagaaatcagtaggatgattctaaggtttatatagaaaggcaaaagaactagaatggccaaacaactttaaaaaacaaggacaaagttggaagactcacactacctgatttcacggcttttataaagctacaatcgtcaagacactgtagtattggtgaaggacagacaaatagatcggtgaaacagcagagaatccagaaataccacatacaagtatatgtggtcaactaacttttcacaaaggtacaaaagcaattcagtggaaaaaggatagccttttcaacaaatggtgctggaataatcagacatccataggcaataattattattatagcagtaataataatagtgaacctaacccacaccttatatcttatataacaatgaactcaaaatggattatatatcaaaatataaaacctaaaattgtaaaacttctaaagcatgtgatgttgggttaggcaaagatttcttggatatactgctaatagcataatccctaaaagaaaaaatgataaaacagacttcatcaaaaacaaagtactaattaaaaaattagcagccgggtgcgttggctcacaacagtaatcatggcactttcggaaaccgaagcaggcggatcacttgaggtcaggagtttaaggccagcctggccaacatggtgaaaccctgtctctaataaaaatacaaaaatgagctaagtgtggtggcgcatgtctgtaatcccagttacttgggaggctgaggcaggaggattgctcgaacccacgagctgcagggtgcaagtaagctgagattgcaccactgcactccagcctgggggaccgagtgagactccattaaaaaaaaaaaaaattagctgagtgtgttggtatgtgccttttgtcccagctacttgggaggctgaggtgggagcccaggaattcaaggctatattgagccatgattgtaccactgcattccatcctggaaggcagaccaagaccctgtcaaaaaaagaaaaaaaaaaaaaagtacttctgctctatacaagacactgttaggagaaaagacaagccacaggctggaagtaaatgtgggcaaaatacaacatatttgagaaaatacttgcatacagaatctaaaaggaactgttgatattcagtagtaagaaaaatcacccagttaaataaacggccaaagatctgacccaatacttcactaaaaaatacatatgggtgccaggcgcggtggctcatgcctgtaatcccagcactttgggaggccgaggtgggcggatcttctggggtcaggagttcaagaccatcctggccaacatggtgaaaccccatctctactaaaaatacaaaaattagctgcgcatggtggcaggtgcctgtagtcccagctactcgggaggctgaggcaggagaatcgcttgaacctggaaggtggtggaggttgcagtgagccgagatcgtgccattgcactccagcctgggcgacaagagcgaaactccatctcaagataaataaataaataaaataaaataaatacatatgggtagcaagtgagcacacgaaaagatactcaaatcattagttgttagtgaaatgtgaattagaaaccacaatgaaacaccactttacacctatcagaatggctaaaaaacctgacaattgcaagtgctggtgaggacctggagcaactggaactcttgtacctcgttgtgatgtaaaatgatccagctctttttggaacagtctggcagtctctcataaagtcaaacatgcacttaccacctgaccccaaaatcccagcagctattcttgtctcttctttcaattcttggatttatttttttcatggtcttagatttgtaatctgaatccttctcctatgttctttggcctaatggtcttagatcagggttttgcaacttcagcactactgaccttgagggtggagagttctttgttgtgggggctgtcctgtgcatttgttgtgggggctgtcctgtgcgttagttgtgggggctgtcctgtgcatttgttgtgggggcgtcctgtgcatttgttgtgggggcgtcctgtgcgttagttgtgggggctgtcctgtgcgttagttgtaggggctgtcctgtgcgttagttgtgggggcgtcctgtgcgttagttgtgggggctgtcctgtgcgttagttgtgggggctgtcctgtgcatttgttgtgggggcgtcctgtgcatttgttgtgggggcgtcctgtgcgttagttgtgggggctgtcctgtgcatttgttgtgggggcgtcctgtgcgttagttgtgggggcgtcctgtgcgttagttgtgggggcgtcctgtgcattataggaagttagcagcatccctggcttctacctgctcaatgccagtagcactgctcccttatttccccagtggtgacaaccaaaatgtttccagatattgccaattggcccccacggaacaaaatagtccccggttgaggatcactgtcttagaagtcctagtaaaatatttaaatcttatttgtgccacttctgcttccatatcaaagggtcgccttggagatgctatataaccctagttcagcatctggctgtggtgtctgccaaaatgcctttcgacagcaccatctcaggcatcatacaatttaaaggcctcacgagcttaaaactgtgctgttgcaagcatgatttcttgattttccaggacagacaattagaagcagcagtttagtaaaggatttctgccaaaggcaccaaaaacacgaagaaacgtcacaccactgaccatggagggcgaaggcaaaggaacagtaaaagtagagtcacatgggaccacttgacaaaggggcacaggacttccatccatcagtatcccccgaggacattcacataccagcactgctctcccgctgagatctactgacaggcaggggcaggggaactgcatgctgctggatgtcagaaaacctgcattctagtccagctacgtgtcttcagaaaagttactgaactcgttcgagttcctcattttctcatcaggaaaagccatctggctttcaactaaaatttctttagggatccttcgagggttacaattctgtggtgttacagagatccaaactatttaatagctaaattctgtttattgaactttgcccgggaaggcaggaaaacagagttctggaaagatttccttcaagactggttatatttgttttcagatttcagtgatctaagaagttacaactgtcaagccagtttctcatggatgctagagattacttggtatataggaactgagtagcagaccatcaagtcccttcttacagagttgtgagaatgtatccacattaattgtatatgcatatatacacatacacaggaagatgcagtaaattacttgaaattgacatgaagaataaataggtccctgttcaactaccttgctaataattatttttcctatatgtgtatttccttattgaaaagtgattagcatgataaatatcccacaccaattgctgtaatactgaagagggtcccaggaggcttctcaaatcttattggttttttttttttggtgtgtgtttcccacgcctgaatttaaattatgacatgctctctcacactgattggatcgtagggaaatggacagggtacacacttccttgctctgggctggttaaaggaaagtgcctgttgcatatgcgtatggtctccctctccagcatccacgtgtgaattactctgttgcagcactggaatggctgatgcatctgtaggtagttcagaggctgctcacctggtggggggggtctcgtcccttctaattctgtccatcacccctgctgctgcatcctgaccactatgtcaagggcaataggccagacctcccattcctacttggaattcctacttcctcacccagcaccttgcagccctcacagaggtgacctttggaatcagagaaggagttcttaggagtgtggagtaggcaatggcaagacagtgccatctgggatatctggggttgccatggagcaaagcctctcactggcctcctgccatcgctgtgttacataagtaaactgcagaatcaaagcaagaaagtttgcctacacaaaagaccagtaactgggacaccatcttactaaacggtgtgagccctgtcctcaaaaagccaaaagagtctgggtgcaatggctcacgcctataatcccaacagtttgggaggccgaggcaggaggatcacttgaggccaggaattcaagaccagcctgggcaagtaagtgagacccctattcctacaaaaatttttttaaaaaattagcagggtcccaaatactcaggaggctggagcaggaggatcacttgagcccaggagttcaaggctgcagtgacccgtgactgtgccactgcattccagcctcatcattaaaaaaaaaaaaaaaaaaaaaaaaaaaaaagccaaaagagcaaagaagttaagctctttctttccatgaaaacttcttgaagaaaaacacccatagaaaaagatatttgaaaaaactgaatgtgagcggaaccccaggtgccagatcccacgctctgcctcgttcagaggcaggctcgagagccttcctggaaccctgctggtgaggaagtccaactttgttaagggcaagttctgggaaagggtgaggagatctgtggcttcccccatcccctcctaaactaggcaacttcctctgtcgcctcctctctctcccactcttataagtccacacacacacacacacacacacacacacacacggtgtgcacatgtgacagggcgcagagccaaggagggaatgggcatctacccagctcttattccaagcagatactgggtctaaccctgaatgtacttctcatttaatgctaaaacatctatgtaaggacaggatgttaacaggattattaaaatagcacactcctgcctgtggcccactgccctacgtggtctctgcctacctgtctgattctaccttgtgccaatctcccctttgcttcctaagctcctgctacatggatggttttccagctctttgaacactccaagctctttctcatacctcaggacctctgcaggtgctgtcccaccctcctggaaggttcttaggcctcccagcatccttctgtactcagcttacatgtcatacactgagaggctttcccagacccatctaaagcagatctctccagatctctagtcagccagtctatatgcttccctagcatgttggcaactgttttatttgttcaatattggactttttgtttgtttgtctggcttctctggaaattaacagatccggaaattaatagaatatatacatatatttatttatttatttatttatttatttttgagatggagttttgctcttgttgcccaggctggactgcaatggcatgatctcggctcactgcaacctccgtctcctgggttcgagcagttctcctgctcagcctcccgagtagctgggattaaggcacctgtgatcatgcctgactaatttttttgtgtttttagcagagatggggtttcaccatgttggccaggctggtttcgaactcctgacctcaagtgatccgcccgcctgggcctcccaaagtgctgggattacaagtgtgagccatggcacccggctgcattaaaattttttttatcttgatgactgagtttttgggtcctctgaaatgtgcaggtatacctcattttttcatgcttcactttattacactttgcagatactgtcatttttacaaattgaaggtttgtggcaactctgtgtcgagcaagtctatcagtgtcatttttccaaaagcatgtgctcacttcctgtctgttcacattttggtaattctcgcaatatttcacattttttcattattattatctctattatgacgatctgtgatgagtgagctctgatgttactcctgtaattgttatagggtgccacgagcccatataagacagcaaacttaatcaataagtgttgaatgtgatctgactgctccacagactggcctttcccctgtctcttcccctctcctcaggcctccctattctctgagacacaacgatattgatattaggccaattaatatccctacaatggcctctaagtgttcacgtgaaagcaggagttgcgtgtctctcactttaaatcaaaagctagaaatgatgaagcttagtgaggaaggcatggagaaaacctactgggtcaaaaggaaggcctcctacaccagacggttagccaagttgtgaatgcaaagaaaaagttcttgaaagataaaagtgctactccaatgaacacgaatgatgagaaagcaaaacagcctatgctgagataaactttgagtggtctgggtagaagatcaaaccagctataacactcccttatgccaaagcctgatccagggcaaggccctaaatctcttcaattctgtgaaggctgagagaggtgaggaagctgaggaagaaaggctggaagctagcagaggttggttcatgatgttcaagaaaagatgccatctccataacgtgaaagtgcaaggtgcagcagcaagtgctgacggagaagctgcagtgagtaatcctgaagacctagctaagatcattgatgaaagtggctgcactaaacaatggattttcaatgtagatgaaacagctttctgttggtagaaaatgccatctaggactctcataactacagagaagtcaatgcctggcttcaaagcttcaaaggacaggctgactctcttgttagggtttcatgctgatggtgacttgaagttgaagccaatgctcatttaccattttgaaaatcctagggcccttaagaatcatgctaagctgggcatggtggctcatgcctataacctcagtactttgagaggcctaggcgggcagatcatgaggttaggagtttgagaccagcctggccaatatggtgaaaccccatctctaccaaaaatacaaaaattagccaagcgtggtggtgcgtgcctgtagtcccagctactcgggaggctgaggcagaagaatcgcttgaactcgggaggcagaggttgcagtgagccgagattgtgccactgcactccagcctgggtgacagactgagactccatctccaaaaaaaaaaaaaaaaaaaaaatcaggctaaatctactctgcttgtgctctaaaaatgaagccacaaagcccaggtgacagcacatctgtgtacagcatggtttactgaatattgactggctttattgcagtattcgctttattgcggtggtatggaaccaaacccacagtatctccgaggtatatctgtgcctaaggtgactgcctcaactgctcagctggccaggaaccctggctcccagaggcagcttcccaaggcctctgggatgcccccgaatgtcatgcccaccatggtaaagtctggaatctgggctctgaggtcctctgaggaccaccctcagaggctgctcatccactgctaccagttgggagactgggaacagcctggactggcgttcctgccctgggggcttccagcctgcttgtctccttcctccacagagggaggcatgggctgttctttgacactcagatgcctctctccagagcagctcgagagatgtgcctcaggaccacatacctccttccatcctccccttccccttccaacatggggaggaggaggaggcagagagggtggagcatagagggcatgttgtatgtgcctacccacccagcacccactcgcccttctgggaacagcatctcaaattcccccggaccaccagcccttccttcttccccgctctttctcggcaggggttgctaagctgggaggatgtaaaggaagctgcctgaggccacagggtgaggcctgccctgagccatagcaacacagaggaaagcagagttcagaagatggagaagtggctcctcatggcgcagcttgggcacacagatccaggctcacctgctcccgagctcttcagccgtacccctctgctgccaaggtgaggttgaggccacgatcacttgcaaccaagaaggcccctaatactccgagatgcccctgcccccactgagcacatactcacctctttcttcatcagtttgagctgctcttggaacctggtgtagtcccgatcctgctccaggcggatccgcctggcctcctcccggcggcgcacggcatggtcttgctccatcttctccacttgctgcttttgctgacgctccaggttctctaattccgtgtcaaagaacttcttcttggcctgaaaggagcagaaattctgagaaacttagcgaagtcactttatacctgggagggacatgggaagtggaatggggagaactcagagcttgtgatcagacctaagcttgaatcccagctctactaccccgttgctgtgtgacctggggcaagttacttagcctgagtctccatttcctcatctgcaaaagggagaccagaccatgtgttgttgcacggtgctcaatacaggttatttcccctctggagatcctcctgtgggactcaggatcgctgtgaccttcacggggttctgtgttaacaagtcactgcctaacaagatcgggaagcccccaggaattgggcaattgttgtgaattactctccactacccaatcattcccactatgtagcttccactgagagaacacctggaggcaagaagccctgcagggtcccatcttttctcgcactcacgttgatttcctgttcaaaacgtttatgcatttgctccagctgcagctcatgcttgttactcagctgggtctggttccgatgctcttctttctggagcagccgaagctctcggagttcctggcgcctgaaaggttaaaggatacagatatttcacagtaagaaactggcttcagagatcacaatatttgcaacttggaacactgaaggttggatcatggagcaaaatcacacaagtctggggcacaggcatgactagaactcaggcttcatttgatatttattgacagacaaaaccttaataatcttaataaataaagagtgcttacaaatcaataaaaaggaagattatcctaaccaaaaaaagtggcaaagaacatgaacagacatgaagcaaaagataaaaagaaattttagaatcacctatatagatataaaatacaaatgaaaaagaaactataatttcttgatgtagaaaacataatgcagaaaatttgatgtagaaactacattttcatgatgtagaaaatttgatggtagaaactggtacatttctggaggacaatttggtaataagcttatgttttttgacatagtagtttccacttctggatactgattttaaagaaatatttatagatgcacaaaaccactgaataagaatattcagctgggtgtggtggctcacacctgtaattccagcactttgggaggccaaagcagaagaatcacctgaggtcaggagtttgagaccagcctggccaacatggcaaaaccccatctctactaaaaatacaaaaattagctggacatggtggcacacgcctgtactcccagctactcaggaggctgaggcaggagaatcgcttgaacctgggaggtggaggttccagtgggccgagatgacgccattgcactccagcctggactacaagagcgaaactccgtctcaacaacacaaaaaaaagaaaaaaaaaaaaaaaaagaataatcagtcatttaaaatgaatgttatttagtaaaaaattggaagcaaatgtccatcaatataggtctatgtaaataaagtatattgatatgatggaattctatacaaccttaaaaaaatcaagttttagaaaatgtttaattacataaggaaacatattaaaaataataattcagctgggcacagtggctcatacctgtaatcccagcactttgggaggccgaggagggtggatcacctgaggtcgggggttcaagaccagcctgaccaacatggagaaccccatctctactaaaaatacaaaattagctgggtgtggtggtgcatgcctgtaatcccagctacttaagaggctgaggcaagagaatcgcttgaatccgggaggcggaggttgcagtgagccgagatagcgccactgcactcccgcctgggcaacaagggcaaaattctgtctcaaaataataataataataataataataatatttatgaacagatatggagtaatctctaggtaaaaaaaagcaagatattaaagaataggtctgttatgccaccttatctgggagaaaaaggacaacaatgtctctgtacacacatatatgtattgtttacttttctagtatctctggaaggattaaaccataaaacactaacacaggaaagggaactggatttctggtaggaaaatgaagagggaaatttttcactgtttatcttctttctttttttttttaatttcgaaccatggaccttatacaggtagagtatcctttactgaaaaagcttgggaccagaagtgttttgggtgtcagatttttttagattgtagaatattatacttactgaacgagcatccctaatctgaaaatctgaagtccgaaatgttccagtgagaatttgatgtcagtgctcaaaaagttgcagattttggagcattttggattttggattttttgatttgggatgtttaacctttattatctgctaaaaaatatataataaaaatttgacctaggccatgcgtggtggcccatgcctataatcccagtactttgggaggccgagttgggaggatcacttgagctcaggagttcaagaccagcctgggccacatagcgagacctcatctctgccaaaaatacaaaaattagccgggcatggtggtgcatgtgtgtggtcccagctacttaaaaggctgaggccggaagattgcttgagcccaggaggtccaggctgcagtgagccgtgactatgccgcttgcactccagcctgggcaacagagcaagatcctgtgttaaaaaaagaaaaaaaaattgacctaagcaacatgccctaattatatatatatatttatgttgtcagtgtatgtgtgtactcacagaaaaaatatcggagggataagccccaagtgttaaccacgtttcttaatgagcaaatccattaaaaattgctatgtaggccgggcgcggtggctcacacctgtaatcccagcactttggggggctgaggctggcggatcacttgaggtcaggagttcaaaaccagcctggccaacatggtgaaaccccatctctactaaaaatacaaaaattagccaggtatggtggtgcacgtctgtaatcccagctacttgggaggctgaggcaggagaatggcgtgaacctgggaggcagaggttgtagtgagccgagatcacaccactgcactccagcctgggcgacagagtgagactccatttcaaaaaaaaaaaaaagagagagaaaattgctacatatcattcatataatcggaaaaaaagaaaaaaccaaactactacagaaagaacctaggcctcctgactgaactggaggctcctggcggcctctcagggttggggtccgtgaggcctgtgtcctagtccagtgcggcaccatgctgattcccatgaggccacgctctgaccccagtggccttcctcatgactcggaggggccataactgctcacagaactgccccccaagagcagcacaaggaggggttgggcagtgcagcgaggccaagagcattctctggggtcgcagcgcccctgtgtgaatctaggctcagtcagctttccagctgggtgcccgctcggggagtcacttatccttgtgggactcactccctcctctgcaaaatgaggctaacaatctttacctgttgggtcctttgaaggataaatgagatgacacaggtaaagtgcccacgtggcacatgaccagcactctgtaaatggcaactggtcgaattctaccaaggaagaagaggcaatggctgccctgcctctgggaaaagccagaggcgctttctacagccacagagggaagactgtctgagcctctgcttttctggaaagtgggaagagaggaggcaggttttgagagtgttaacgaggaaatggaaatcctgactcaagagaaactaaggtttagagaagaactgacaaaaagcctaaaaggagtacagaaagaaggcaggcagccagctctagcactccctggtccacctgtgctctcagaaggaaaggcaagcaaagagaaggctgaggctcaagagcgagggaacggcagaagccgttttagggaaggacaggaggaactctgcccggaagcctcatcagtctgagaatgtgataaatgctcagccacatggttcagatgcctaggtgtgacccaattctccaaaaacgccaggggtcaggtatgaccaggggcctgggccagcaggggatgatcagggccttccacacccctgtggtctggtggcctggcctagtttacaggcgctcagacctccagaccacggcaggcaagcgagaaaatcccggttcctgccgagcacctcttcacctcctcgaggtctccccttttgaccctgagtagcacacagctgctctgctcaggaggagggtggggaaccacagccagggccagagagcactgcttctccatggggtgtggccaatctagaatttatccctgagaacttcaattgcccagaggggaggtgatggaaacccagctcttgaggttgaaactcagagtccagggtgcctctcaggtgaccattagaacagaaggtggtttcatctgccaaagcaacctgtgccctagcctcccgacccacacagatgacaccagtgtgtgtgtgtgtgtgtgtgtgtgtgtgtgtgtgtgtgtgtgtgtggtgtatgcagatacactagtgaaaagtctgtttttcctccctctgtctcctagagggagaagagatccacaacatctaaaactacttttatttggttttggcttatttatttatttatttatttatttatttacttttgagacagaatctcaccctgtcgcccaggctggagtgtagtgacacaatctcggctcactgcaacctccgcctcctgggttcaagtgattctcctgtctcagcctcccgagtagctgggattacagacgccggccaccacagctggctaatttttgtagttttagtagagaccaggttttgccatgttggccaggcttttctcgaactcctgacctcaggtgatccactcgcctaggcctcccaaagtgctgggattacaggtgtgagccactacacctggcctatgctttcattttttacaatttattttttaaatttatttacttatttattttttttttttttttgagacggagtctcgctctgtcgcccaggccggactgcggactgcagtggcgcaatctcggctcactgcaagctccgcctcccgggttcacgccattctcctgcctcagcctcccgagtagctgggactacaggcgcccgccaccgcgcccggctaattttttgtatttttagtagagacggggtttcaccttgttagccaggatggtctcgatctcctgacctcatgatccacccgcctcggcctcccaaagtgctgggattacaggcgtgagccaccgcgcccggccttaaatttatttttgagagatagagtcttgctctgttacccaggctggagtgcggtggcatgaacgcagctcactgcagccttgacctcctatgctcaagtgatcctcccacttcagcctcccgagtagctgggactacaggtatgtgcccagctaattttaaaatttttttgtagagacactaggttgcccagatggtctcgaactcctgggctcaagtgatcctctcacttcagcctcccaaagtgctgaaattacaggtgtgtgctgctgtgcccagctgcatggttaaacgtttaaaaaaatatgagtattaggccgggcgcggtggctcacatctgtaattccagcactttgggaggccgaggtgggcggatcacaaggtcaggagtttgagaccagcctggccaatacggtgaaaccccgtgtgtactaaaaatacaaaaattagccgggcatggtggcgggcacctgtagtcccagctactcaggaggctgaggcaagagaatcgcttgaacccgggaggcagaagttgcactgaaccaagatagcaccactgcactccagcctgagcgacagagcgagactccatctcaaaaaataaataaatacataaaattaaaaaaattttaattcacatgtataaaaatatgtgattaatgttctagaaattttctctacactaaccatgaatttaccctgcaaaggcctggcccccaggggactccgtggctccatggcctccctaagtgttaagctcccccaacccctgccagctacatggtccagtgaaacctgaaggaattctcacacacacagacccagttagaatctcagctttacccctgcctaactggaagacccagggcaagtgacttacttgcccagaaatagtgtttcctcatttgtttaaaaaatgtggaaatagggtctcccgaaggagggctgtaagtgggggatgaacaactgaaaagtataaagctgatcctagcaaacagctttgcctcacaccttcctccctgttccagtcctttaccaactcactggttttgcctccaaaatgtaggtcaaatctgaccatgtttttccctcttcccggccactgccccagcctgagcccagagcctgcccatcctagtcaagatctccctctctccctccaccagtcccttaaacaagctgagtagttatccctcagggcctcagcaactgcaatttcccctgggctcccccagctctcctccccttatcctttaggcctggctcaggggcttcccttggagcagcctcccctactccaagcactcactatcatgtcacctgttacttgtttcatggcatgtaccacaatcagggattatcttgtgtactgtatgttggcccattaggtgtaagttctacaagggcaatggccttatctatttgggtcaccaccttgtctccaacctggtgggttggtggatacatggatggatggatggatggatggatggatggatggatggatggatggatggatggttaggtagataggtggaaggctgaatgggtagatgagtgggtgggtggatggatgactggatggatgattgggtggacagacggaaaggtagatagggagtaggtaaatagatagatgggtagataaatggatagaaggataaaatggacggatgggtgattgggtggatggatagataaacagatggataattcggcagatgaagggaaggatggaatggtgagtgagtagaaggatgggtggattgttaggtggatagatggaaggtgagtgagtgggtagatgaatcagtggatgagtggatgaatggatggatgaatggatgggtgaatgactgggtggatagatggataggcagacaggtgagtaggtggattgatgcgtggataaatgaatggaaggatggatgattaagtagataggtagatgaatgggtggacagttggatggatggatggaaagttgagtgggtagataggtggatgggtggaggggtgagtgggtggaaggatgggtagacggatgggtggatagatgaataggtagataggtgagtaggtggatagatgggtgaataaatgaatggatgagtggatagataggtgaacggttgggtagatgggggagtgcaggatcgcaggcaaaatgagtttccttttgcctccttgattcccccacttcatgctgtagacagacagccctctcaccaaaggaccaatgcccactcctcttaccatagccccaccctgttaccaccattggtggcccttcccaggcttgcctgagaaatctcatctcctcatccttcttctcatcttcgctgatgatcttggaggtggtgatgctcacctccacaccatccaccacaaatttgcgtgtccgcttgagggtttttttgtacagtttcgggtcctggccagggaaaaccattagacaagtctcagcatttcagctaaggacccatggctgtcgcagcaggtgaggccacagctctgctgggcccacagcttcagaaccacccccagagagatgtggccatccatcgtccctcttgcctcaacttaacctaggagctgggggttctgagcttattcccttgctcttccctgatctcagccttcagaaactgtgctgaggcctcccctaccttgctgccagcacctctcatgcatccaggacatggtgtcagaaagagctgcgttcttgccaggcacggtggcttacgcttgtaatcccagcactttgggaggccgaggcaggcggatcacaaggtcaggagttcgagaccagcctggccaacacagtgaaaccctgtctctactaaaaatacaaaaagtagccaggcatggtggcaggtgcctgtaatcacagctacttgggaggctgaggcaggagaatcacttgaacccaggaggcggagtttgcagagagcttagatcacgccactgcactccagcctgggccatacagctagactccgtctctaaaaaaaaaaaaaaaaaaaaaaaaaaaaagagctgcgttctaaccctcactgcaccacttacttgctctgtgtctctgggccagcctcttgtcctgtctgagcctcagcttcctcacctgttcagggaggatagtcacactacttgcctcccagggtggttgtgaagattcagtgagagaacacatggcaggcacacagagcagtgcccactcccggcctgtgttccatgcttagcatttctttctgacagttattactgcagaccacacacaatcctcgcgcatggtgccaaaatccaaaggagcccgaaaaccaaaggctgtttttataactggtttggtagccaaagctgacctggcctgaactccccacctgctaggagtcaccatgagattacgcataatcgtcatcttttcctgtgagtaatcgcacacgccacaagtgattgtgcaggtgccacctgggatcctggaggtgtttgtgtgtcataatacgtggtaccctctggaagttctcagctctgattctgaaggtgtccccataaccctcccgctctgcccactgcctctggcctcttggttggtttcaaagcctctttttttttttttttttgagatggagtctcgctctgttgcccaggctggagtgcagtggcgcagtctcagctcaccacaacctctgcctcccggattcaagtgattctcctgccttagcctcctgagtggctgggattacaggcatgcgccaccacgcccggctaattttttaatttttttaagtagagacagggtttcaccatgttggtaaggctggtctcgaactcctgacctcgtgatccacccgccttggcctcccaaagtgctgggattacaggtgtgagccacggcgcccggcccaaagactctttttggtgtagcccagccctgccttcctaacacggggcctcccagcccctgaaagaggagtgaggagccagcgtggcaggtctcttgaccccttgaaatctatgctgagctccactcctgctgagtcgagaggggcagactgtttttgctccctgaggtctgggcccctgtctcctgcccatggcacctcgcccaggggctctggacagcatcagcatggacccagcatgcccgactctcatctctctacggtgaccagctcacatgtgccaggacccagtcaggatgggtcaggccagcagtgagaagtagaggccggcaggagtgagagtggaggggaagaaagggcacccacagccacagccctctgctgagaactgctcctggccagggggcctccatccctgaaggaacaggctcctagtcacgccagggggtgccggcacagcgggggactctcatgagaacggcctgaggtccctgacgcaatgcagtcaaccagaaacattctccacagccttgagaagagcaggggagcccctgctttaggtgggtctgtctcattaaaaaaacaaataaaaacacctttttttcactcagtgtcttcaggaagagaagtggcaggatgccggtcctaaggaagacgctgctcacaggtaacagctgctgtgcatgcttgtcccggtggcctgttggaactgtgcttcccttccctgcctaaagctgattggccgttgcggctcctgtcactcccctttgcttagcaaatatgttcgagtctctactgcgtgtttttcaccaagtacatttgggaaggaaaaacaaaatcatacagtatttcctctaaaatgagctttgggtagagggtcaggtgacccatggtgagtttagtaacaccccgggatttatcggggaggccaggaaaggagtcagccccttccagctccctaagaaggaggccatggctcccactgggaaggtttagagtttggagcctggggtctgtccatcttcccactcctacctggccctgggctggctcctcacttctctgagcctccatctgcttatctgtaaagtgagaggatgaaggagcctgtctgttctttttaaagcactttgtacagggttcgcctcaagcccaggcctctagtgcggtggctatcgtcattcgcaacactgcccacctccagaaaggccccggaggcggggaagatggctttgagctgtttcctttagttggatttaccagttatcagctgggtctcgtggctgacctctggatgacagaacttcatttgtagctaaggcctaagagttctctctcccaaattttaccagggccttttaccaagctttgaaatttaaacccaaaccaactgctttacattcctaaatcccatattgaacccagatattttggagattaaactatgagtcaaacccaaaaccccctaatgaaccacttaaaatgcaaggaagcccctaaatgcttttgaaaccaaaatggagccacagaacatcctgcaatggtcttgctgcaagcccgtggtggcagaggcggtgttaccttgatggacagagagcccatctctttgttcagcgacaggtcagtggagagattggtaccatagtccatgctctcagaggtgcagaggctgctgcagtccgagtccctcttggaaggccctggagctgcctgggcaggtggctccaggctgccattggccagcttctccccacccaaggtctccagggcgctgctgttgggccggctctggctggccttttgagatctgttggctgctgggctgaggtccccaccctgctcagcaacttgcttctcctgggctacctgaattctggcatccattgacacgggtcgggacttccgcaggggcacaggcactgccaggccgttctcatttccaggggccacgactgggggactggtggtttggagggatctgtccccagagggctggctgcagggctcattcacactgtcctgagactggctgggtgccagcggggtggaaggtgactcctcgagaggcttgtcagcattgaggcttggcggactcacctcagaggagttctgagtatggttctccagggtctagaaaaatatatatatatatattaaaggccatgctgctgtatgttcaaggcaagagtcagagatgcagtggagaaagtcagacaccctcaagatgaagtgggccagcgccaagaaaggagagcagatatctccctagccagtcttcagcactccctattgcctaaccgtaatacaattactacttattttgaggcatggcaatctcctcactatctctaatctcagctgaatgtaatagctgttattcctgctaggaggcagctgtggccagctggccagctcatggcccacagggaggggtcagtggccgctccattccagccaattgtgacaatgtgggaaaatggctcccctgtggccaaaccttcccagttttttaattttaattttttattttatttatttatctatttttttgagacagggtcttgctctgtcacccaggctggagtgtagtggtgccatcttggctcaatgcaacctccacctcctgggttcccacctgggagtggtcctcccacctcagcctcccgaggagcctcccgagtagctgggactacaggtgcatgccaccacacccagctaatttttgcattttttagtagggacagggtttcagtatgtcacccaggctggtctcaaactcctggactcaagtgatctgcccgcctcggcctcccaaagtgctgggattagaggtgtgtgccaccgcacccagccaaaccttccaattttttaagacaagtttgaaatctaggtttttaatggacatctcttaatttttaggtggcaactaactcatattttttaaaaaatcatataaaggccaagccaagcctgtctggggactggattcagcccttgtggccactaagttttcagcttcatttttgttttttagagtctttgttgggtggaaagtactggaaatgttgctatgctaaggtgaaacagaacattcttcctgtgtataaaacataaacatccaacttggtgaatagagtgagtatccatgtagccactttccaggtcaggaggggacattgctttgccccagagggccatcccctgccgccccgtccttctcagtggcaatgctctcccacctcttgacatagtcactgtcctatggtctctaagtgctacagatgagctgtgcctgcttataaacgtggtatgaatggatttatactataagtattcctttgggtcttgccagccaccggtttttaacctcagctatggcagctggtggaagcaactccaatctaccttctagtcaacacccagagtgatggctcaaaaacgcagatctgattctgtcacctccaccccaatacccagtccctgcctgaaacccttcggggctcccaatacccacaggacaaagatcagcctcctgcatgcagacaatgaggccaggtgtgagcgctttctacctcctcctggagccaggccccactgaggttctcctactccaaatccacccctggccctgccatctatcggctcagccagccacttcactgtatcgatctcagttttcctgtctgtaagctggagcttggttaccctgtgtcagagctgtagagggcccggcagccaccaggggctccatgcatggcgggggtggttgtgatgattccgcttgccctgcccttcgggctttccttcttcaccctggtgagggtctgcgccagcctcaggctccacccaggactgaattaaatttgaggaagctgcagtgccgtccacagcacaaggatgtgggccagctccatcccctgatgggtaagtccagcccctgcttctctaggcacagggagccaccgggatggccaccctatccctgggaagaggcctccccaagtaaggccagggattacggagcaacagcttgggccagaatccagcccacagacatgttttccttggctcacagggtttttacaaatttaaattagctttaatttcaatctaaatccagcaagcactgaagctgcaaaagagttccaaatgtgcccagacatgggtccccttggcactgagggcagctagaggggggccagggtgttgcctgtggccatatgcagcctcccatatttatcccaaaatgagctaaaaacagtctcatttggtatgtgagctgtgacaggaacaaaggatgggaagccatgaatcagttaccaacttttaaaaattggaagatttcatgtgaaaatctagatctctggtatctcctgaaaactcacaggatcgggatctggccaacaccccctgctgcctcaccccggcccacatgccatcttacgttacctgcagcgtgggagtctgcaacctctgagctggcaataaattgcctgagccagagtcctggccttccctgcccctcccacaccagcagggccagctgagatcctgtcctcccagcccccgctaagccccactctccctggccttacggaggcggcatccacggcgtcctcctcttccccctcatcccggccgtcttcgatctcttccatcacctcggccttggcctcagccaccagctcccgcagagccttgttactggtgatgctgctgacgaagggatgctgagggggcaagatgcacccagattagaaccactctggggtcacggtggggtggaagaggctgggggagctcacccccggggcagaaaaggccagcctcattcctgagcaaaatgtgcacatgaacttggagacccagagacagcctggaaagtcccaagtgtgttggaaagagggcagatcccagctgtgtctctcagcggctgtgtgaccttgagcatgtcacttaacctctctgagccacaggctcctcatctctcaagtggacacgttaacaatgaacccacagggaggtcatgcggattaaatgagatcatgcacttgaaaatgcttagcccaaagtaggggctcaagccgtgtttgcaagggagggtgtctattttcctttttaaaaggttttaatatatagttttataaaatatgctacatacattttgttgaggaataacattcctacagcaaagttcacaggttgtaaagctcaatgacttttttgagacagagtttcactcttgttgcccaggctggaaggcagttgcgcaatcttggctcactgcaacctccacctaccaggttcaagggattctcctgcctcagcctcccaagtagctgggattacaggcatgtgccaccacgccaggctaattttttatatttttagtagagacggggtttcaccatgttggccaggctggtctcaaactcctgaccttaagtgatccacccgcctcagcctcccaaagtgctgggattacaggcgtgagccactgtgcccagcctcaatgactttttacatatatatgcacgcaccgtaactgccacccagctcaagatacagaacatttccatcaccggggaaggctcccgtctcccttggcaggcaaccccactcccacgccgccagcctcgggagcctgctcctcagcttcctagaaacagagcatcgtgtgtgcagtctttcgcgttggcttcctttactcagcgtcatgactgtgagattcacctacattgtcgcctatttcagtaaactgttcctgttttatttctgtgcagggtctcactgtatgactacggcacagtttgtttattcatcctgctgctgctggacatctgggctgtttcccatttttggcaactatgaataaagctgcaagagacattctcgtatatgtctttgggtggacatatgtgtttggttttaagaaaggaaatacaagatcttgaggcagagtggtgtatgttctattctaggtttttatacaaatgtcagagtcttatttaaaagtgaatgttcttttacggaccttgcaaaacgccaaagcaaaaggtctcagcgatattaagtcagtgtgaggtatcctgagtgagggcacccgggtatagccagggatgtgggattcctcaacccaccacgctcaccgaaggccactgggaaaggaatgatggggtggggtgggaggcatcatgaagctagaatttgctcatttacaatatacaggaaggctctgatgaaattcactgtttttactctcagacaatttatccggggaggaagtgtcaacaagattgctggggaagtatttaaacgactaaaaaacaaatttctagcacctggaaaacacattcagaacgtatatgttcatcacaaatcattcttatctgtttgttcatttaaaacagttcatttggccgggcgcggtggctcaaatgataaacaagagaattccagatcttgtatagctgagggtggtggagactaaagtctgcaggcagaggggcctcattcaaggtcaaattcaagctgagacccaagggaaagatctgggcacagagaattccaggcagagggagcagctggtacaaagaaggccctgagactggactgagcttgttgggcggcaggagccatgagacgggcaggatggtgggacacacaggatgcagaggaaggatgggccgtgtgtgcaggtgagccacagagactgtcctcacaagccaccaacaggctgcagtgcagcagtgatattcactactaccctttagagatgtcattctggctgctctgtacttttaagaggtcttgagtggggcgttaagggtttactaatcataggaggcaaagtagcatgcagttaagagtgctggctgtagactctagaaccaaggcacctggtaaaatccagcttccaccaacttgggcaagtcacttaaccctgagtctcagtttgctcatctatatattaggaacagctgttataagcattatggtaaatgctcagatatggcagccatcatcatcatcatcaccaccaccaccatcatcaccttcaccaccatcaccaccaccatcaccaccatcattaccattaccatcatcaccaccaccaccatcatcaccttcaccaccatcaccaccatcattaccatcaccaccatcattaccattaccatcatcatcatcaccaccatcaccttcaccaccatcaccaccatcattaccatcaccatcattatcaacatcatcatcacgaccattaccatcaccaccatcactatcaccatcattaccaccatcatccccatcaccatcaccattacacccatcaccactatcatcaccatcaccatgaccattaccatcaccaccatcacccccgtcagcagcaggagcagcagcacaatcagaaaagcccgttatggcccggcacagtggctcacatctgtaatcccagcactttgggaggccaaggcggtggatcacctgaggtcaggagttcaagatcagcctggccaacatggtgaaaccctgtctctactaaaaataacaaaaattagctgggcatggtggtgcatgcctgtaatcccagctactcaggaggctgaggcaggagaatcacttgaacccgggaggcagaggttacagtgaaccaagatcatgccaatgcacttcagcctgggtgacaaagggagactctgtctcaaaaacaataacagaaaaagaaaagcctgttttgcattcctagccactcctattccctcccacatgcccccagagcacagctttttggaaccaaaggtgagaaccaagatcccaaaggtgagaaccaagatcccaaaggtgagaaccaagatcccaaaggttcctaagctccacactgcgcaatctaacacaagtgaacttgagcgaaacgccacaggacgcttcactgcagtggctgaagcagacgcggcagaaataaataaacacaggcaggggcttctggaaacaccaggttttcatcggggcaccccatgtattgatcaaatcagtggcttttcagcacggccaggaactctgctttcttgaggcagaatcatctgcccactgcctccctgaccaccccagcgtccttaggaggaggaaggagggccatggggaagaaagtctgtgatgggtgggtgaggagggcagctctgccaggcaccagagcaagcaaggctggcacacagggccacccgtcctatggctgattaggcccaaacactgttttacagactgctctgggacacaaaacacagaccacctccaccacggcatcagctcctctgccgccagagatgtgtttagaggcccattagagagataacgccctggctatgctgcaagggagaatcctagcctgcaccaggtaggctggtctgggcacacgtgtccccagtggaaggctagatcacagaggaacttgacctcccagtccttccccccagtaagaggcaccggctggctgttcagtgccatctttgctgaaaaaggcaaccggcagctgctctctagccagggcctcccctgccatctaaacagatgtcctttccaagaactcaagcctacttttcctctatgtgcttagaaaccatcagccagaggggtcctatactccaagatgggctttaaaaaacgccaaaaaggccaggcatggtggctcacacctgtaatcccagcactttgggagcctgaggcaggtgcatcacttgaggtcaggagttcgagaccaccctggccaacatggcgaaatcccatctctactgaaaatacaagaattagccgggtgtggtggcaggcgtctgtaatcccagctactcgggaggctgaagcaagagaatcgcttgaacccaggaggcggagattgcagtgaaccgagatcaggccactgtactccagcctgggcaacacgacgagactccatttcaaaaaaaataaaaataagaataaaaacacctaataatgctcgcagttttcaggcgctggcatctctttcaatcctctctcccttctggtcttcttccctccctctctctttcattcattcggagaggcagcttaccagagaggtcaagagcacagactcttgaacccgaggaccaggatcagaacccagctctgtggcctacaggctgtgtgactttgtgccagctacttcactgctgtgtgcctccgttttaccatctgctcaacagagagctgaacagcatctacttcagagcgttggtatgaggattaaattaggtgacatttgctaagtatttataatcgtacctggcatgaacaaagggttatgtaacagtttgttaggtaaaaataagtcaattttggccaggcgtggtggctcacgcctgtaatcccagcactttgggaggctgaggcaagcagatctccccaggtcaggagttcaagaccagcctggccaacatggtgaaaccccacctctactaaaaacacaaaaattacccaggcgtggtggtgcatgcctgtaatcccaactacttgggaagccgagacaggagaatcacttgaacccagggggtggaggctgcggtaagccaagatagctccactgcacttcagcctggcaacagagcgagactccgtctccaaaaaaaaaaaaaaaaaagtcaatttatttagcaaatatttgctgagggctctctatataccaggcactgttcctgggacctatcagcgaacaaaacaaagacgctgtcctcagggcactgacatgccgggcagggagcttgacaacaaacctaataagcaggcaagttatatcctgagtgccatgtgccatggaagaaggaagaagtagggcagggaaaggggactgggaatgtggggagtgtagtgggtttgcaatttcatgtgggtggttgggggaggcctcaccacaaggctgacattagagcaatgacttgaagagggagagtcagtcacagagggatccggaggaaggccattccaggcggcatggacagccagtgccaaggccctgaggcaggaacatgccgtgttcagagcacagcaaggcggctgggcaggctggagaagagtgaggctggagtgtgggagcgagaggggcgatgggggtcagcagggtggggggggcggatcacacagcactctaaggggccctgagactctgggttttccctagagtgaaacgggagccactggggagctttggcccggggaggacatgagctggcccctgttgagaaggttcactctggctgctgtgctcagcccagacccaacagagagggcaggggaccagcgaggaggcagcagcccgagtgagaggtggtggtggcccaggtagtggctgcaatggaggggtgggaaaggctgaagtctaggcacgtaccgaatgcagggacaacgggatttcctgataggtgggctagggagtgtggaagaaagaggagcaagggtgcctgcatggtttggggcctgagccactggaagggtggagctgccatcggccgagatgggaaagccagtggtggagcacgtcggcgaaaagatccaagtgctcagcgttcagtgtgagatgcccactggacctccggggagtcaacagctggacgcgggccgaggcatggagctgggagtgctgcacgctgggtgcgtggagatggagggagggccctgtgcactctcacactaatgagctggggcaaaggggggcgagcaaaggcaacggagaaggagaggcttatgaccaagggtgtgtggaggcctggaggtcgagtgccgacaggaggaggagatcgactgggctggtgctgttgatgtgttcagtgagaccaacaccaaggctgacccatggcacagaaaccgctgacaaccttgacaagagcagctgtgatagagtggacgggtttaagagcaaattcagccagtatctactcagcacctcacatgtgacagctgtatgttaaaaatgttacatacaaaatctcattcactcacacaatcctgtgcagccagcactctctacatcttacagatgaggaaactgaggcacagagtgagaaccatgcagattctgggtggggggggcggggcatggcatgtctgatttcagagcctggttactaaccacaagttggtccaggcccaaagaatgtctgcaggagtcaatgaatgaatcacaaaccaatgggggcgtgaatcactccgcccagggcgggacacagggagacgtgagagccaggcacttcttggaagccggtagacaccctgaaggctgacagcactggaggtgggggctgggaagccaagatctgggcccacctctgtcactcaaagccaagcggcctggggccagtcacctccctgctctgatcccggtgtcctcccgagggggtaatgccatgcccaccctctctcactggagaggaaaaggcgcgtgggtgaagccagcagcagcacaggcgtgaaaggtgctttattcatctccagagatcgctcctttgttctgcaaccctttctgctggacggtaagaatcctctggcaggacattttttccaagtatggagcggaaattcctggctgaggctgcagctccggagctgccatatggggatgggggacagctggtctctccgtggaatgtcctggaggccggatgtatcagggcaggaggtgcctcttacaggaaacaattggccccaagcggcttggacagtgacagcagccccactcgaccccacccacttcggggggccccagcccactcccaacaatacccagaaaatgaggcctttgggcactccagaaatttgctttcaaatacgttatagaaatgtaaaaggaacaactgtgaccccccacccccggcagtagatagacctcattttgcattctggttcttttcatttttaaaaaaataaatacctcagtcctatgcatcaagcattcctggagcactgtgcttaagagttaagctaagcgcttcatagtacctcttcatttaatcctcacaaccacccagtaaggggactgctgctattcactcccatttcagagtgacaagcaagtcacagagaggttaagccatttgcccaggggctcacagccagtaaatggcagagctgtcgaaccctggactttcccgccccagctcacactcataataactaagctgctaccccagaaggacgcacagtggctcagaatgccgaccacaggcccagtgcatggcacacagtaggaagctgggaaaagctgggtgaatacaaagactcaagtgcctggtgtggcgccttcctccccttcctgccactgcacctctaaggctgtcatgctgagggcaggaccggagccgacacggcagtgaaagggcagccctgttgcatcacccaggcccattcctccccctcttccatcagtggcagtgacatggggacactggtcggcagatttgcaaatgaccgggcaagtgctgtgcacagccctcagaacactgttgtggacacaccgacctcacccagcctccagccatgacgccctaactcgaggcatgggcccaggcaaagagtggctcacagctccctccaatagttcaaaaagcttcaaggaaaccattatccacctgcccattctaaggcagtacagccagctaatgagatgctcagagtctcctgatcccgcatacagcagccagaaggcaggaagacccttgtaaatggatgtcgatgctgtgtctcccctaatgcacagataaagcccaggacctggctctggcttgcaaggccctgcaggaccctgtgtgcagaaaataacacagcaagcttcagaaagggccgctaacaaggttggatcctcagctggtctctgcaaactaggagagggctcccaccattaactaataagagtggcccgctctgcctaaactgttctgcaaacaatatggcttaggtggaatacctcctttccttctagagtctggaactctggtctgtgccaggcagggggtgcttatgtgaccactacccactaaaaaccctaaggggcttccgtggtggacagcacagagaattaagctgtcctggtgactgtactgggagagggctctggaagcttgcacctggctcccaagaccttttcccacacacctcctccttgggctgagttctctctgtgcttttgctgtcctaagtctcctgtggggagagaatatgctgaggccaggtgttctcctagggaaccatcgagccttgggacagacgccccagtgcctctccgctctcgtctcccctcccctggcccctgtgctcctgctcccccacctcccacccccaccccctggctcttcccagcatgtgtggaacatgctgctgtcccaggcgtttgcctcctctccctctgggccactggccttgctccttcccttcctgtggacatctgctcacccagagaacccttccttatcctcccttacaagacaacagctgatcccaggcgccccacccctgcactgtggatctccttccgtggcactggccaccccctgccacgcacacatacttgcttatttgccacctgtatccccactggaacacacgctccatgaggacaaggtctgggtggcttcgttccccaaggcactcccaacacagagctggcattcaggaggtgcctggggaatacccgctgatggacaaacagctgtccatgctgttccctgggcggggtgagaacatgcccagcgtccaggtcactggtgagttcattaggctccacccttcagggagcagagtgggaggggaatccactcacctccagcagctgcgcggcactgggtcgggtttctgggttcttatccagggctatcttcaggaagtcacggaactctacagacctgggaggacaggcgtcagaggtaagcatggaggaggcaagagcagagagaagccccccacgtcacagactccactgtcccaatcatgcccctcaaaggacagaggaaactttcacaagctaaaacagtgacagggcctacacgacgcccttttcatcatggacaccactgtccagatggggacccagacatcggcgaggagcagggacgtgcccaggccacgcagtgaggagactcagcagtgccgggatttgaacccaggcccccgatgtcccgcccagggtgtgccatgtggctcctgcggctcagctggggctcctgttccccagtgggagccagcttatttgggtgacttggtttgctctggtgaagatctcatgtcaagtgcacagaggcagcacggtagctcacgcctgtaattccagcactttgggaggccgaggcagacggatcccttgaggccaggagttcaagaccagcctgggcaacataggagaccttgtctctacagaaaattagccaggcatggtggtgggtgcctgtactctcggctacaagggaggctgaggtgtgaggatctcttgagcctaggaggtcgaggttgcagtgagctatgactgcaccactgtactccagcctgggcaaaagagtgagaccctatctcaaaaaaaaaaaaaaaaaggaacacaaagggaaaaagaggcacgaagggcccgggggggctcagaaacgcctgaagacccccaggccccaacctctcctttggagctagcagcaccaggagaacgctaccactgcacctccccagccccgtccaccacatattccagccctaatcccggcgcaggcaccccggcaggtggccctgcccctgcccctcaccacttagagggcgtgagcagcgtgggagggtccgacttggcgatctttagcaggacccgcatggggttgagctcgtggtgtggcggctcgatctgggccatctcaatcagcgtgatgcccagggaccagatgtcggctttgtagtcgtagggcgtgtctttcatggtctcacacatgaccacctcgggggccatcctgaaccaaccaagggacaacatagggctaagaatctggcctttacaggtgcttcttggacattcagggtcaagggccaccacgagccactgtcggggttggcagcactcccgaatcatgatctgcgtgactttgcatcccactgtcttccttaggacgctcttccacagaaaaacgcctccacgcggctccccgccacgtcctgctgcagttccgatgcctaccgcgagatggcagcagcaacccggaacacagagtcctggggagggggcgggtgggagcggaggggaaggtgcggagcaaaaaaaaaggggcgtggaggtgggtgggcgagaagacaccagcacagagaggagaaacaggtataaaaggggggagagagagagcaagggtgagtaacaagcaagcaagaaaggagcccaaactacacaatggcaagtaatgcacatgaaaaaattggaaacacggcaaacagagagtagtcaggcgtgaaattgagtgacagtgttttgcttttaaagtaatagttctggaaaagaaggaaacacgacagactacagaagtccagggagacttcacatgacggtaggaattgaacttgtactgttcaccttcacggtccccatccccggccctcaatacatacgtggcgaataaatcacgaactgaatcctgttttatggattctagttcagttattaatggagtgccttctatgtgcaccatttcatttcattctcacagtagccttattaagtaggggccattatatccctaattttatggatgaagaaactgacgcacgggaaagctaaacagcttgtccaaggtcacacagctagtaagccacgaggcagggcgtgtagcccttgtcttccggcccctctctgtctaaagcgcctggtggtcaccttggagagtttttacatccagtccattccatttccagaagctacacgactcaccagtaaggcgtgccgatgaaggaatctcgtttctgtagagtcttcagattcttggcagacacaccaaagtcagctgcaagacaaaatctcagctagcgttttccacccatagccctggggtaaaagccggggatgtggactcaggggtacacattccaagtcgactaacagatgccattttctatctagcaaattagaaagcattaaaaatgtaagactatctgctgctgagaggaagtaccgagatgaacactttcctctctactaacgagagcctgcactggcagcagccttcaggaaagcaatttggcaataaatagcaagaacctttaaaatacccataccattttaatccagtaattccaaatccaggactctgccctaatgaaacagtcttaaatttaaaaaaatgcataatgatgttaatcaaaatcccattataataacagtgccattataaaattataataatagtgacacactgaaaacaaccataattgcttggctatcaggcagtgattttaaaactttttatatagattaagaaaaatggaggccaggcagggtggctcacgcctgtaatcccagtactttgggaggctgaaacaggcagatcgcttgaggctgggagttggagatcaacctggccaacgtggcaaaacccagtctctactaaaaatacaaaaattagccaggtgtggtggtggacgcctgtaatcccagatacttggggggctgaggcacaaaaatcgcttgaacccgggaggtggaggctgcagggagctgcaatcgcaccactgcgctccagcccaggcaatagagtgagactgtctcaaaaaaaaaaaaaaaaaaaaaattagccaggtgtggtggcatgtccctgcagtcccaattacttgggaggctgaggtgggagaatcacttgaacccaggaggcagaggctgcagtgagccaggattgtgccactgcactccaacctgggcggtatttattactatttattaatttattattatttttttgagatggagtcttgctctgtcacccaggctggagtgcagtggcgcaatcttggctcactgtaacctccacctcccgggttccagcgattcttgtgcctcagcctcccaagtagatgacattacaggcatgtgccgacatgcccagctaatttttgtatttttagtagagatggagtttcaccacgttgcccaggcttgtcttgaactcctaacctcaggtggtccaccagccttggccttccaaagtgctgggattataggcgtgagccactgcgcccggccttactgattactatttatattactgtaaaaggttaagtggggagaagggggatacacagttgaatatactgtctggtcagaatcatgcccctctcactccaaaaaggggaaaaatacacactgaactgacttggaggaaatataccacactacttaaatggctgtgtgtgggtggtgagacttccacacctttgctatgataaagtgtattatttgcaggactagcaaaaataaatgaacacttttttttttttttcatgacagagtccactctgtcacccaagctggagtgcagtggcacaatcatggctcactgcagcctcaacctcccaggctcaagcaatcctcccgagtagctgagactacaggtgtatgccaccacacccggctaatttttgtattttttgtagagatggagtctctatgttgcccaggctggtcttgaaccctgggctcaagcaatcctcctgccttggcctccgaaagtgctaggattacaggcgtgaggcaccaggaccggccaataagatgtatctttacatgcattccaacactctcagtctttcctcacacacccgctgctaagagaagaattcagcgctaccaagagaaattttctccagggctcctgccttctgtggtgaagtttcatcttgactgaaaaatagattcaggatgaaacaacactttgagagaacccgggatgctccatttgaaactccctgaatggaatttatgaggggtgtcccctgctagatgatggctgcctttggacgattcatcccaagaagctgcagcattatgacaacttcaggccaccccgggcaccagtgcctggtcttgaaatgagctgtatccaggagctcctttcagacttgcaacgtgaaacaaggaggcagcacaatgccaagaggctgggcctgaatacgggagaacttggttccagcctctgctcttctgcttcactgtccactcacccattcattcaggtgctcaccaggctccatcaggagcgagacactagccgggatcagagaatacaatgaggaccctcggggaatccacagtttagttgggggagcagagagtaagcaaataaacaaacatctactcctaacatggaaagtgttgggaagacaggaccggggctactcaagagtgcacagtagggggtgtgacctcgaggggacggtcatggagggagggctgggggctttggaggaaggacagttttattcagcatacactaactgcacatctattatgtgcccgacactgttctaggcacagagatgaaagcaaccaagtcctgcctgacatgccacatgttattcccgtggtggcgacaggcacctggcaaaacccccggaatgcctggcagcgagaagggcccagggctgagaaggcagggagaagaacacagtgctggggtgcagggtggggagctactttagacacaaactcaggatctgggggaggtatttccaggcagagaaaactgcaaacagactgggaggcaggaaacagcaggctggagggaccagcggggacaggacacagcctggccggaaggagggggccgggggtggaagcagataaggcaggagacgggcagggcagttacaaagcctctgagcctcagtttccccatctgtgacacgggggtgatagcacagaaccattgcgcaggttttcctgaggattaaatgacaaacgcaaagcactgtgatgcaaggtccactcgtggcaaaagcgagaagatggtgattctttcaccggcccatgagccagtccagcctttttcaggctggggcaaggctgaggctgaactaagaccccccggcacctcctgggagtggtcaggaaagctggcttctgagccccggttagtgctaactggacagcagttgctatatcaggggacagtctggccagcaagaggggacagggggccctcagcctcctgaagtgggaccaacaggtgctgcaagtgaggtgcagaagcaggaaacccaggtagagcctggctctgctgatgactctggcaggcggctcccctgggcctccagggtaagaatgggaagctggccccaccttcctgctgggtcagccaggcccccctgtgggcctggctccctcgcaaacaccactaagggctggcacatcatcccatcccaggaaaccttttgggaacagtgactgcctctcaggcccagggtgaggatcccaaaaggtggccactccccgaccacaggccctgccgatcccttcctgagaagagagacgagaaacagaaaccaccaacgtgcaatgacacaccgtaggtccccagggcctccctcaggcacgcaccagccagctctttgggtagctgctacttccccttctgccccacacgatggggcccagatgggagagtggggcagccccaccttgcagcccagagaactgagcctgtttgctccctccgcagagtttataagggagtgtcccttgatagctgatggctgcccttgagcaattcaaaagggattttcaccatgcagtctcttctgatgaaaacactcccccttctcctcccattttaaaatgtattagagacaagggcggcggagataagggaaatctccctttctccgctgtaatttccataaagaaagagatcatttctgctgtggccacagttgtatccctggcacgttatctggagcaggaagcactcaacaggtttatcgaatgagcatgctcataaataaataaagagacagaatttgctaaaatgcctttactcatatatgtaaaaaataaaactgggttttaaaaacttgtttgccagcaattctatttgtagaaatccatctctaaaaccagatctataatatatatggatgcttataaaagcaacagccaaaaagaatggaaaattggaaatcatccaaagtgttgctggagcttcattgctgaatggttagataagttgtggttcaccccagctatgaaataacatgcagctcttaaaaagaatgaggctgtatttgtatggactaacttggaagtgtatctctaatacattaatacatgtcccaaacatgttgctgactgactgatgagtcttataaaatgtgtagcatgattccagaaatgatccaagtgcaggtactccagtagaagattatctttaaaggaataatatatgcatcttgtgtgtacatgtctgcacgcatgtgcatacacacacacacacaccggtctggaagtctgcacatcaaacttaatgttcatctccctggaagtgggattttggtgggggcagtgcacagaagggaccttactttttttttttttttttttttttgagacagagtctcgcatgtcacccaggctggagtgcagtggtgtgatcttcgctcactgcaagctccacctcctgggttcacgccattctcctgcctcagcctcccaagtagctggcactacaggcacctgccaccatgcccggctaatttttttttttttagtagagacggggtttcaccatgttagccaggatggtctcgatctcctgacctcatgatccgcccacctcggcctcccaaagtgctgggattacaggtgtgagccactgcacccggccaggaccctacatttttcactttacacacttttattctttttttttcagatggagtttcattcttgttgcccaggctggagtgcaatggcacgatctcggctcactgcaacctccaccttccgggttcaagcaattctcctgcctcagcctcccaagcagctgggattacaggcatgcgccaccacgcccggctaattttgtatttttagtagagacggggggtttcatcatgttggtcaggctggtctcaaaatcccgacctcaggtgatccacctgcctcggcctcccaaagtgctaggattacaggcatgagccaacgcgcccgacccacttttgttctttaaaatgtttttgatagagtgtattgtttctatggtttaaaaaactgaaatgcatatgtagcaaagttttttggttttgtgggtttttttgttttttctctattaagtaaaacccagtaggggccaggatgtggtgaaaagagaattgcacactgcactggggggggtgtcaactggtatgaccagcacggagggcatgccggctgcaggatgaacaaaaccccaactcactgcacacacccagcactctgcttctgagaattcctcttcaaggtatgttacagaaagagacgcaaagatccatgaacaagcacactcatcactgcatgatttcgtaaagatgataaacctcatgagaaacccaagtatccaattcagggctttcctcagggctctgataggtaaattacattttgtgcctgtgatgggtacaagaaaaacacgaaaataatcatgtttctgaggaatctttaaggatatggaggaatacgctgatattcaatgttaaaaaccagactaggaaactgtatatatatataataatcctagtttatcttataaaaactaatattgtcaccggacacggtggctcatgcctgtaatcccagcactttgggaggctgaggcaggcagatcacctgaggtcaggagttcgagacaaaaaccaacatggaaaaatcccctctctactaaaaatacgaaattagccaggcgtggtggcacatgcctgtaatcccagctgctcaggaggctgatgcaagagaatcgcttgaacccaggaggcagcggttgtggagagctaagatcgtgccattgcactccagcctgggcaacaaaagcaaaactccatctcaaaaaaaaaaaaaagaaaaactaatatttactgagaacttaccatatgcatagcactgtgcaaagaaacttatgcatatcatctgcatatctattcctacacacatcgtttatatctatgaccctttaaggcagggaaaattatgactcccattttacagataaggaagcttaacttaagaaagactaagtaatgcacagaaggtcacccagctgtgctctttcccactatctgatccgacttttctgcagacaaaaaaagacttggagggaagcccacggagagtggtggtttattctggcaggattaggaaggaccttaattctcctttttgtgggtcttattccaaattgtgtacaggactctagctactctcgtgtgtgtgtgtgtgtgtgtgtgtgtatgtgtgttttctgattaccaaagtcatgttgcttattaaaaactcattatttttcagattaaaaactataatactgacaactaaacatttacgggtttgctgtgtatagctccaaatttatgtatattaaaattatatatatatatatatatatatatttttttttttttttttttttttttttgagacggagtctcactctgtcgcccaggctggagtgcagtggcgcaatctcggctcactgcaagctccgcctcccgggttcacgccattctcctacctcagcctcccgagtagctgggactacaggcgcccgccaccatgcctggctaatttttttgtatttttagtagagatgggatttcaccgtgttagccaggatggtcttgatctcctgacctcgtgatccgcccgcctcggcctcccaaagtgctgggattacaggcgtgagccaccgcacccggccggttatttttattttcttccgttttttaggaacctagagacgcgtgcccatttgataagggcttcgtcttccggtttgaccccccaccttcggccttcactgactctcctcctcgcaacacactgcactgtcttcctgacaccctccacgcactcaccgccaacccagccctttcttgttgcttcccatccctcaagcttctgcctcacttacttcccctctgctgggcctgtgcgattctcacaggctgggcagggtaggtagaccgcaatttttttttctggccagtccgaatcctcccttcctctgaaaaaccatctccccacccaccacactgcctcattgcgggggcgagggctacttccgtgttgtcacgtgaccccaccctccgtgccagagactgaagacaagccgggcctgtgggagaccccctcctgcctgggcctcactgattggtccaaggattactatctgggccaaacggggccagtcagagccctcccctgggattattgatgccaaagcctccaatggtgagttcgggttcaggcagcagcagatgatgccgggaaatgtgaaactagatggtatcctgagcttggtggagagggttggtctgggagccgaacctacatgcacagaaagccaagggccagggatacggtcctggcagcgttaagggccagggatacggtcctggcagcgtttatgttccaggtttcaactaactttaaggcccacccagctgtatttcttctccaatttggctccatgatgtacacattttcctgtctgccttaactcttaggaagtgggtttttatcatttgccactaagagaggcgacaagagggtagtggttaagcacgtaggctctggacccagctgccttggtttgaaccccagttgttcctcttatcggcaatgtgaccttggataagtcagtcttgctaggtcccaaatccatcctgcaagatgatatcagtggcttttgagaatggaatgagttaacacatatcagatgctggctcagtgcatggtagctctagtgaaagaaccaggcccccagcctgctggtagcaggaaatagcaatgctgggctgggtgaaggcagcagtgagagatgggcagttggcttcctgactggtccacctgccaagtctccagcacattgggcggggcatgggggttgggagttggggatgctgaagtaactaaccataggctaaagtggtggtcatgctggaagtgactgtttattgagcaccaactatgtgttgtttgtttttttgtttttgtttttgtttttgttttcgtgaaacagggtcttactctgttgcccagaccggagtgcagtggtgcaatctcagctcactgcaaactctgcctcctgggttcaagcgattctcctgtctcagcctcctgagtagctgggaatacaggcgtgtgccaccacgcccggctaatttttgtatttttagtagagattggggtttcgccatgttggccaggctggtcctgaactcctgacctcaggtgatccacccacctcggcctcccaaagtgctgggattacaggcgtgagccaccatgcctggccgaaaatcattactttaaaaaatgcattgtagccatatcatttggcgatgcagaagtacacatgagaagagctcaaagcgcttgtctctgcaggtggatggcaaaaggagacacgtgaggggatgacacatgtatgtgttattttggttaaaaaaataaaaacattaaaaatacaaagaggagacatttaaagaagaaggttttgagccgggcggggtggttcacacctgtaatcccagcactttgggaggccgaggcgggtggttcacttgtggtcaggaactcgagaccagcctggccaacatggtgaaacccggtctctactaaaaatacaaaaattagccaggtgtggtggtgggtgcctatagtcccagcaactcaggaggctgaggcaggagaatcacttgaactgaggaggtggaggttgcagtgagccgagatttcgccactgcactccagcctggataacagagtgagactctgtccaaaaacaacaacaaaaaaagaaggttttgatatatgtgcttaatgtcctactgttttccctctggggatggagctgggtcatccctccatccatcactctcattcgaattctcttgattagaaagaagctggccaggcacagtggtgcacacctgtaatcccagcattttgggaggccaaggcgggcagatcacttgagatgaggagttcgagaccagcttggccaacatggtgaaacctcatctctactaaaagtacaaaaagtagccaggcatggtggcaggtgcctgtgatcccagctacttgggaggctgaaacacaagaagcacttgaacctgggaggtggaggttgcagtgagccaagaacgcaccactgcactccagcctgggtgacagagcaagactgcctcaaaaaaataaaataaaataaaataattgaaaaaaagcaaagaatcaagagtaggaaggggagaactgctgacatgccaagagggcgtaggcgtgaggaccccacacccccatgaggtccacactcccactggcctgcagaggccaggccaacacccccaggcagacaccctgtggctccacctttcccaccctgagccccttacccagcctgatgtctccctcgagggtcatcagcacgttgccagctttcagatctcggtggatgatcctcttgctgtgcaggaagttgagggcttctagcatctggcggcaaaccacctgtatctggggctccgtgaggcctctgtccagctctggaaatggaggagaacggctgtcaattcagtaagccctggacacaggaaactgaaatgtcaggcccacgccagggagaaatataaaagccaccaacattaggccaggcgtggtggctcacgcctgtaatcccagcactttgagaggccgaggcaggtggattacgaggtcaggggttcaaggccagcctagccaagatgttgaaatcccacctctactaaaaatacaaaaattagctgggcacggtggcaggcagctgtaatcccagctactcaggaggttgaggcaggagaattgcttgaacctgggcagcagaggttgcagtgagctgagatcgtaccactgcactccagcctgtgcgacagtgatactccatctcaaaaaaaaaaaaaaaaaaaaagccaccaatattaaggagtgctcaccgtgtactggattcatttctaagcacatcatgtgcactgacccattttgtcttcataacagtcctatgaagcaggcacaattattgtccccattttacagatgaggaaattgaggcttggaaaggttaagccactcgctcaaggtcatgcaggtgggaagacacagatctgagattcaaaccagggtctggctttagagttcaggtttgtaaacataagcccgactgagacagagagatctgttgtgtctgcagacactgagagggcacttactatgtgtctggctctgtgcttggagcaggaaggcagatgggacatggaaacggtgagtgacacttggaacagagtgaggtgcaggcatgtgggatgtcagaatgggcaggaaccccttatagctgggggaactggaaggctgcccagaggaaatgacatttgggctatgtcttaaaggaagagaataggtggggcgagggcactctaggtcaaggagccagcagaggcaacagctgacatgagctggtgtctccaaaatgtccactggggccagacgcagtggctcatgcctgtaatcccagcactttgggaagcagaggcgggggggatcacgaggtcaggagttcaagaccatcctggccaacatgatgaaaccttgtctctactaaaaatacaaaaactagctgggcgtggtggtgcacgcatgtgatcacagctactcaggaggctgaggcaggagaatcgcttgaccccaggaggcagaggttgcagtgagccgagatcgcgccactgcactccagcctgggtgacagagcgagactcagtctcaaaaaaaaaaaaaaaaaaagtgtccactgaggagaccctctcttcggtgacccattttctcagcatgaggaagctttttctctctctcttcttttttgcctattaaactttccactggctgttggtggtggcaccagggtatgcggatgcggaagggccagagaggccggagggctggttgccaagagccttttgttctttatggggagacacagcgcccacgtgcgcacgctgcagatcactcagtgtccaccgagagatggccagggcccttcttccctgaggttcacaggttgagtaggtctgagcaggcagggagcgggaaggtgggcagcaggaagaatattcctggaaaggggaacagacttgtgtggtgggagggggcaaatgaagggaaagtgactcgaggtcagaggtcagcaggccttggctctgcaggaccttcgggccatgctgtggaggctgcattgtatttgaaatgcagtgggtagtccacgagaagttctgagtgggccagacacagtctgatttttgcattaaaaaaaaattcccatggctgagagcagtggctcaatgcctgtagtgccagctacttaggatgcaaaggttggagaatcacttgaggccaggagttcaaggccagcctgggccacatagcgagacccagctatgcttgtagcatttattatattataaacaaaataggccaggcgcggtggctcacgcctgtaatcccagcattttgggaggccgaggtgggaggatcacgaggtcaggagatcgagaccatcctggctaaaacggtgaaaccccgtctctactaaaaatacaaaaaattagccgggcgtagtggcgggcgcctgtagtcccagctactcgggaggctgaggcaggagaatggcgtgaacccgggaggcagagcttgcagtgagcggagatcacgccactgcactccagcctgggcgacagagcgagactccatctcaaaaaataaataaataaataataaataaacaaataattccctctagcacagcaaagagcttgctgggcagcaggggcaggggctcagctggaggtcatcacagtggtccagataggcaccaaagcagagaggaggaaagctgctcaatggacagattagggaggtggagctggcggaatgtggaggcggtgggaggaggggagtgagaagattccaaggtgacagccttgtgctctgcgtcccacaggactgtcctgattgagtcaacgtagctacccaagacccctgtgaccaggggagccacctcccttggcctgccaggttcccaggctgtcggcttctaagcctggtcaccaaagggcactgctccgagtcttccctctgcctacaacagcactgctgtgtccggcttgcctagtggtgcctggacaggaatccacaaggctcagctctcccagccaggccctcaggagtggtataatagacatgccaaccaggaatgcaggtaccaactgccctgctctgggaagccaggccccagaccagggctcctggaccagggacccttctctctggagtccgcaagctgcctgccccctgtccctgtggcctcatcctgaacctctgtgtctccagccaggggccaggatcagagcctgcatgggcttcaggaccacacagaccgaggccgtacccaggtgctgcctctcactagctgtgtggttactggcaagtcgcccaagctctctggcccttcatttcctggtctgtgaaatgggatgattataatcgacataggcagggctccagccatcagccatgttcagttctcagtgtggaaaataggcaataaagggggattattgctatgttggttctaagatgagtccagggctggaatatgtgccgcaatctttttaatggcaaaaatgtgtcttgctcatgtctaatttactgatataaatgaaataggaatgacaaaaatactaatgatgatgatgaagataattatgatctaatcaccaccatttttggagcccttataatgtgtcaggcatgaggataaggacacggtgcatactgtcatttaatcctcgcagtaacccagtgaggtgggaaggagatactctttaattttgttttttgttgttgttgttgggtttctttccttttttttttttttgagatggagtcttgctctcttgcccaggctggagtgcaatggtgtggtctcggctcactgcaacctccacctcctaggttcaagcaattctcctgcctcagcctcccgagtagctgggatgacaggcatgtgccacgacgcccggctaatttttttgtactattagtagagacggggtttcaccatgttggccaagctgatcttgaactcctgacctcaggtgatccacccgcctcggcctcccaaagtgctgggattatatgcatgagccactgcgcccagcctaattttttgtttgtttttgtttgtttgttttagacagggtcccactctgttgctcaggctggagggcagtggatcacggcccactgcagcctcgatctcccaggctcatgcaatcttcccacctcagcctcctgagtagctggaaccaccggtgtgtgccaccacactcagctagtttataaaaaaaatttttggcagggcgcggtggctcacgcctgtaatcccagcacttcgggaggtggaggtgggcagatcacctgaggttaggagttcaagaccagcctgatcaacatggagaaaccccgtctctactaaaaatacaaaattagccgggtgtggttgcactccagcctggggaacaagagcaaaactctgtctctaaataaataaataaataaataattttttgttttttggagacagagtcttactacgttgtccaagctggtaatcttggactcctagctgcaagcaatctcctaccttggtttcccaaagtgttgggattacaggcatgggccactatgcctagctaatatacttttttttttttttttagacgacgtctctgtcacccaggctggaatgcagtggcgtgatcttggctcactgcaacctctgccacctgggttcaagcgattctcctgcctctcagcctcccgagtggctgggattatgggcacctgccactgtacctggctaatttttgtatttttagtagagatgggctttcaccatcttggccaggctggtcttcaactcctgaccttgtgatccacccgccgcagccttcctaagtgctgggatcacaggtgtgaccaaccatgcccggcctgatacactttttaaagtcaggattattgaggtataatttacatatataaaaaattcacttttttaaggtatacagttttataaattttgataaacatattcagtcatggaacccccatcacaatttagatacaaaatccatccaccatcctccaagattcccctgtgacctttgcagtaaactcttcccgtttccagtccctgtgtaatcactaatttgttttctgtgcctatagtcttgcctttttctaaagtgtcatataattggaatcatacaatatgcagccttttgagtccaatacatttttagaaatagttttcaattacacagcaatgcatgaataccttctccttattaaaaaaactacaacattgcaaagtccccgttgacaccacatctaattctagcctctcatcctttccacgataagagggtggagacccaagatgtttgtttatttgttttgttttgttttgagatggagtctcgctctgtcgcccaggctggagtgcagtggcacgatctaggctcactgcaagctccgcctcccaggttcacgccattctcctgcctcagcctcccaagtagctgggactacaggcgcccgccaccatgctcggctaattttttgtattttcagtagagacgaggtttcaccatgttagccaggatggtctcgatctcctgacctcatgatccacccgcctcggcctcccaaagtgctgggattacaggcgtgagccaccgcgcccggccaagacccaagatgtttaatagccagcaaggcatggccaaccatatctattccaatcagaacaggccctggatgttacatagaatggccccacagtgacataccacgtgggtattctctccatctcacaaaagggccagtcctgtgccccaaagcctccaaaaagagaaacctggaatggacctcagggaatggacccctgggccccaagctcaggccagtaatgcttcccagccatgcggggcaaagtggagatggatggaggggcagaaacccctctaagcagggcaggcatctgcaggaaggtcaacactaaacagagagctgcaacgaggacctggctctgaacttgtcagctgtccccatttcagcttctctttgcacatcatcattcccaaaatgctcctttcactgctgccaccaacagggggaaaactgcctagggctggagcagtcaggaccacgaggagaactgggacgggagccagagaagggtttgtctgctggctgagctgtagcctagggcacgccctagctgtgaatgaggtcgaggacacagtacacttccatgcctttccatctctgatgctcccctccagctaagctcattcagttaagctgcataccaggggacacagagggggtgctagctggcttccattttccccttctttttttagtatcagcacatatggctacccagctagaaaaccacattccccagcctccattccagctgtgtgtgatatgctacagccaatgagacataaatcaaggtgccatgtggagcttttctgaagtctctttaaaagagtcttcagtgtgggatgggtggttattctaccctgttgtctaccctgctgcttggaattcagatgtgatggctggagctcccacaccatcttgttgtcaagatgcatgcagaaaaccagcatgagaatggggctaacacagaggacagtggggccaagagttggagaaagaaatcaagtccatatcacaactctttattattttatttttttgagacagggtctcactctgtcacctgggctgagtgcactggcatgatcttagctcaatgcaacctcttcttcctgggctcaagcaatcctccagcctcagcctcccaagtagctgggattacaggtgcaaaccactaacgcccagctaacttttgtactttttgtagagacggggttttgccctgttgcccaggctggtctcaaactcctgagctcaaagtgatccacctgcctcggcctcccaaagggctgggattacaggcttgagccgctgcactccatctcttatcataactctttaaaactcctggaacaagctgtgcctgaagctagccatccctgaagtcttcagttatttgtgcaaataaattccacctcccacatcccagacctttcccccacctaaaaaagtttgagtattctggctcctcataacctaaagtctcaattcataccagactatcacttttatactgttagattctatccccccaaatgataatcttcaaaggcagtgcctgctgagagaaggcacacccaagagccatataacatgtgccatgtatcctccctgctactgtcatctacctgggaactccatggggcagtaagtggctctgtaacgaaggcttgtgggtcctacatttctacagcccgggatggggatggactactgtaaatttcacacattcctgagatgggtttggatcataatcctaaaagagaccatctcaaataccataatcccaaatattgaaatccccaaagatcaaaatccctaaagtctaaaatcctaaaaatctcaatcacaggatagttgtatcctgtgaggtcaactcttatgaacggtctctgtgcaactgcccgtaatctctccctgtaatacacttggtcatatgttaaatttgaaaaaactaaatggtctttagtatatatatatttttttcccccactattttaaatagcattactttttgcaattcactatgctatgtatttcatcttcacatcattttcaatactggaggtataaatggtatagagactttgagagagttctaattccttttatgcgtttgttgcaaatttgactccctgaaagtgtattatctcagcattgctggtgtgtaagcattgtgcatgtatggaaaaatgctgaaagttcctcagtaaacatagggatgtccttttggtacatccgcatttgtggaagataaactttctccagatcctggctctttcggcatctgcatatgccctagtgacccactgagggttttgatcaatctcgtcaacaggctttggttgttcattacagtatttcagacaacagctataaagctgtgtgtacacaatcaccaatcctggtgatatgcacttatacatctccctttttgacctacctctttatgggtacaagtcatctgctcatgactttttttcatttttttttttttgagatggagtctcactctgtcgcccaggctggagtgcagtggcatcaccttggctcactgcaacctctaccgcctgggttcaagtgattctcctgcctcagcctcccaagtagctgggattacaggcgcctgccatcacgcccagctaattttcatatattttgtagagatgggtttttgccatgttggccaggctggtttcaaactcgtggcctcaggtgatccgcccacctcggcctcccaaagtgctgggactacaggcgtgagccaccacacccagccaatctgctcataattgttacagctgtaccaccatctttggtatagctgtttatgcttgcaaagtatgtatgttactactgcctatttgattgtgtaaagtggcctatgaagcgccttgaagtttttatatttctcaaattcccctttaaaatataagtaaatatcaagaattttaaaaaaaattttagcattatatttttgggattttgatctttcgggattgtacttgacaggatttgagactttaggcattttgctctttttggatttcaacattcaggtttatggcattcaaggctatgtcaggactacagttggctccctcctgaggtaaactcagggaaaataccttgaatggtgtgacattatcctaagtgcctctcctcttctgggccatcccagaatcctggacatgtcactcaaccttccaggcctctcctcagcctctctgcactcactgccctgaagggtagcatgagccggggatgctgcaggatgggccatggtccatggttaggagcgggtcacccagacctgggttcacagctctcctgtgtgatctgggtgagtcccttaacctttcaagtgtcagcccaatcaaaaataaaagtgatatttgcctgtaatcccagcgctttgggaggcagaggcaggtggatcacccaaggtcaggagttcgagaccagcctggccaacatggtgaaaccccatcactactaacatacaaaaattagccgggcatggtcgtgggcacctgtagtcccagctactcgggaggctggggcagaagaatcacctgaacccgggaggtggaggttacagtaagctgagattgcgccactgcactccagcctgggcaacagagtgagactccatctcaaaaataaataaataaaatactcttcctgattttatacctgaggattagaggaggaccgcatatgggaacgtggttaccacactctctggcatatagtgactattcacaaaggaatggccactactaacatttcactgtgatcatcgtcgtcattattgctcaagcttgcccaggacattgagacctgacactgtccccacagagcatttactgaatgtgtgggtatccccacttttcaaagaccttcctcgggtatctcggttttacctcctgagagtgtgtggggtcccgcaaagaaggcatcatacccatcttagatcaagaggcctcaagagggagagtggccagttcaaggacacacggcttctggaacagggagtgatggtcttccagcgaatgtcctgcgttctcttcaagaacccaacccctccatctctactaaaaatacaaaaacaagccgtgcgtggtggcacggacctgtaatcccaggctactcaggaggctgaggcaggagagtcatttgaacccgggaggcggaggctgcagtgagtgagctgagatcgcaccactgcattccagcctgggcaacagagcaagactctgtctcaaaaagagaaagaaagaaaaaaagaacccacaccctgctcccaaaagcagacatagtagagaggtgctcaaagaggccatgggaactgatggaatgggagagtggaggtcccagtcctagacagagctgtccagcagtcaggcttaggactccaaacgagtcgtctggtcccgacaatgcaccgaatcaagtaagactcacccagcatgatggcgtccacggctccccctggacagaactcaatcatgatctgcagaaaacacagggcaaagtgacaatgagtggggctgcccagccgtcgagacgggaaccccacaggcccattgggcagggtccacccatgcccaatgcctgggtgcccctgctctccagcccttcctcctcctgccttgggagcccgtccccctcccccagtgggcctcaaacctcactggaggctctgacacccagaggagcttcttggctgcttcattttctgaagaaggaaaactaagttgctacgaagacctgaagcttcagcaaacagcctcttcagccaagcccacaccctccctcctcgctcccgcctatgcgcctggtgcccacctgccagctgccctgtttcctatgctccacagccaagaacctcaggatgccttcccccggccaagctggccaagtcctctcagaatcccagcacctgtctcaggctctctccatcttccagaaccctggaccttgctggctcagaacatcagggccttgaagatcagctcagatggagaaactgaggccaaaaaaggggatgtaactgaccaaggccacagagattgttcctggactggaagcagagctccaaaccctcaggtcattcattcattcatcatacacctactccacactgacaggctgcaggccccgggagaacaaccaggtctaggccctcaaggggctcccagcctagtggaggggcagaaaggacgattacagtagaaaggtccttcctgacctcgtgatccacccgctgcactccagcctgggcaatagagcaatagagggagactccgtctcaaaaaaaaaaaaaaaaaaaaaaaagaaaggttcttccagccctggttcactcccattctcactctttctggcccactccgggctctttgcatagatgctttttcttttctttcttctttcctttttttttttttttttagacagactctcgctcttgtcacccaggctagcgtgcaatggcacaatcttggctccatctctggggttcaagtgattctcctgcctcagcctcctgagtagctgggattaaaggcacctgccaccacacctggctaatgtttgtgtttttagtagagatggggtttcaccatgttggccaggctggtctcaaacatctgacctcaggtgatccacccgccctggcctcccaaagtgctgggattacaggcgtgagccaccctgcctgacctcttttttcttaaagtagggctacaggtggttgaggaagagggatggcgtcacaaacttcaggacaggcagaatcacctcttagcttccagctcctggcccctgcttgttgtgaagttccttcaacccagctcagcagaggccctggagagtggggcagtcaagaagacccacgctgtctctaaacaggaaagaaactctcaaccatggtctagctggaccagagacagctctccagccagaggagggtggagcagcctcaggaatttgatgaagcctccagtttgtggcttaccttccaggagcctcctggcaatgtaaatatgaccctgaggtcatgtgggtcctatgaggatgtggtgatgcgtggctttggagccagtcacggctgggctcatggcccaggtccaccgctcactagtgtggccttggacaggtcacttccgtcctctgagactgtgtcctcagctgtaaaatggggctgctgatgctgttgctctgaactgggaccccatggctgggctacactaggggtataagccgggctgggatgcacgaaaccacagcagataaaacaggggactttaacgtgggccagggatactagagatactaggttccaggggtagcaaccattccaggccctgccaggcttgccacttgccttggagggctgtgtgccacggcagagagctgtggaaggcggcacggcccacttccacaccactccctgctgaggaggaaggaggccttctgggtcactctggtcctgcctggtcatcaacaacgggcctgacctcagcttccccaagacttctctctaacactacagtgacctgtcacccttgaataaaagtcatcagaaatggatccatgcatgctgatcccgaacgccaaggaagaggtacttcctccatccacttgttcattcattcattcgtccattcatttgttccctcttacccaaccaccacctaaccagcttgttcccagtggcaagggaacagacagaggtgacttggaaacaggcaatgaccttttgaagcacagcatatcattctgccttgtagtaattctcagctccacgaaagaggaagaaaaattctactaactgctagaaaaaaaacaagccacaagaggtgatgatggaaaagaagcaaaactcagtgaccatgcaaggccacttactagctgggcgacctgtgagatggggatgatacaccctaaccctcatgggaatgataagctcatccaggccttgacacgtgcctggccccaggtcgggactcagttatgtgagctgtcactatgattctttccttgagttcatgggtctgtttttctcatttatttttgtttgggttttttgaggctctgtgaaagccatcctctcccctctcacccagaaatgttcctgtgccattctattgaatccttccacatcctgaagttccatcaccaaaccctggctgggaacccctggttagcctccctaacacctaccatctgtatggccttggacaaccgccaatcctctccgtaaaatgggctaatattacgtggctctaggatttactgtaaggaacagatgaggtggtacttataaagacctagtcctaggctgggggcagtgactcactcttgtaatcccagcatattgggaagatgaggcaggcagatcacctgaggtcaggagttcgagaccagcctggccaaaatggcaaaaccccgtctccactaaaaatacaaaaagtagccaggtgtggtggcgggcacctgtaatcccagctacttgggaggcggaggcaggagaatcacttgaacccaggaggcggaggctgcagtgagcggagatcacaccacagcattccagtctgggtgacagagcaagactctgtctccaaaaaaaaaaaaaaccgaaaaacccagtcctaatacaccgtggatatgtaacaaggtcagacacttcccgcttctccaacaaggtgccaacacagaggaaaagattgtaaacctggggtcgagtcctggtgtgccacttaattgactacatgaccctggataagtcaatctccctgagcctccatttccccatctgtaaaatggcctaatcatctcttgcctccaacttcattgagaaagttaaatgagattccttacatgaaagaacagcacaaaagccacacagttaatatgtgtttgttaaatctctaccaaatgaaatcaccagtaagtttcatgcttagatcacgtcacttaggattcctacaaaaatatgccttcctctcagtctgattcctagggaaaacaaaacaaaacaaagaaatgtcttcccagaactacaatttctttatgtatttatttatttttgagaactaaaagttatggacatgccatcagctgtttttttttttttttttttttgacagagtctcactctgttgcccaggctggagtgcagtggcgcgatcttggctcactgcaagctccgcctcccaggttcacgccattctcctgcctcagcctcccgagtagctgggactacaggcgcccgccaccacatccggctaattttttgtattttttggtagaggcagggtttcaccgtgttagccaggatggtctcgatctcctgacctcgcgatctgcctgcctcagcctcccaaagtgctgggattacaggcgtgagcccccgcgcctggcctgtcatcagctattcttaagagtcagtatgagaagtgaccaaacccaggcagttcctgcatctttcagtgaaactgtcccttacacaacactcttatacaacgtccctgtgccctctccagaggtcagcaccaggaaagctcgtgcattctgacaacctggcttgcttcctcttctttagttcaagagctccacaaccccttgagcttcccttttatttatttatttttttgccttggctgctgggaagctctgggttaagttcctcagctttggtttgactcccaggccttacttgctttttttagtatctgggtcttaacatttttaccttcagcttatcagtggcaggagggctacaggggattggtattataaacttgtcagggctttttgcagaaatacatggggtttaattaataaaacaatagtctcaacagtaacagataaaataatagttgaatgtatctcccaaaaggcatgtgttggaaacttaatccccaatgtaacagtgttgggaggtgggaccaacagtaatgggaggtgtttagaccatgagggctccaccctcatgaatgaattagtgctgattataaaagggctagaggctgtgagttcagttgctggctctctcctgcatgccctcttgctctttccaccttccacgatggcaagaaggccctcgccagatgcagggccctcaaccttggacttcccagcctccagagccatgagctagataaatttctattgtttacaaattacccagtgtcaggtattctgttatagcagcataaaatgcactgagacgatggtaataaatatgaataaaataataatctcaatgctttaggaaattactacatatgcatgcttagaaaaaagactggaagcacaaaacccataggaggattacaggtagtttgtacttttatgtattatattcaataaatatgtattatcaaattgtatattagaaataaacatgacttttaaatttttaatttttttaatttttttaattcaacctaggggctttagtttttttttaatggaaagaactggcctagaataacctactgctacagatacagctattcttctgattgggatggggaatccgtgcccacccgtgatgaaggtcccagtggtccagtcccctgcttcctggataaagggaggctcctcaggatcggaaagctaaaggcctctaagccctgatcaagtccaaagtgaaaccgccccagtgctaaaaggacggattccctgaacctgtcaagggcataagcagcctatatttgcaggtggctcacggttttcctaggacctgaagaactgagatttgtggtcagtttaatgcattgatcattataaactgagtgtctaccaggggccctactttgctaggcaacagtaggggacacaaaagtagtatgtgatcaacaaacactatctgagctcctagtgcgtggcaagcctggggactgaggacccagggagaatcaaacaggtccctgccccaaaatcaccagctgagggagatatagaaatgagtggtgcaggcacacggtgactatgtaacccagaagcctgtggacacggtcattaacctgccttagagctatcccagaggaagcagatatccaggctgagttttgaagggtgaatttaccacgtggggaagggtaaaggcactcctggcagaacacagaagcagaggtggggcagcagggaaaagcgtggaagcgggtaatggcggagcattccatggggttccaaaggatgggaatccagcaggctggaggtcaattagaactagaacttgaacatctcaaagtatgaacctaatctggagagctgtgtgtgcgtgtgtgcgtgtgtgtctggggagatacaccaaagggtttaagcaagaggtgttgtagacaggcttttgctttggaaagatccctctagatgcattattaaggaaaaaacagtgggttggggacaaacagcgaagaggccatttcatgagtcctgatgtcctgggcaccatggctacctccccctccacatacaccatgtcttccttcccctttgtgaaatagccatgagaactgggtaggacttactcatcccctgcaagggaggggtagaagcagggtgctaagccagtcaggaaaattttctgcctcgtgccctgactcagggctggtgtcatcagagctaagctggtgagttgtgcttgatggtgtggaatgccacgtcgtctcactctggagctaattaggaagcacacaactctgatggttgcaggaaaccatgttgcaaccacgagagaagtgggtgtgaagacaaagctaatacacagaggaagacagagagaatcacaggaaaacggagaacaagcctgctccctactgactttttaggcagaatatgcaaacgaattaatttctgcgctgtttagtaggttagtttaaggtttgctgtcacttgttaccaaaagtacctgatcccacgcttggcaggagatgatgagtaaccacactctccaggtggcagactccaggttgtaccagctgaaaatgctacaccaacggctctccaacttgaacgttcagcagagtgcttgttaaaacagatcactgggtcccactccagagcttctgattcagtgggtctgaagcaaggtccaagaatctggtttccaacaagtgctcagatgctgctgctgttgctggacccctggtcacactttgagaactactgctcaatgggaatttataagagcaagaggcctggaccctgggaccacatctgtcctccccttaacaaaaggcactgtaagatgttggtagagaaacttgggggcaaactggcagaagtactgcctcttttatgctccttgttatcctaaatttcatcaccagtgttcctttttatcttgcctcaaaccaaagagtgaggggctttggtaggatgtatgatcatcctcatcagcctttaccaagagatggtttgagaagccctgagtattcacacagaagctttggggatcttcattattaaagaccgtactgcagtctgtttcaatgagttttttaaaaaaatatttccatatcctcccatctttaaataaaaattttgaggacctctaaatatgtgtcaaagggtatatgggggttagtaaaagaccagatggacaaaaatgacaccaaaagcacaagcaaccaaagaaaaaatagataccctggacttcatcaacattgaacatatttgtgcatcaaaggacagtatcaagaaagtaaaggctgggtacaatggctcacgcctgtaatctcagcattctgggaggctgagatgggaggatcacttgagcccaggagtttgagaccagcctgggcaacatagggagacctcatatttacaaaaaaaaaaaaaaggaaaaaaattttcattagcggggtatggtggcacacacctgtggtcccagatacttggggggctgaggtggaaggatcatttgagcttgggaggtcgagaatgcagcgtgcaataattgtgacactgcacgccagcctgggagaaagaacaagactttatctcaaaaaaaaaaagaaaaagaaaaagtaacccacaaatggaaaatatttgcaaatcatatatctgataaaggactagtatccagaatacataaagaactcatagcactcaaaaataaaagagcaaataacccaatcttaaaataggcaaaagatttgaatagatgtttttccaaagaagatgtacaaatggccactaagcatatgaaaagatgctcaacattactagtcattagggcaacactaatcaaaaccaaaatgagataccacttcacacatgctagaatgctcagaattaaaaacatgaacaaggctgggcacggtggctcacgtctgtgatcccagcactttgggaggctgaggtgggtggatcacctgaggtcaggagtttgagacagcctggccgacatagtgaaaccctgtctctaataaaaatacaaaagttagccaggtgtggtggcacacgcctgtagtcccagttacttaggaggctgagacaaaagaatcatttgaacctgggaggcggaggttgcagtgagccaagatcacgtcactgcactccagcctgggagacagagcgagactccatctcaaaaaacaaaagataaacaacagtaagtgttggcaggaatatggagaaattggaaccttcatacactgatggtggtaatgtaaaatgtgcagtccaggcactttgggagagtccggcagttcctcaatatgttaaacgtagcattactattgatccaaatggcaattccctcctacatatagatccaaaagaatttttaaaatatgttcattagctaaacagactaagttaaaaactcaaattatggccaggcacgttggctcacgcctataatcccagtgctttggggtggatcacctgaggtcaggcattcaagaccagcctggccaacatagagaaaccctgtctctactaaaaatacaaaaatttgccaggcttggtggcacacgcctgtaatcccagctacttgggtggctgaggtatgagaatcgcttgaacccaggaggtggaggttgcagtgagccgagatcacaccactgcactccagcctaggcaacagagtgagactctgtctcaaaataaataaataaacaaacaaacaaaagaaagaaaaagaaaaaaagaaaaaaaaacctcaaattactacaatcagaaatgaaaaaggggacacattactactgatttgacagaaaggactatcagagagtactatgaacaactgtatgacaacaaattgaataaactagatgaaatagaaaaattcctagaaacacaacctggcaagcctggatcatgaagaaacagaagacctgaatagatgtaacttctaaggagactgaacagtaatttaaaacctccacacaggctgggcgcagtggctcacgcctgtcatcccagcactttggaaggccgaggcgggtggacacgtgaggtcaggagttcgagaccagcctgcccaacatggtgaaaccccatctctattaaaaatacaaaaacttagccaggtgtggtggcaggcacctgtagtcccagctactcgggaggctgaggcaggagaatggtgtgaacccaggaggcagagcttgcagtgagccaagatcgcgccactgcactccagcctgggcgacagagcgagactccgtctcaaaataaataaataaataaataaataaagtaaagaagtgaaagaatagctattccataggcagagcatggcattccaaaaaataagaggaggaatgtgcccacctaggtacaatgcttgcttatatataacaaaaatcatggaggagatgtgctctactacaagggtttgtgataaaggattgctaatctttgtgtaactactgtctttcatgagagcctttattattatctattttttttttttatactttaagttctgggatacacgtgcagaacatgtaggttagttacataggtatacacatgccatgatggtttgctgcacccatcaacccatcatctacattaaatatttctcctaatgctatccctcccctagccccccacccccgaacaggccccggtgtgtgatgttcccctcccagtgtccacgtgttctcactgtgcatatattattatctttaaagtgagacttattttaaaactaggaatgtttttgttcttaagatataaggacatcaggacagttcctgggtctgttatatcctgggtctgtttctgttcccttaactataaacgtcttagggctaagaatacctaacctcttgagaatgtggcccagcaggtctcagcctcattttacccagcccctattcaagataaagtcactctggtttgaatgcctctgacatactgatgcaaagatactcaacaaaatacttgcgaatcatattcaactattaaaagagagattacaccatgatcaagtgggatttattcctggaatgtaaggatggttcaacattcaaaaatctatcaatgtaatataccacattaacacgatgaaaggagataaaaaaaaactacgtgatcatctcagttaaagcagaaaaagcatttggcacagttaaacaccacttcatgagaaatactcaacaaacaaaatagaagaaaacaacctcaacatatataaaggtcatatattaaaatgccatatattgggccaggcgcagtggctcacgcctgtaatctcagcactttgggaggccgaggcgggcggatcacaaggtcaggagatcgagaccatcctggctaacacagtgaaatcccatctttactaaaaatacaaaaaaaaaaaaaaaaaaattagccgggcgtggtggcgggcgcctgtagtcccagctactcgggaggctgaggcaggagaatggcatgaacctggaggcggagcttgcagtgagccgagatcacaccacagtactccagcctggacgacagagcgagactctgtctcaaaaaaaaaaaaaaaaaggccatatattaaaggccatatattaaaaatgcacaattaacatcgcacttaatggtgaaagactgaaagcttttcctccaagatcacgaacaaggcaaaaatgcccacgctcaccactcctatacaacatagcactgagagtcctagccagtgcacttaggcaacaaaatgaaataaaagacatctaaattggaaaggagaaataaaattattattattatttttttattgagatggagtctcactctgtcacccaggctggagtgcagtggcacaatcttggctcactgcaacttccgcctcccgggttcaagcaattctcctgcttcagcctcccaagtagctggaattacaggcatgtgccaccacgcctggctaatttttttgtatttttagtagagagggggtttcaccatattggccaggctggtcttgaattcttgaccttgtgatccgcccaccttggcctcccaaagtgctgggattacaggcatgagccactgcgcccagccaataaaattatttctgttggtatacaacataatcttatatgtagaaaatgctaaagattatgcaagaaagttagaattaataaacacatttagttgcaggtataagataagcacacaaaaatcaaccgtgtttctacatactaacaatgaataaacaaaaaattcaatttacaacagcatcaaaaaatgaatatacttaggaatgtttatatagtattcctaaaaacttaagaagaaataaacttaaaaaggaggcaaaagtcctgtgcactgaaaactataaattgttgcaaaaaaaaattaaagattggccaggcgcggtggctcacacctgtaatcccagcactttgggaggctaaggtgggcggatcacgaggtcaggagatcgagaccatcctggctaacacagtgaaaccccgtctctactaaaaaagtacaaaaaatcagctggacgtggtggcgggtgcctgtagtcccagctactcgggaggctgaggcaggagaatggtgtgaacccaggaggcggagcttgcagtgagccaagatcacaccactgcactccagtctgggcgacagagcgagactccgtctcaaaataaaataaaaaataaaaattaaagatgacacatataaatggaagacatcccagctttatggaccggaagacttaatattgttaagatgtcaatactacccaacatgatctacagattcattgtaatccctgtcaaatcctgatggcatcttttacagaaatagaaaaatctatcctaaaatattatggaatctcaagggaccctaaatagccaaaacaattttgaaaaagaaaaacaaaggtgaaggtcgcacacttccagatttcaaaatgtactacaatgctgcagtaaccaatacggtgtggtactggcataaagacagacatatagatcaagagaacagaatagagagtccagaaataaggctgggcatggtggctcacactggtaatctcagcaccttgggaggtgagaggactgcttgagtccaggaattcaagaccagcctgggcaatatagtgagaccccatctctggaaaaaaaaaaaaaaaagaaaagagagagggagtccagaaataaaaccttgacatatatagtcaaatgggttttggcaaggatgccaacaagaccaatcaataaggaaggaacagtctttttgataaatggagctgggaaaactggatatccatgaaagagagagaagctggagccctaccttacaccatatacaaaaaccaactcaaaatgaattacaaagtgaagtgttaaacttaaaaaaggaggcaaaagacctgtgcactgaaaactacaaattgttgccaaaagaaattaaagatgacacatataaatgtgtcataaaactcctagaagaaatcataggggaaaagcttcctaacatcgatcttggcaatgatttcatggatattacaccaaaagcacagccaaaaaaaaaaaaaaaaaacccaaaaataaacaagtgggatacatcaaactaaaaagttctgcacagcaaaggagacaatcagtagaatgaaaaggcagcctacaaaatggggagaaatatttgcaaaccatatatttaacaggggttaatctccaaaatatataaggaactcctgcaacttgattgcaaaaaaaaccctaatatcccaattaaaaaatgaatgaaggacgtgaatggacacctcttcaaagacgacatacaaatgtccaacaggtaaataaaaagatgctcaacatcactaatcatcacggaaaggcaaatcaaaaccacagtgagatatgtatcatcttacacctgtaaaaatggctatcatcaagaagacaaaagatgacacgtgttgatgaggatgtggagaaaagggagcacttgcacactgttggtgggtatacaaaacggtgcagctgctatagaaaacagtatggaagttcctcaaaaattaaaaacagaactacttggccaggtgtggtggtgcatgcctgtaatcccgtcactttcggaggccgaggcaggtggatcacctggggtcaggagttcgagaccagcctggccaacatggcaaaacctcgtctctactaaaaatacaaaaattagcctggtgtggtggcacatgcctgtaatcccagctactcaggaggctgaggcaggagaatcgcttgaatccgggaggcggaggttgcagtgagccaagattgtgccactgcactccagcctgggcaactgagcaagactctgtctcaaaaataaataaataaataataaaaataaaaatagaactactatatgatccagcaatcccacttctgggtatttatccaaaagcattaaaagcaggatcctgaagagatacctgcacccccatgttcatcgcagcactattcataaaagccgagatgtagaaacaacctaaatgtccaccaagagatgaatggataaagaaaatgtagtatgtacacacaatggatccctattctgccttaagaaggaaattccgcaaagtgagacaatatggatgaaccctgaggacattatgctacatggaataagccagtcacggaaaggcaagtactgcagattccacttaaatgaggaatctggtaaaacagtcaaaatcctagaatcaagagtggaatggtggctgccacgggctgatggtagaggaaatggggagttactcattactgggcataaagtttcagttaagccagatgaataagctctggagatctgttggacaacgctatagctatggtctgcacaatgtgctgtacacgttaaaatgtgtttaaagggtagtctcacgctaagtgttcttatcacaagaaaatacaatttagggccaggcgcggtggctcatgcctgtaatcccagcactttgggaggccgaggcgggaagattgcttgagctcaggagttcgagaccagcctgggcaacaaagtgagacctcgtatctacaaaaaatacaaaaaaaaattagccaggcatagtggtgcgtgcctgtggtcccagctactcaggaggctgacgtgggaggatggcttgtgcccaggaatcagaggttgcagtgagccgattgtgccactacatacactccagcctgtgtgtcagagccagaccctgtctcaaaaaaaaaaaaaaaaatttaaaagagagaaaaataaggtggtcctgcatgggcttagatacaggtaatacactctggtaagggaggtgcctgctctacctgggccctcttgtcagaggtgtggtctctgcacccaggaactccttgtttccctggcaacctcagcctatatgcgctctcagagggtgtctgatgggggatgtcacagcagcctgtaatcgccggctttcttctctggctgagggccaaaggaaactggacacctgtgttccatgacccccatcagtttagatcgagcagctgtcgtggtgccgtgtaagggttggggccttgctacgggatcctggcaggccgcaacacctctaaggtaactcgtccattcattcataaatttatcaggcacctgccctgtaccaggcattgttttagccactgggaatacagcagtgaaaaaacagtttccatctcctgggagttcacattcaggaggccaatctatgggtctggatggttatctccacctgctaggcggggataaatgagacagcacacgtcacacacccagcattagacctgcacacctcaatttaagtaattatttgcctttttggcccagtgtccacttagagttgccgtgggactgattactacacaaacgtctttagagctgtgcaaattaggaatcagctcaatattgcttaggactgacagagctaggattttaaaatctctcttctccaccagaccagccctctgggaataaatattgacaccaaagtgctgtgccaagttgatttccacccttctaagtaatgcgcacaaagagaacccgatgtgtgcaggtgttctaaggttttacatcatgtcctcaacatccccacaaggcaggcagttagcagtttaacctgggccaacctcggtatccctatctacgacacctaatgcaatttgagagcttactctgtgccgggccgtatgctaagtgctttccatggattatctcacactcactatttgaggtaggtatcctaaaaaatgcctggacctcataagatttattgtgaggattaagtaggataatgtatgtcagaacaaaagacattgcctggtacatagtaagtcaatgcttgataaatgttatcgagtattaccagcactaggtattattgtattcccattttacatatggggaaactgaggctcaggaagattaaggtcacagataagtggcagagatctaagcaccccatccctcctcatgcctcaaggaggaagccacaaacaggctgggtcacagcccctgggtgggtggggggaaaggcccctctgcttctttgctccagccctctctgggccctactggtcagcacacacataccaagtgagcttgctcaccagagataaggaagccaggatgtcccagataagggtgagcctggaccacccacagggtttagacattaacttttacagcgtataggcagtaggaccagcaggaattgggttggcactgtcacagccccagctgtcctcaagaaaaaaccgagtgctaggcgcagtggttcacgagttcaggagtttgagaccagcctgggcaacaaggccaaaccctgtctctagtaaaaatacaaaagtcagccaggtgtggtggcacatgtctataatcccagctactcgggaggctgaggcaggagaatagcttgaaccgggaggcagaggctgcagtgagccgagatcgtgccactgcactccaggctaagcaacacagcaagacactgtctcaaaaacaaaacaaaaaaaaagaaagaaagaaaattaaggcactttgactccagaggtgaggcatcaacacgcagtgaccacaccgtgctctgggcctggatcccctcacctccctgggctttcctgaggccaagagcatgtcctgggtacacaaaggtgctcaataaataaatgttagcaaaactcctagaactcaaattaaataagccacagccaggagatgtggacatggtcctgggtctgccaccatccttctgtggggctgtcctgacctctttcctgctctgagcctccgctgttttcccatctggaaaatgaagctctcaacagcaataaggtcatttgcaacatggactatgtaggttcaaagtgagcgaagtcactttatccttgaagaagcagtttacatctaaaaaaattcccttcatacgatccaatatcaaagcccgggacctagtacatcatcataagtgtttgttgaataaatgaatgaataaacatgaatgaaaaaattcagtagccttaagatgcccagaaatcaggggcagaacagccaaaagatggctaacagagatgacagccagattgtgcaaacgaagcaggacaaaggcaagccagtccctccctctactgccaaccaagagagaagagatgatggctgccattactgagccgctagtgcatacgtggcatggcgctaagtgtttgataagcattccttcacttaatttcataagcaatacaaatattcctgttttacagatggggaaactgaggtttggtgggggaaggggcttccccaaagccactcagctaataagtgacagaaccagagtatagaccaaggtcagtctgactccaagacacacggacagcctagctgtgtagccacgggcaagctgctttccctctctaggcttgtttcttcctgcggaagcagaggtaggcatgaccatcagccccccaggcctccctgcactgagagatgctgtcagtggggcggtgctgggaacctccttagcctctccaatacagcacagaagacaaaagttatccaaccaaggcctctgcctgagaagcaagtccctggaggcagacaccaaaaaacgcaacagtcaacacagaaatgtccttagcatatctgcagccagctgctgtgggtggagtcccagaatctccccatctctgagctccaggccaaacaatgctgccatttactaggcagcctacacccccaggcctcccaggaacgctgggccaggcgtgttcctccacccccagcctcacccaccacattcgaaggaagcctggggaaggaattaggactgcccttgagcagggtgaactgagttcacccatgggcaagggcatctggaacagagggagtgaccttgaggttcctaagcgtgtacgtgccatggggccgggtggagggagtcctgccgaggcaaaggggagggaacatctaagggatgacttagataccccccacccccttttacagatgaggagactcaggtggttgcacacctaactacgcgtgcccaagtcccaaggcacctcaggatggaaccaaggcgactcaatttcaggggacctaactccctcaggtactatctggcccacaggtcgcaagcactggctctggggtcaaagtcccctgagcttgagtccatcccatcttccagaaatgccaagatcagggctaagatcagactctgtgcagatgctaaccggacttcagccctagcggagagacaaaggcagttctgtgtctgcagggacatttttcatccatttgaccatctgtctctctggccactgttctctaaagccagctctgctaaggacagtgctggacacaaaggggaaggagccaggcccatgcccctgccctgaggaaagtgacccccaaggaggaggtcaggagatggactcacaaatcccaggacaagggtaagaagggacagggaaaagcacaccagctgttggaaggcggcacattcaactcaaattgctaaatgttttgtaacctttcagttggtccttgagggacaggtaggagtcaaaccaaggcggcgggggtggggcagtgtggggcggtggccactgcaggcagagcacgcgctggcccgctcagagcctgctcagaaagccagggaagaagcacttccctaagggcaacccccagccttcccggattcattagtcaagggacatatgtctccaaagaaccaaagctcccacgtgaaccaaggtgagcactgggtttccactctggagccagacacacctgggtcccaattatggccggacactaacagaatgaccttgggacaagtaacttcggagatccaagcctcagtatgctcatctgtaaagtgggggtgatggtagaggctgcctccctggttgtgatcacatgggatcacacagggaaagcctgtagctcagaacctggtgtccagtgagtacagcacagccattagtagcatgtccatgctgtgtccgtgctgtgtccatgctggaaaccgaaatcaccatccatagagacagccctgcaccagcgcctgccccgtgcaaggctggagaaacaacaggtgtcctgggcaagctcacacctcccacaggacagtaaaacactgcgcacacacacacactgtgtggcgtccatctgttgtccacagcacacgtcaccaactcacgtcaccaactcacatactatacgccttacttttattgtctgttgtctgcctccccctcctccctgccccctgtagaatgtaaatttccagagggcaggccttcgtgtctgtgccccagcacctaaactgccgggcccacagccggtgctccccggggaagcatgtgttggtgagtgaatgaatgactgagtgaatcattgctaccctgtctaaacgagggaggtgggaggccaatcacatgagatcatgcatgtggaatgccagacacaggtaggtattatcatgacggggacagaggccacgatagctgcaactgctaaaggttccaccagagacaacccactcccaaggccaggaagaaggaagcagctcaagaaacacaaggaaaacggaacacagccccacagccccctctacctcctttgtctccacactccttcccacagcactggaatcatctgctcctatctcatacaggaaggagcatgaatccagagtggtcacctggccggggcaggacaaaccagggagcatgtacctatgtagaggggcagccacacccagcctggcgcacagagcctgcgagggaatagggcccgtggggccaagtcagatgtctggattcttatatgaaaggtgtggatgtataaagggccacaccaattcaaatagtacaaaaagcttgctgttgaggaataactttcaaaccttgtttttcctctgttctcacaccacaatcatcaacacagaagacatctgtgaccaaatgtgggggttttccccacacacaggcagtggacaccagctgtgtgtattccgattcaattccgacactatctaccgggagacagcgtcagatctcacaggctgagggctcaggccccgagactgcgccctccaccccacataccagttgcacgtcgaggcctctggaccttctgagatactggcttccagttggggttcccacgaaccctgctttgaatttggttaatttgctggaactggctcacagaactcatggaaacatttacttatgtttactgattcattatagaagatattacaaaagatacagatgaagggatgtgtatggtgaggctgggggaaggggcaaggggcttccatgccctccctgggtacaccaccctccaggaagctccacctggtcagctgtccagaggttccctgaaccctatcctcttgggattttatgaagacttcgttacacaggcatgactgacaaccgtgtacagagacgtgattggaaaaaaaagtgcacggtctaaacccagcaagacctgctgctcagacttttctttctttctttttttttttttgagacagagtcttgctctgtcgtccaggctggagggcagtggcacaatctcggctctctgcaacctctgcctcccgggttcacgccattctcctgcctcagcctcccgaatagctgggaccacaggcacatgtcaccatgcccagctaatctttttgtattttcagtagagatggggtttcaccatattggccagggtggtctcgaacttctgacctcgtgatctgcccgccttggcctccctaagtgctgggattacaggcgtgagccactgtgcccagcctcagacttttcttggcctctctgtgtggcatgccttcctataagacccctctggaatcggtctcttgacccacaatcagattagagtcctgccttaggcaggtgacaggaggacaggagaaggtcaaagagagagactctgtttcctggggcctgctcctgaggcctaactcacccaacatgataacaaaacattgtaataagggctatgggagttatgagccaggaattgcggatgaaaaccaatatacatgtgatcgtatcacacctgccatctgcgtagcctgtgggcgtggttcacacatctgttggctgatgtggactatgagcaacacgcctgtcctgctagttaagatgcctggcttggagtcataccatgaaagccacgagcaggtctgggaccctcctacactgctactgtctgccagctgggtttccaaccctggacacactgtggtgatcagcactatcatccccgacgtccagatgagaagcctggagctcagaggcacgaagaggcgtgtctggggtcacacagcaggacagggtgcaggcagattccaatcccactctgtgcatgatcaactgaaggaatgagggtgtgagtgacagggtggggggcagagggaagcagggctgggaggtgcccggagagtactaatgcaggggaaggacaaggtcagatggtgcactgacctgacaggaagggctacatggacgtgcttggtgacatggtgggcgaatcctggaatgacaatcacccttgctcctctgcatgtgagatagacagcccaggccggctattccaacagcgggatcccagcaaagccctcagttatccacctgctgcttcacagctccatctgctctgggccaccaaccgcacccgggtcactgcccaagggagcagctggacaggtcccccggcacaggcctcctcaccaccaagccctgccaaaaaacattctgccggacgatggcccctcaagtggaagggtgggggtcacagattacatcctttgaactgttcccagtgatgcccagagcctggcacccagagaggggcattccagggggcaggagagaaggctttggagctaggcagacctgggctggagcctggctctgacatgtgggacgagcctctccactccaccgttctaacccttggtcttcacatctgtaaaatgggggtgacaacatctcaatctcgagccaggcgtggtggctcacgcctataatcccagcactttgggaggcggagggaggcaaatcgcttgagtccagtagttggagaccagccctgtctctacaaaaaatacaaaaattgtctgggtgtggtggcacatgcttgtaatcccagctacttgggaggctaaggagggaggattgcttgagcctgggaggcagaggttgcagtgagttgagatcatgccactccactccagcctgggtgacagagcaatacaaaagcaaacaaacaaaactcaatcccacagaactgtgaggatttggtgagatagtcaggaaacagcccacccggcacaggcctagcacagaaaacattcctgacgaggccaactatccacatcatcatgttgctgcctccttccttttgttaccaccccctgcctcctgattcaccctctaggccaaggagctgccagcctcctcccccactttccctccctgagccttagggtgtctgtcccctctgtaaaatgggcatgtcgatacagtaataatacacccacctccagggctgcaaagcctgtgcagactttaaagtgctttacaaagtgctcgtgtgtgtgtgtgtgtgtgtgtgtgtctgtgtgtgtgtgtgtgtgtgtcccaacaaccgggtgccccaatccagagagagggcaggggttggtgagtgccagggagcccgaggaagaccaggtccccacggcaaatggaaagggttctggcacccaaaactgccaaaaagggctgccccaggccaggtgaccacagatccagacttcagaactgcagagatacaagggccaggataaaatgggcagactccgttgaaagacctccttgggccgggcgcggtggctcatgcctgtaatcccaacactttgggaggccgaggcgggtggatcacctgaggtcagaagttcaagaccagcctggtcaacatggtgaaacctcgtctctactaaatatacaaaaaattagctgggtgtggtggcagacacctgtaatcccagctactcgggaggctgaggcaggagaatcgcttgaacccaggaggcagaggttgcagggagccgagatcgcgccattgcagtccagcctgggcaacaagaacaaaactttgtctcaaaaaaaaaaaaaaaaaaaagaaagaaagacctccttgggatcctcccttccaagcccctagagttatggattaggaaacagaggcccaggaaaggaagctcatctcgggtcacacagccagttggtcccaggcagaactcaggtctcctaggctgggcatggtggctcacgcctgtaatcccagcactttgggaggctgaggaggttggatcacctgaggtcaggagttcaagaacagtctggccaacatggcgaaaccccgtctctactaaaaatacaaaaattagccgggtgtggtggtgcatgcctgtaatcccagctagtcgggaagctgaggcaggagaatcgcttgaacctgggaggcagaggttgcagtgagccgagatcacgccactgcactccagcctgggcaacaagagcgaaacaacacctcaaaaaaaaaaaaaaagaaagaaagaagaactcaggtctcctgattccagccccagatcccttctgccacactgaacaactttctaaagtacacagcactgtcagctacttccgggtgtcacattctctttacagttttggctgttttgaggtcagatatgcaatctctgtcaatgaccaagggctggcctctgagcccaggactacaagccacaaaaaccctggccagcaacgtgtggtcatatggggacacatgtggacagcaggctcatcccatccatgccctgctcttgatcctgggaccagtacttcctctttacagaatgctcagtttgaggcaagaagccacactgagaaaggcccacagtcactccttcagggagggtaaccacggcgccagccaacttcctcatcaggaagtcttagggagcgttcttgggctgggccaccccaaagggactttggctgctcgcgacagacccctgccccaccaagggcaggcacgtcctgtctcctttcatctccccagtgcatatctaccatggacagatttcacaccaggccccgtgccggggaccaaagagaacagaaagtgaaggagaggcacgatgaaggtgacagctgatacttaccgaagtttctgtgtgcccagccctgttatagaccttttctatttgtaaacaactattagctcaattattcctacaggcactactgtgaagatccccattctacagttgagaaaactgaggcacaaggacagaaggaattggctctggtctcacagtaagtggcaggcaggagacggattgcgaacctgcaggcttcagaggccgacctttgcgtttttcttttttttctttttcttttttttttttaattgagtcagagtctcactcttgtcacccaggctggagtgcaatggcacaatctttggctcattgcaacctccacctcccgggttcaagtaattctcctgcctcaccctcctgagtagctgggattacaggcacacgccaccacgcccggctaacttttgtatttttagtagagacggggtttcaccatattggccaggctggtctcaaacgcctgattcgtgatccacccacctcggcctcccaaagtgctgagattacaggcgtgagccactgcgcccggcccacttcacaattttatatccatcctgatcactgctggagttatgtgttcatgcgctgttagttgtctcccacatgtagactggaggctccatgaggatgaggaccgtttccctcttgctcactgatgaatccccagcccccaccatggggccttccacttagtagctgctcagcagcatgtgctgcagacagtctagcctcggttcacgttactctgccgctctccctccaccacgcgccagccgcaacaccttctgtggggtcctctgcagactcctgcctcagggcctgtgcacttctgattccctctacctggcactttctgcccccacacatttggaggtctgcctccatctggtcttttggctctcagctaaaatgtcacctcatgagagaggctttctctgtccatcgtgtttacagcacctgctcctgaccctacccaggaatgcctactgcatttccccactgatttttcttccactcacttgtcacttgcccaagtcctctcatctacttcttcactggccttcataccgtctgtttctgccactagactttgagctccgtgaggccagaggccttcccaactctgttaatgacatcgagttggtagcttgaaactgatcaggtggacatatgtgcattcagaaatgggccaaatgccagacaccagagcttttcttcccaaagaactcactcttgctcctgtaatacatgttggaaaagagatcccccggccattgaaagatttgcccagagaccaaaatctggctcagggctgggggtggaggatgggggtagctattagcagaggacattcacgaggtcagcccaggccttcttgcagtcactcattttgggccctgggagtcatctagagcttcactgtctatgccgtccaatatgggagacactaacacatgtgctactgagtgttcgaaatgtggcgacggtagagacctaaatgtattattccattctcttctaattcatttaaatttgaaaactgagacttggttcagttactgggaaacgtttaagaatgttggaacaacttgggtgtgtgaatctacctttctcaactgtaaattttatgacatctaaacacagatcaaggacttctgatgaaaatttagctcccaaatttagatgtgttaaaagtgtaaaatatacactggacttgaagacttagaatgaaaaaaagtaaaatagctcaataactctttcaatggatcacatgtcaaaatgatcatatttttatacactgggttaaataaattatattatggaaactaatttcatctgtttctttttgctcttttggatgtggctgttagaaatgtaaaattatacatataggcctggtgcagtgactcatgcctgtaatcccagcactttgggaggctgaggcaggcagatcacctgaggtcgggagttcaagaccagcctgaccaacatggagaaaccccatctctactaaaaatacaaaattagccaggggtagtggtgcatgcctgtaatcccagctactcaggaggctgaggcaagagaatctcttgaacacaggagatagaggttgtggtgagctgaaatcgcgccattgcactccagcctgggcaacaggagcaaaactccatctcaaaaagaaagaaagaaagaaagaaagaaagaaagaaagaaatgtaaaatgatgcatgtggctcacattatagttctactggtctagagcattttggcttgtttttctccaacttgcaccatttgatattcaaaagcagaagtagtgataaggaagcacagacggattttgccatgattacaaattctgaacaaaaatgagctaatcttgtcaaattgcacatggggtggtgtggtgaatgacctccaccccactcgggggaaagtctgtccctgtctgccatggctacagaagggacctaagacacttggggaacagccagtttctcatcccaaagtccctgagagcagaccccaggtccagaactggttttgtcaaagatatccacatggaaaagtgggctcctaaagccacaggggcccaggcctggtcacaagatgcgcctgagaaccatcacacagaaggaaatatcaaagggttggtgcatccttcaacctgtatctctggacttctcccttctacacttttgcccatttgctggtccctctactttgactgttcttccttctcttatctccccagaggactcctatgcattctgcaagaccccgttcaaatgtcccttcctctgaagcctcccctgaccagatgatgttccacatcacatccttgggcttctggcctagtctattcttaccacttctcaaactgcctccacgtttttctcttgtcctctcaaacctgacttctttctgtaacacagaatatgcctctcccctgcaaaaaagtaccactgggtctccattacctaaaacagtgattctcaagcttaaacgagcatcagagtcacttagattgctgggccctaccttaaaacgccaattgctgggcctcacctcagttactgactcaatgggcctcaggaggggcctgataacctgcatgtctaacaaagatccagggtgtgctgatccaagggttgtactttgagaaccactgcagtaaaagatggagggataagtcttcaccttggcatgcagggccttctacaacatggcccccaattactttaccaccctcatctttcaccacatgctgccctggccctagactagccacctcccaaacaggctgtacctttcatgcctccacaccgctgcccacgctgtctctcctgcctgccatcctttccccctctttatctacccagctccagggccaccttccttgatctcatagtgtctaaaaggcaaatcggaggagctggggccttctacaaagtaacaaatgtaggctgtcagggcagctacaatagaggagggaaagaaatggtcttggccacagcagtgggcctggaggagaaagcaccagcctaaagtgacaatttagggacggaaaagtctagcgtatttatttaaacaacagcatgacagtcgcagtctagttacaaactgtgtttggctctacctggttttccagctctgccacttgctagctgtgtggcctggggagcagctcacatagcttttttgtttctcattttcttttgtaagatgggataaagcaacaacctcacagaatgaagattaaaccacataatgcaagtgaaactcatagcaaaaggccaagcacacagtaaactctcaataaatgctagctactataagtagtatctttggacctgggaaagttatgaacttggtacccagccacaatcaataacaggaatagaaacataatagctatttttcttaatgggtacatagtcagcaggccaacaaatgctgtatgcacagagaggaagatgaatggacagaaagtgggtggctgggtgggtgggtgggtcaatgggagatctcctttggttaatatcaaaagtggctctgtgaggccagtttggcaatagacattaaagactcttaaaaattctcgctgggcacagtgcctcacgcctgtaatcccagcattttgggcagccgaggcaggtggatctcctgaggtcaggagttcaagaagagcctgaccaagacggtgaaaccccgtctctactaaaaatataaaaagcagccaggcgtggtggcatgcacctgtaatcccagctgcttaggaggctgaggcaggagaattgcttgaacccaggaggcggaggttgcagtcagccgagatcgtgccactgcactccagcctggaaaacagagtgagactccatctcaaaaaaaaaaaaaaaattctcataaaaaagctctcagaggacacacaaaaaaatccaaagatgtccatcacagagttgtttataagagcaaaataaaaataaaaataaaaaaaagaaagaaagaaaaggaaatagcctaaatgcccaacagtagagaagggcacagtcagaagatggatttctttggaagaattagaaaaaaaaaaaatgaagaggactgggcatggtggctaacaccagtaatcccagcactttgggaggccaaggccagcggatcacctgaggtcaggagttcgagaccagcctggccaacacggcaaaaccccatctctactaaaaatacaaaaattagctgggcatggtggcacatgcctataatcccagctactcaggaggctgaggcaggagaattgcttgaagccgggaggcggagggtgtagtgagccaagatcacaccactgcattccagcctgggcaacagaacgaggctccatctcaaaaaaaaaaaaaagaagttgaggggtgttgctgagtttggaagatggcgcttgaagctacaaccacactgtgaggatgctgatggagaatagcgggctggtaaagagcccccttctttagtgcagccatcgagaaggatctccatgtaacagctgtagcagtggcagaagaagtgctactatgacaaataacaaaacagccaatacttaccgggctcttacatgtgcccagcactcttctaagcacctatcatgaattaactcacttaatcgcagtaatcactctatgagctaggtactattattagccccaccttacagatggagaaactaaggcatggagaggttaggaacttggttaggattattaagcttgtaaacagcagggctgggattcgaggccaggccatagcgctttctgttccaaatcactagttctactcccaagggggaggcaccacaggaaagggtgggtaagtggccaggagctccctacttcaccatctccttgccctagccctcgtcctcaaagcagatgctgagaaagagctgaagacttcaggaccaggctagctccagagcaccaggccatgggggctgagctgggacagacagggcggcagccttacccacagcttcccgtcgtgatagtaggctcccaggagcttcacaatgtaggggtggtcgcaggtggccaggatctcaatctccacgatgtagtcctccagctcctcctcactcttggtttcaatgactttggccgcagccaaagcacccgtctccttattcttggcctgcaaagaggagatacaggaggtcaacaaggcatgctccgcaggaaactgacctttggacgtgagcccgcagtcctgcatgagtgtgaaaacagaggccggatgtccagatgctgaaccggaacgtacattgttcttaacaatagccacacatcatgtctgtacttaagagtaagtaccatacacccctacaacactatggaataaacaaaaatacaagaatgacacagctctacaaataccaacatggaaagactgttgatttgttcagtaaaaaacgaagaaaaaaacccaagtcattgaacaataaaaatggcacaatactttttgcataaaaaatggaaaactacgccttcatacatgctcacaagcatctgtgaatgtatggaaaactcaggaaagatactgcctgacagcaggctggggaggggccagaaatagggaggcattcaaagggtactttcactctgtttaaaatttaaaatctaggccgggtgcggtggctcacacctgtaatcccagcactttgagaggccaaggcagggagatcacaaggtcaggagttcgagacaagcctggccaacatagtgaaaccccatctctaccaaaaatacaaaaattagccagtgtggtggcatgcgcctgtagtcccagctattggggaggctgaagcaggagaatcgcttgaacccgggaggcagaggttgcagtgagcagagaccacaccattgcactccagcctgggtgacagagtgagactccatcccaaaagaaaaaacatttttttaaatctgtttaaaaattttttttgttgttttttgagatggagtctcactctgtcgcccaggctgaagtgcagtggtgtgatcactgtttactgcagcctccgccttctaggttcaagctaattctcctgcctcagcctcccgagaactggaactacagatgtgcaccaccacgcctggctaaattttgtgtttttagtagagacagggtttcaccacattggctgggctggtctcgaactcctggcctcaagtgatccgcccatctcggcctcccaaagtgttgggattacaggtgtgagccactgtgtctggcctaaaatttgtttaaaatttatgataggaatgtttgatgcgtttatttgcaacatttcccacgcactaacagtagaatgaaaaggcagactgcgtaagtgcccaccagttacagcggaactgtttcgtagatgcatgtcacctaggcaaaacaagtcttccttatgtgaggaataagagggtaagaaaactccacacacactaagatggctataattttaaaaaatggaaaataacaagtgttggtgaggactggagaagttagaacccttgtgcattgttggtgggaatgtaaaatggtgcagccagtgtggaaaacagtttgccagtttctcgaaaggttaaacatagacctatcctaggacctagcaattctgctcataggtatatacccaaaaaaaaaagctcaaagcaaggactcaaggagatatttatatactcatagcagccaaagtgtggaaacaatccaagtgtccatcaatagatgaagaatatttgggaggcggaggcaggcagatcacttgaggtcaggagttcgagaccagcctggccaacatggtgaaaccccatctcactaaaaacacaaaaattagccgggcgtggtggtgggcgcctgtaatcccagctactcaggaggctgaggcaggagaatcacttgaacccaggaggcaggggttgcagtgagccaagatcatgcgactgcactccagcctggatgacagagcaagactccatctcaaaacaaacaaacaacaaaaaaagatgaatgaataaacaaaatgcggtatatccacacactaaaatattctgccataaaaaggaacaaaaaggaaggcaattctgacacaaactacatggatgaatcctgaaaacattatgtaaagtgaaataagccagacacaggaaacatagtgtataattccacttacctgaagtacccagagtagctgaaatcatagaagtggaaagtagaatagaggtttccaggggttagaaaggggaaatggggagttattgtttagtgggtaaagagtttttgtagaggatgatgaaaattttgaggtgtagacagcagtgatggctacacagctgtgaactgatttaatgccactaaatttacacttaaaattggccaaaatgataaatatgatgttctgtatattttaccacaattcaaaagagagagaaataatcatgtaaatggagcaagcaatcccaccccattgcacacaaggagctagtgtctgggaaatgggaggtgaggacccacagctccccaaggatcctgcgaggacgttggtggggaatgctgcagcaaacatctcacccaccctgctgcatggggttccagtgttgaacaagtacacatggccaggcacggtggctcacgcctacaatcccagcatttgggaatccgaggcgggtggcttgcttgagtccatgagtttaagaatagcccaggcaacagagcgaaatcccgcctctacaaaaaaaaatgcaaaaactagccaggcatgatggcatgcacctgtagtcccagctgcttgagaggctgaggcgggaggatcacttgagcccaggagacggaggctgcagtgagctgagatcttgccactgcactccagcctgggtgacaggaaaaaaagaaaacagccgggcacagtggctcatgcctgtaatcctagcactttgggaggccgagacaggcggattgcctgagctcagaaattcgagaccagcctaggcaagatggtgaaacctcatttctactaaaataccaaaaaatcagctgggcatggtggtaagcacctgtaatcccagctactcaggaggctgaggcacaagaattgcttgaacccggaaggcagaggttgcagtgagccaagatggcaccactgcatcccagactagaaaacaaagcaaaactctgtctcaaaaaaaataaataaataaaaaagaaagaaaaaggccgggcgcagtggctcatgcctgtaatcccagcactttgggaggccaaggtgggcggatcacaaggtcaggagtttgagaccatcctgaccaacatggtgaaaccccatctctactaaaaatacaaaaattagctgggcgtggtggcagacgcctgtaatcccagctacttaggaagctgaggcaggagaactgcttgaactcgggagacggagattgcagtgagccgagattgcaccacggcactccagcttgggcgacagagtgagactctgtctcaaaaaaaaaagaaagaaaaaaaaaccacaaacacatttccctacaaaatggcccctagccaggtgcggtggttcatgcctgtaatcccagcattttgggaggccaaggtaggtggatcacctgaagtcaggagttcaagaccagcctggccaacatggtgaaaccctgtctctactaaaaagtacaaaaactagccaagtgtggtggcacatgcctgtaatctcagctactcaagaggctgatgtgggagaactgcttgaacctgggaggtggaggttgcagtgagccgagatcgcaccactgcactccagcctgggtgacagagtgagatgccatctcaaaaaaaaaaaaggcccctaaaagcacgctgctcatctggagaccttaaacagcaatctattgcaaagcacagggaaaacgagctcctctggactgaatgaacatattatagcttagtctccaccgtggcaccttcctaaggataatattgatcacgctccacccttgccttccataacaactctggaacctgactgcaccggaaattccggctggccaagttattcctgcacatctagcaccctatggatgacaatgagcattcattcctgtcatcacagggacccgaggcttggagtttcccccattccacagacggacgtgcaagtccaggtttagaggggaaatgtgattggaactaggggagtggcaccagaatttgcatcaggatcctctaacgtcaaaattttctgcactttccaccactgtacaaggtctccctacaatctccaccacttagaagtctctaagaccagatgccaacagacatttaacagagcactactgggccagccctgcacagggtgcccacaatacagacacagagcaaccctctccctggccagctcaaagtctagctagagagacacagccctctactgaaagtgacgagacagcatgcttatgatggggtgtgggagagggcacctaaccccaccaaggagccttctggaaggaagcaatactaaggggtgggccgggtgtggtggcgcacgcctgtaatcctagcactttgggaagctgagatgggtggattgcttgaggtcaggagtttgagaccagcctggccaaaatggtgaaacctcgtctctactaaaaatacaaaaaattagccaggcgtggtggtgaccgcctgtagtcccaactactcgggaggctgaagcaggagaatcgcttgaacccaggaggtggagattgcagtgagccgagatcacaccactgcactccagcctgggtgacagagtgagactccgtctcaaaaaaaaaaaataaaaaaatactgaggagtggtgcaagcaggcaatttctctccacatttgctttctgtacactcattctcagtttagataaatatttctttcattaattgagctgcaaagtccccaggatcccatgcagtgataataatatgccatttgtcatattatgtcattgataataatatgttggagtggacccttgatccactctgcatgcagcactaggcagtgctgcttatatgtgtcagtgcatttatctcctggatcaccctacaatgtggtgctgtcaatatctcatagacagatgaggagaccgatccgaggcagagtaccctaggaatgaggcggcagagtgggcttggaactaaggcagtcccatgcccaggtgtgcacactcttggtggccacattcttcctccatccaagtcccttgcaggccagagcctgggatgcctccacactgggcccaggagcccagttcagggaaggacatttcatgatgggccattttccagagccagtcattgtcctagaatttaccagctcatgtggctctaactctgtggggacttctcccctaaactcaattttgaaagcttgtttaggccgggcgcagtggctcacgattgtaatcccagcactttgggaggtcggggcaggtggctcacctgaagtcaagggttggggaccagcctgaccaacatggtaaaaccccatctctactaaaaatacaaaaattagccaggcagggtggtgggtgcctgtaatcccagctactcgggaggctggggcaggagaattgcttgaacccggaaggtggaggtgcagtgagccgactgcgccactgcactccagcctggacaacagagtgagactccatctcaaaaaataaataaataaaaattaaaattaaaaaaagcttgtttagaatgccttagccacccatcatttaagttatctggtgcttgctcgctcacttgctctctctctctctctcacacacacacacacagtcttaactgattgtgtccctgccttttcattccttgtaaagctgatttctgtacatccccaccagagggctggaaagaatcctttccttctgcacacattcctctttctcttcctactcctccccttcctcctctccaaacccagaagagaggttacaccagctctgctcctttcctgagaggaaggttgaaggcttagtggagtggctagagccagggccagtgaccaaggcaaccaccttgaccatgctgagctggccaagggccccccttcaatcactcatctttcagtcctgaaagctggcaaagaaggccgcatgtcacctttacctgggtttcctgaaaagggatgttgtctcctgatggtggaggaggcccaggtggggaccattttccaggagtgcacaaaccttgccttgcccaccatcctgaaaggcagcactgaccagacggccaggcctcagccagtaccagtgtcaacacaaggcacgcccgctacccagcacctcactcagattccatggagaccagaacctgccagacagaggttagtaggaaccacggaccaaaaagtgacttggccaaaattaaattctttcaaagcctcgttgaggcagcaatccatcaccttgaggccacaggagatgtaatacggctgatgataaaaacagctaacactgactgagcactctctgtgttccaggacaggacttaaacggaatttctcacttcatcctccatccagcccttaaagacaaatattattgccagtttacagatgaggaaaaagattcagagaggtggggtgatgtgcctcaggtcacacagcgagtgggggtggagggtaaaggctggatccaattcaagccttccttacctccaaaacatttcccccaaagacctttcctgatgactgtccagagctccctgttctatctccctttgctaaagatgaatgacaatcacagccaatagcaaccactcacagcaagggagtgcctggcagctgaggagtgctcaggcagccagaatgtcatctgccaacaaaccgttaaggccagcgttagccttggtgccggtttcccaagtgagcagactgaggcttgggaatccagcaggactgtgagctgtcacagtggcctcctgactcccggcctagtgttcactacaccacactgccaggaagcagcttattccctagtcattcattcaaccactatttacttggctaaattctaatgaacaagacaagcaattttctgcctaggaaaatttgcatgagggaatcactgccctcccatatcataattcacccttccccgatttttcttcagcagggaccaacctgccctcatttccagtccctaaaatacaatatctagaagtgggtagggactcatcttggccaatcagaataccgcgctccctctggccacagtgattggctcaagaataggcacgtggccaggcgcggtggctgacccctgtgatcccagcactttgggaagcctaggcaggtggatcacctgaggtcaggagtttgagaccagcctggccaacatggtgaaaccccacctctactaaaaatacaaaaattagctgggcgtgatggtgcatgcctgtaatcccagctactcgggaggctgaggcaggagaatcacttgaacccgggaggcggaggttgcagtgagccaagatagcgccattgcactccagcccgggcaacaagagcgaaactccatctaaaaaaaaaaaaaaaaaaaaaaaaattggcatgtgatcaagtcagccaatgaaatgcattctcagaacaactgctgagccagctgagactgctgcaagctctccttgacttctagcctccagcctaaagccatcctgcccctaagggggcctgaaaatcaaactaggtctgaggcactaaagctgagagagggcatgagaagaccgttgatcccttcaattaacttttacaactctctattaagggctttattttatatataagaaaaccgatgcttagagagatgaagtcaccggcccaaggtcacacagcaggttcaaaggattaggaattgaattccggccaatgtgggttcaaattccatgtatctgacagctttgccagagatgcctgtatattctgcaaaagtctcatctgggcctcagtctcccccctatatgggggaggatggatggtgaaatgatgtccaactctctccatgctctgatgagagccgtcttagggagtgggtgagtcttggaaagctaagggtggtccaagtagatgaggcccacgtgggagttggcaggcaaggaatagcataaagaacaagcggctgtctgtggcctccgatgtccctctctcccagcggctgaagcaaggccgggttccggcgcacgatgaggggagccttggcccagccttccactgctggctggcagtgactaacgcctcagcccacacccttgcgagcagatacacagtggccacttgtgttttctggcccaagcacctctgtgggaacaatcctcccccttgtacccgcaaggggcccagcctggaggaggtggggataaccctcccagccggggacactgcttcacccaaggggcccagccagcccagtcaggggctgggggcttcctgagagtcagctgcacaaaggccagcaggggacccacccccaggccctccccttccctcccggctgcccactgatcagtgtgttgctcccaccgcttcccgggaaatagctgatatcacagacctcaggacagtgagaaaacattagccacccctccttaactccagctccccaacccaactctgcagatgaggaagctgagtccaccaaggcgaatgcagagaccagggtcccatctgtgacacttgtctcatctgtgacacaggtgtgcctcaagaagagtaaatgagaacacaagagcaaagagcctagaggggcctgttcctggggcacccctaacctcaggtctgggagccactggagctgctgggaaattgaccctggggctggggagcagtgggggacttggccagcatccattcccccttgtggattcaaaactctagttgcttttggacactgcctctccctcgctctgagtccaagggattcatagcgggttgacctcaccctgggccggggcataccccaggcccagctaatcagaggactgaaccaagggcgcctgaaaatgaaacttgtcacagtcattggttcagagatgcctgggcatggtcccaaggcaggccaacagggtcgtgcctgggtggctctttaaatttgtttttggttgtttgcttttttttttttttttgagacggagtttccctctttgttgcccaggctggagtgcaatggtgcgatcttggctcactgcaacctccacctcccggattcaagtgattctcctgcctcagcctcccgagtagctgggattacaggcatgcgccaccacgcccggctgtttttgtatttttagtggcgacggggtttctccatgttggtcaggctggtctcgaactcccgacctcaagtgatccgcccaccttggcctcccaaagcgcagggattacaggcgtgagccactgcgctcggccagttgtttgcatttttgctgaagttatcaggacagcagctttttctttctctggcgctgctaaatcggtagaatgaaaggctgaagggtcttgtagcccatcttgccactccttcagagtggctgccggagggtgaggccaagatggcagaagcagggctcacaaatggagtgctactggctctgtggaacacctggagacagctgtacctgaaggcggactctacccgtagacttctcagttacatgagccgataaattcccttttggattcctgccattggccaccaagaaggagatgagttccctctctctggggctgttccagcaaggaacagatatctagaggagtgcctcaccacacaacacgcgtgtatcaagggccaccttcattcccaagcccaccataatctataaggtgacattcactgagacctcaccaaagagctgactgataatctaggatttggagacctacatggaaaacacgtaggacagaggccaacagcaactatggaattcttctgccaaaagaatcttcctccaaaaaagtggaaaggatcattttacacttaataaattagcaaaaacatgcaattgtgacaacccagcactggagacgatgtagtaaaatgggtgaacgcattactgacaagaatagaaactgattcaatctttcaaagacaacaattggaaataggttttaaaagccatgaaaataccttttcagcctattatccctcattcctgggaatttaaggccaggaaatacttttaaaaagacaacaggccaggcacggtggctcgtgcctgtaatcccagcactttgaggggctgaggcgggcggatcagaaagtcagaagttcgaggccaggctgaccaacatagtgaaaccccgtctctactaaaaatacaaaaattagccaggcaagatggcgcgcacctgtagtcccagctactcgggaggctggggcagaagaatcacttgaacctgggaggcagaggttgtggtgagctgagatcgtgccactgcactccagcctgggaacagagcaagaatctgtctcaaaaaaaaaaaaagaaaaaaaagaaaggcaacaaaagaaatgtactaggatcatgttcagtttatattagtccataataatagaaaaaaggtgaaatcactaaagacaatggttaaattaacttaatgggatattaagtaacccttaaatgataaacaagaagataatacagtaatgagaaaaaatccttaagccataatagtaaataacaaaataggataatgaaattgtaactaggctacaattttcctttgggaaaactgcatgtgcctatggacagggacgagctaaaacacagcataatgaagtcaagcgatttataaagatgattttcacccagtgacatctggcaattatccacaggggtcccagcgagggcagactgggactggtgcaaataagcctcccacatagagagagaccacttcatctgagcttgccttacacgttccagagacagacaccctcgttctttcggaacccacatgagctgcactgtctgatacagtagctactagccgcacgtggctatttaaattaatagatatgaagcaaaaatttagttcctcagttgcattagccacatttcacgtgccaccacactgtggctaccgtattgaacagagcaggtacatacagaacacttcgatcactgtagaaagttcacccccagccctctctggcagaaaatgcctcttcggaggtaagggagcatctaaaactcactccactgtcccagacccagattctgaaacatgggtttctttttctaggaagcaaaaggggacatgtgcaaggaatcagcagaggaaccccacccaatgatcatttgctacggaagtctcctagcaacctggctgagtggcaggtgtgagggaaggctcccagctgacctgtcggatgaaaagcctgggtgtgggtcagagccaaaggacggagcagtcagggctcagggttcctatttccctgtctttattctggacggccgtgccaggcatgtatcaaatatggttcaggccactggaaccaaagcagggcttggtctgggtgtcacacaatgtacagctgtgctgtccctgcctgaacacagttaatctttgcatggtgatgaaggcggtcaatcgcaggaagggctgcgactctatttaggagagagaaaatctggccccagagaaaaccacggtcacagcagaactgactatgtgcaggaaaagggcccaacataaagccaaagggggtgacctgaggacagcagacacagagccggggtggccagctgacatgggcttgagtttagagcccactaaggcccctggctggcaggcgtgagtcagcagaggacaggagccttatgcaccacgggcctgggccttgggaggcccaggtccttgcgggctcaggatgaaaaaggcctgtcaaaccctcttatggtctcttgctgcagggcaacgagcagcccgcctttctccagcacaggcccatgaagtacacagaggtaccaccatcgccttttatggaagagaaaagggaggcccaggcagagaaactgacttgtcccaggtcacatagctaggaggcactggcaggcctggagctcagctctggctctccgcccagtgctctgtgccctcagcagcccaccaaagttgtcatgccaggggtctcccgcccagctgctcagtgtgccagccctccttcccctctttccctccgtggccttcaaccagaaacactcagggtgaaccctcaagggctcctagctgctgacaagctaacgcaggagctccctggcccagcactcacaccctcatgacctgcccctgcccacttccccagggtcccgccattccctctcactcagccccgtgcctgctgcctacttcccagccctcttcatgctccctcctccacagagaacacctcctccctacctgcgtttaatcagccagcaaaatcgaactcaaccccagcctagctcatgacatcttccccagaaccccagcccacctccccgactagaatctctttgcaccttgttaaggttttcatcgcagactgccctgtcccctgggcatctgcatcacagattctctgacctggctgtgatctctgaaaggctcagcccacctgactcctctcagtctaccctacagagcctggcacagaagagccagtgggtagatgggacagtgggagtgggagtgaacgggaagataggtgggcagacaagcacatggaggagtgaacggatgggaggtaggggctggaggaatggatgggaaaatgagttaagtgggatggtgaatggatgagaggttgggtgaatggatgggtgggcagaagaatgggagggtgggtggatgggcagatgaatggaaggatggacagatgcatgggagagtgagttggcaggggcatgaatgggtgtgcatgagactaggtgggtatgagagggataaaggaatgacatgtatgtccagggagtagacaattatcatcttcccttctttccaaaaggcacttgagcccacccttgctgggttctatgaacatcagcctctctccttccttcaatcctgtagccaataaagttattgttacaggaatcgaccccgctccctccgatgtccccatcttggcaaacttagaaatgagcaaatttctatcgagcaatttgtggaaacagcgcaggacctaagctcaagtcccaactctactacttactagctaagtgtgcttgcggaagccaggacaccaggccttcgtttcctgatgaagacataaacaatttcagtgacgcacgggaaaatcaataaaccactatgggttagccagttgactattggttgttactgttctctcttggaactgtgtattttttgtttttgaaagcctaaaaacatgtttattttgttcaccaatgtatctattactctggtcatggcagacactcagtatgtatccttttttttttttttttcagtatgtattcttaaatgactaaggaatgaatgaataaaactggtgtttgtgcctccctgcaaacagagagaaatgaggtcctccacataagagaggaaaggaaagtgataagaagtcgactttctccataacatatttctatttctgaatctctggctgttctccagttttgaaagatggcacctctttaccttgcaggagccaaagccttcgactgggccaggatgtacacagctgagtcctgccaagcagagagaaaccacttcccaatcaatcatcaccatgccaagtttcagctcaacgacaagtgagatggccaagtttcagaacaagtgacatgtaaggatggcaaagatcatgaagcccaaaagcagaatgacgtggctttcaaagacgtgccttgaacactgtctccctcagggaggggaagcctggccagccaccctggcacagctcagggaaatgttgagccgcaaaagttcttgtgaaccagcaaataaaatacggaaacccaaacgggattggcccaaagataccaagtcttggccttggctgaaaacgggagcaacctgtccaacttggctggggatgtgggagccctcagatgttagctctccaaaaccaatggggaatccaacccacctatcactgataaaggaggcgtgaaaggtgcccatgggctctgcctccttgcaggggaccgctcccacctttcccaggctcctcgctacccagaggaggacagtgagactcaatgcggagttgcagaggggagaggactccggggtccacagaggaggaggaagtgaggaaggaagcactttatggagggccacctatgccccctgcctgcatgtgtttaagacactcatttaatcttcaccacaaccttgggggtcgtgtccattcatgaactctgttttagagacagtatcaaacctcagagaggttaagtcggcctgtttattccatcaacagtccttgtggtgctgaagtaacatctgtgcgttaaagacaatcttaaaaatataatggtacaaggaagaaaatcaaagcttttcataatccaagggactcgcctttggtattctgcggtgggacgttcttgaactgtttcccaatcccagctctaacacttcccagctgtgtgcccctgaggggacttctttgtcctcacttcccagccttttatacctttacataatgaagatgtaaccgctcctcctccagaagctgttgtgagcatttaatgagttatacgtgaaaggcgcttagaagaggctgggtccttggctgcgcatggtggctcaaatgtgtaatcccagcactttgggaggctgagacaggtggatcacctgaggtcagaaattcaaaaccagtctggccaacagagtgaaactccatctctactaaaaatacaaaaattagccgggcatggtggcacactcctgtagtcccagctacttgaggaagctgaagcaggagaatcacttggacccgtgaggcagaggttgcagtaagccaagatcgcgttactgcactccaacctgagcgacagagtgaaactcttgtcttaaaataaaataaaatgaatagaatagaatagaatagaatagaataggctgggtccagagtgaaagtctagaaatattcactcattatactctctctggccacaaatatattcttccatactttacaaaattgggattaaactgtatacactggtcattcttactttcacttaacagtatagcatggctggacacagtggctcacacctgtaatccccctgtaaggccagcactttgggaggggaggtgggtggatcacctgaagtcaggagtttgagaccagcctgaccaacatggtgaaaccctgtctctacaaaaatacaaaattagccaggcatggtggcacgcacctatagtcccagctactcgggaggctgaggcaggagaatctcttgaacccaggtggtggaggttgcagtgagctgagatggcaccactgcactccagcctgggtgacaagagtaaaactccatctcaaaaaaacaaacagtatggcatgcacagcccttcggagcacaaaacactcttccccaacgtcatctccaagggtggcagaatgttccactgagtgacgggaccctcctctatttgagcagctccctatcatggggccatgccaccctggtcgcgtggtgccgcatccaaaagcataggccttgatttacatgttgtcaaatgctctccaaatggcaggaccaagctatacccgtgttccaccaacactaggtatcatccagatgtgacgctgggcttgggtcagttctgccacatctggctgtgtgtccttggcactggcctcatgatggtgcaggtgtaaagatgcctatgtcccactgtgagaggcactattgtccctattttgcagaaaagaaaaccaaggttcagaggggtgacatcacttgcccagggttacacagcaatgccaactgctgagctgcgacttgtaagatgaacagcatccccaggtcagaagcctctgaagtggccgggcgcagtggctcatgcctgtaatcccagcactttgggaggctgaggcgggtggatcacttgaggtcaggagttcaagaccagcctggccaatatggtgaaaccctgtctctactaaaaatacaaaaattagctgggtgtggtagcacgtgcctgtaattccagctactcgggagcctgaggcaggagaatcgcttgaacccaggaagcggaggttgcagtgagtcgagatcgcgtcactgcactccagcctgggtgacagagcaagactctgtcaaaaaaaagaaaaaaaaaagcctctgaggcgaggagacccgcgtggggtgggctggggtcttcaggggtcctctcctagccactgtagatggtcctgcagccagaccagaggccagcaccagtgtctggagctccagtttcctcattaacagaggcgccccagtcacctctccccagctcaaagatgggtttcctatcacctcaaagtggcggttgtggggagggcagtgagggcccccaaaaagaaggggtcttgagagggagctcaggcttccccaaccccgtatcagggccctctaagatgcaaagcaagggtagaaagaatctcagggctgaccagggaggttcgccagctctgacaagggtcattgcctcagggtgacaatgctggctctgacagtggcaactgcctcatagggccaagcgttgggcctgggctcccagacaagactgtgtggagctttccaggaaggagagtgaagggaagccaggcatcagcattagcttctttctccagggcacaaatgctccacttctggtgccctcaactacaactcaccctggggcaggcacggagctgagaccttacactcatcccaccagaccccccagtagccctgtgccgtctccaggctgggatgcaggcttattttatcttcataacagagagagcaacaaactgaggctgatcccagaacgctttacatccctccacccagaagcaccctgcagtgtaacaggcaagggaggagttcagggcctcaaggcaatctgcctctgtcaagccccaggaaggggaagatcagcttaagtcaccccacagaaatggcaacaatcacagtaacagccacatttacatcttgtgtgtgaggcaggacagtgagggctggccacaagcatcaatgttcgcaaagtcggggcaaagggctgttttgatttagacgtcacagctcaagatgctgaggatcagaggggtgaggtgacttgcccaaagtcacacagccaacaggcagggaagctaggaggaagctcagaactgattccagcgccacatcataaccacaatgcggcctcccgagtgtagccacgtcataaccacaatgcggggcctgtccagggagaggcaacaagcgaggcccggcattcactcactcatcctttcaattgctcagcaggtattttttgttgttgttgttgtttaatttttttttgagacggcgtttcactcttgttgaccaggctggagtgcagtggcgcaatctcagctcactgcaacctccgcctttcgggttcaagctattcttctgcctcagcctcctgagtagctgggattacaggcgcgcaccatcacgcccagccaatttttgtatttttaatagagatggcgtttcaccatattggccaggctggtctcgaactcttgacctcagatgatccacccgcctcggcctcccaaagtgctgggattacaggtatgagcgagccactgcacgcctgcagctcagcagttatgaactgaacatctaccctccgcgggccctgttccaaatgcaggggacacaaagatcactccttgtcctcagggacttcacatctgctggaggggacagaaaataaagaaggagaaacacaagagaatcccagtttgtaacaacagccctgaaggaaatctacaggcagctgccaccatggtcagggagcggtggtcgggacaggcctctctgaggagggaatctgagttgagacccggagaatgaggaggagccagctgtacagagtcacaggtagactggcaggcaggggacccgccagcgcaatggcaatggtccggaagcagaaaggagctgcgcttccctcagctcctcccagaggcaccactggcctccaccaccctgcaccacctgacccaggctggctggagttaactcttcagtcaccagtgcattggtaaagtccctcctcgtccccatccttctccccaagtcttagtgtctaattctggctctggtatagcctgttttttcttgttattgttgttttcagacaacctgcttttcagtcagggtcttgccctgtcacccagactggagtgcagtggtgtgatcacagctcactgcagccttgaattcctggcctcaagtgatcctcctgcctcagcctccagagcagctaggactagatttggtgccaccacgcctggctaattttttaaattttttggaagagatggagtcttcctatgtttcctaggctggtcgtgaactcctagccacccgaagtgccagccctgctatagtctgttagtatgaaaaaatcggtaagctatggggggagaagggaaaaaatgcatcacaggggaagcagagagaaaggggaagagaaagagtgaagtggaaggtgagtatggtggagagagggagaagggagaaggaagcctttcagcactcaccctccctgctctgctgacaagacccagagacaccctgcactgcaggctgctgcggtcccagcagccccacccaccagggtgccaggaggggccccaggagcactcagcttccccgccctgacacccgcccttttcccctgccacttcctgtgctagtcctgcctgcacccctcaccacttcctctgcatgagaggccaccatccatcgccatccagctgaggcacgcttgcaaagaagggtgacattcctgggcacagagaccacaaggccaagagtagacaccgcactgaagcgaccgtggactgcccaacaagcccgtttgtctttctctctgtgctatgcaagagaaaagagacacgctcctggccagaaagatctggatgcaagtcccagccctgccaaaaaaaagctatgtgaccctgagtaagtcactgtacctctctgggtctctgcttcatcaggtgtggagtgaggatatccccctacctttcatggggatacgagaagaataaatgatggacatgtaggaactgagcaaaagtcaactccctactcatctatcttgttcactttggaacccacagggcctggcacaagtaggtgctcaataaacaatctagagctaacacttacatgacttcttccagtgtcctagactaagtggtttccatgggttgtctcatttcatcttccaacagccctatgtgattgtaccattaccatcaccatttcacagcttaagaaactgaggcagagataagtaaattcctcagcatcacacagcctgcaagaggtagagccaggcttgaactgcaggaattcctccaggttcccagacaacctctgatccgcagcagacacaagcttgccttcctgtctcatcctctctgctctctttccatctcctaagatgccctagactctttcatgcctcctgtctcacaaacatcttctcaggctggtcacctctcacctgtcacctcactccctcagctctgattcgggttccaactacagctctggccttccctcccacacccacctggttcggtcaccagggtcggtcactctggcccagcctccattcagcatggaccaccttagttttgggcagccaggaatcctggctctggcaccctgcaattgtgtcgcctctctggtcatggcctcctcccccatcaaaagacagtccttctctaatgttacatgggctgacctgatcaggccctgggggacttaaggcaggcaggacattttttgagatcaaaactgccaagtctaaattcattggcttagcattcaaagctctcttgacttggtccctgctatggtccgagtgtctgtgtccctacaaaattcttatgttgaaatcccaacctccaaggtgatagcattagaaggaggggccttttgggaaatgattaggtcttaatgagattagtgttcttgtaaaacagaccccagaggccggtgcggtggctcacgcctgtaatcccagcactctgggaggccgaggcgagtggatcacttgaagccaggagtttgagaccagactggccaacatggtaaaacgccatctctactaaaaatacaaaaattagccagatgtggtggtgcacgcctgtgatcccagctactctggaggctgaggcacaagaatcacttgaacccaggaggcgatcatgccgccagtgagccgcgatcatgccactgcactccagcctggatgaaggagtgcagtctttaaaaaaaaaaagaaaagaccctagaaggctagctgtccttctgtccctcccactatgtgaggtcacagcgagaaggcaccatctatgaagcagagcaggccctcgttagacaccaactctgtgggagccttgatcttggacttcccagcctccaaactatgtgaaataaaatgtttattgtttgcaagccatccagcctatggtattttgtcacggcagcccgaatgagccacgcccccaaatgctattgcagatctggcctggccctggcccatgcccacttcccaaatccagtgaccactgggtttgaggaggcaacagtagaggccagatctgtcgtgcccaacatggcagtcactagccacatgtcactatcgagcacctgacatgtggctggtgcagatggagatgtgccataagtgcaacacccaccaatttcaaagacttcgcatgaaaaagaatacaacacattgctttaattctgcatttattacatgctgaagtgataaatataccattaaaattcatttccctatttttcctctggtttgaatgaggtgactaggaaacctgccattgcctgtatagcctgcgtaacactcccttggacagcatcattagcccagagacagaagggaccaacttacctgtttttgttttgttttgttttgttgagacagagtcttgctctgttgcccaggctggagtgcaatggcgctttctcagctcactgcaacctctgcctcccaggtttcaggtgattttcctgcctcagcctcccaagtagctgggactacaggcatgagccaccacacccagctaattttgtatttttagtacagatgaagtttcaccatgttggccaggctggtctcgaactcctgacctcaggtgatccacccacctcggcctcccaaagtgctgggattacaggtgtgagccaccgcgcccagcccaggatcaaattatctgatacttacagagaagaccgaaatctgggattttctgtgaaatctcttcatttaaaaatactggcaatcaagtcaaatttggttcaacccgcgtgggggccacaccgtgtggccccatcctcaggccacatcaggccgctacatcaggctcaacggccagcagtcagcaacctcgggccactcatgggccggcctctctcctggcctggacttccttccctccaccttatcaccatcccgcctgccgtaccaggtggaagcttccccgctctcggctggctgcctgcttgtccctgtacaactctcatctcaggcagcacctttcggtctcctcccccatgacacactggaagcagcaggggaggccgccttcttatcctgagcacctacggtggctaactggatacccgctgtatgagctactcaggcaattctcacaatagctcccgcaggtgtagtcagccccactgtactcatggggaagctgagggaggctgagacaagccacttgcctgaaaggacacagtggctaaatggcacagccgggatgcaaaccctggcttctctgactgaaagacccaactctctcattgcacacccagagacctgacagaggaggtcaacaaataccgtctgccgggctgaataaaggaacgctcgtctgcacaagacagtggttctcagctggagccattatgcctccctcccccatggagcatgtggcaacgtctggggacacttttggttgccacaactgcaaggaggtgttctggcatccagtgggctgaagccagggatcctgtggaacaccctataatgtacgtaacagctccataacaaagaacgaccccacccaaaatgccagtagtgccaggtgaggaagcgctggtatgagggctatgctatcaacaccgaggtattcctgccttgtccctaaagtcatagtgacaggtcaggagcttctccatctgacaccaagagcagcaatcataacacctcatcgtcatttcctgagcccttcctgggtgagaatcagatgctaaacacatcacctcctcaactcctctcagccctgtggccaactccactttgcagacacaagattcaggttcagaggaggaggtggtcacctatttggggttcaaatagggccaggactaggacccagatcctactgagccccaaatctcttcccttcaccaccaccctgttccactaccctcagcagcagggggcctgagagtgaccacccagggctgttctgggggctatggggtgacaacctctggagagtccccctaatctaggtaaccttggcaggccaggccacaggagagtcctaggtggagggcgggtccatctgtttgtttcgatcccttccaccgcagcttgctttcgcatcagccaaaaaaaattcccagaacggccagtgtgaaatcagacccgcagggctgtgggcagggccccacgcagaagccgaagggcgtcatccacgggaagttcagacccccttggatgagggctgagtcacgagttagaaacccactcacaatagcatggacttgggtttaaaaatacttggctgagcggaaacaaggttactgcctggggccagatctctttccggaggaggaggggaggactgagaccttccccatccccagaggaagtggaaacccaagctttcaaactagtaggcaggagaggaggtgaaaggagaagactctggctcagggacgggcaagacggcctgggagggctcctacctcacttaacctgagcttcctctcaaccaggcagggagggcagaatgtcacatcactcctaaagccagcacacagcagaggcacctaagctctgagcagcagctgccaaggccccctgtgcacttgaggggtctaagaggacttgggaattggctctcagcaatagcaagagacaaaggggacctgtattaatttatctcattttatttttaaaatcaccctcaaataggcatatgctttgacctagtaattccctttgaaagtccggcctaggccgggcgtggtggctcacgcctgtaatcccagcagtttgggaggccgaggcgggcagatcaccagaagtcaggagttcaagaccagcctggccaacatggcaaaatctcgtctctactaaaaaatacaaaaattagctgggcatggtggcgggcgcctgtaatcccagctacttgagaggccaaggcaggagaatcacttgaacctgggaggcggaggttgcagtaagccgagttcgtgccactgcactccagcctgggcgacagagcaagacttcgtctcaaaaaagaaagtctagcctaaaaggtaaattaaaatacagcaacggccaggtgcagtggctcacgcctgtaatcccagcactttgggaggccgaggcaggcggatcacttgaggtcaggagttcaagaccagcctggccaacatggtgaaaccccgtctctactaaaaatacaacaacaacaaaaaaaaaaaacattagccgggcgtggtggcgcacacctgtaatcccagctactcaggaggctgaggcaggagaatcacttgaacccaggaagcagaggtttcagtgagctgagattgcaccactgcattccagcctgggcaacagagtgagactctgtctaaagtaaaataaaataacatacagcaagaactctacaaagctgttcatcaagatacagttggctctgtgagaacccttattttgaacctgccaactttgctccaacaccatcaacataccagggagtgattctgctataatgctaaggtcgtatttggttacatatagaaacagcaagtgaacgccgcagatgaatgcagaaaactgcactcagctgactcaggtgttgaaggaatgcacaaaacacacaggcacacacctctgacatccatcaaccacctctgagccacacccatgtgcatctgccatcagattgcacacacacctccttccacagctccctacgctgctgccttcccagcacccacatccacccatgtggtgcatcttttttcaggtaaaatgcctacttaccgcagcatgtgcgtatttcttctccacgtaacttgcgtaaaactgtactactggattttagattctgaactttttttaaaagacgccactgatgaagtttttaagtgctgtgccctcaaccccattcttcccataaggcctctggtttttactgcatgattttgcatagctctgtgatttttacgaagggataattgtcttctattacgtattacgtaaagcgcctagcacagtgcctggcatacgattatttaatttattttaattttttttttttttgagacagagtctcgctgtgtcactcaggctggagaacagtgatacaatcttggctcactgcaacctccacctcccaggttcaagcgattctcctgcctcaccctccctgagtagctgggattacaggcgcccaccaccatgccaggctagtttttgtatttttagtagagagggggttttgccatgttggccaggctggtctcgaactcctgacctcaggttatgctcccacctcgggaggtggaggttgcagtgagccaagatcgcgctaatgcaatccagcctgggtgacagagcaagactctgtctaaaagaaaaaaagaaataaaacactacagatacatatgattagaaccaagcaggaaaaaaaattcaccacaacatcaaaagtctagaaggaaatatatcaacatgtcaacagacgctgatggaacccagggtaatttttttcttcttaattgctgctatttgtttggtaaactcccaattttgcaaaacaataaatcttttaaaagtttaaaaaggccggctcggtggctcacgcctgtaatcccagcactttgggaggctgaggcgggcggatcacaaggtcaggagttcgagaccagcctggccagcatggtaaaaccccgtctctactaaaaatacaaaaattagccgggtgtggcggtgcgcacctgtaatcccagctacttgggaggctgaggcaagagaattgcttgaacctggaaagcggaggttgcggtgagctgagatcgcaccattgcactccagcctgggtgacagagctagactctgtctcagagggaaaaaaaaaaaaaaaaaaaggcttaaaaacaacaaaaaatcaaaaccaaagcaattttctattttttgttttgttttgttttgagccagggtctcagggtctcattctgttgcccaggctggagtgcagaggcgtgggtgcagtggctcaccacaacctctgcctcccaggctcaagctatcctcccacctcagcctcctgagtagctgggaccacgggcgcatgtcaccatgcccagctcattttttttttttttttttttgagacggagttttcgctctttcacccaggttggtttgcaatggcacaatctcagctcattgcaacctccaccttccaatttcaagcgattctcttgcctcagcctccagagcagctgggattacaggcgcccaccaccacgcctggctaatttttgtattttccgtagagacggggtttcaccatgttgcccaggctggtcttgaactcctgacctcatgatccacccaattcagcctctcaaagtgctgagattacaggtgtgagccaccgcgcccggccaattttttgtatttttggtggagatggggtttcgtcatgttgctcaggctggcaaagcaatttttaagaaggataccaggctcagtggctcatacctataatcccagcactttggatggctgaggcaggaggatcacttgagcctaggagttcaagaccaacctggacaatatagtgagaccccatctctacaaaaaatttaaaaattagccaggtgtggtggcgtgtgcctgtagtcccagctactctggaggctgagacaggaggatcccttgagcccaggagttcgaggctgaagtaagcaatgatggtgccactgcactccagtccttgagacagagtaagacactgtctctaaaaacaaacaaaaagaagcagaaaaatcatctcagcctgctaacccaactcctttcatttctccatgctccctgtccacattgtgtgcatgagtacctgtgttgcctgctgctatcacagcaagcacacccgctaaagtcagcttttcccactcaatctatcaccttttcccctttctacctcctcttcaaaatgaagattattttcagtgataagaattttgaaaccatatagcttgtaaactttacttttttttttttttttgagacagagtttcactctcttgtccaggctggagtgcacaatctctgctctctgcaacctctgccttccaggttcaagcagttctcctgcctcggcctcctagtagctgggattacaggcttacaggcatgcgccaccacgcccagctaattttttgtatttttagtagagatggggttttaccatgttggccaggctggtcttgaactcctgacgtcaagtgatccaccagcctcggcctcccaaagtgctgggattacagtctactttgtattctagtaattaactaggaatggttttcttttgaaaccaatttgtaggactggttttcttttgaaatcaatttgcattcacataggcattgagtgagaatgagcttgactttgcacaaaatcaatcctatcctcctctttttctcctgaggcagacacattaaggcttatcagggagaggaggaaaaaaagaggtttgatatctcggagactgctcctgtgaagactcctcaggaaatctggagtcagagtcctctcctgacactgtgacaaactcagacttccaaggcccagaaagacctcaggaagccttcgacacttaggctgtcagaagaaaaacagtgctactggcagtccctcctcagctccctgccaattgctttctcaggtgccgtgtcaaaatggaatctctggttccagccataacaccaagatggaatttttggtttgggttacttcagtaaccaggccagggaaaaccaagtgggcaggagtcgtggtccttgattagaggggtctttagtaaaagcaatacctacttcgacttcaggcaggaggggtgagtaaacagcacctctcgagtaggcagcctgggtgacagggatctctgatccaggatgggtcttccttagctggtgactaaggaaaaagtgttcaactgaagcccagagccctggattctagtcccttctcttctctgggcaccgggacatatggggttggcttaggtcagaggggtacatgctaaggccaagtaggtaatagattgttcaggtctatcagcaatcacacagctctcttggtctggctcacccttaattaagagaaaatggtggattcggaggtaggcggagagggctgtggtggagacagctcacaactttgagaattaaagtcactttttgtttttattgttgttgtttttgagacagagtctccctctgtcccccagactcgagtgcagcggcatgatctcagcccacagcaacctccgcctcacgggttcaagcaattctcctgcctcagcctcccgagtagctgggattatagggcacgcgccaccacacccggctaatttttttatttttttatttttagtagaggtggggtttcaccatgttgccccagctggtctcaaactcctaacctcaagtgatccacccgcctcggcctcctgaagtgctaggattacaggcgtgagccacagcacctggccctggagtcacttttttaaaaactgactttccacgtgctttggagaaccaagaggagacagtatcgattgtggatcggatgagttcctttgtatgaaactttcagagtagcaggggagtcttaagggactaaagcaggaggaaacacaactgaaaatgacaaggggaaatcttaccagcatgaaagcaaagttctgcgtttaagtttaaaggaagatgaaccctgtgaagccaggacacactgcggggaaggggacaagaatgcaattgaaagcccctaacggagaaaaaaaaaagcccatatgtttgttttgttttgttttgtttttgagacagagtctcgctctgtcgccaggctggagtgcagtggcgctatctcagctcactgcaccctccacctccctggttcaaacgtttctcttgcctcagcctcctgagacgctgggattacgggcatgcatcaccatgcccggctaatttctgtatttttagtagagacagggtttcaccatgttggccagtatggtctgaatttcctgacctcatgatctgcctgcttcagcctcccaaagtgctaggattacaggcgtgagccaccacgcccggcccaaaaaacccatatgtttagcatacgctaaaaacaccaactgaaccttctggagaaagtgggtcctgtggtgagctgaccacaggggtccagctgccctcacagtagtcagagcacagctgcaggagcaggctctgtctaaggcagtcaaggacactggcagtgtccagagacagttgcaaggctgaggatcgttctctggtgccaccaggaagaagatgcagctctgaggagagtaaagaaaagacgtgctgaggacagggtgagctggctgccctcaaatatgggcaaggccctcaggcaaaggaggacagcaagtcggggcagtccaaaagcactgcctctcggatcacaagacctctccctaccccataacaggaagtgtgggctcagaggggaggtggcaaggaaacaaaacaggcaccaggccaggcacagtggctcacgcctgtaatcccaacactttgggaggccgaggtgggtggatcaactgaggtcaggagttcgagaccagcttagacaacatggtgaaaccccgtctctactaaaaaaacaaaaattagccaggcatggtggtgtgtgcctgcaatcccagctacttgggaggctgaggtaggagaattgcttgaacccaggaagtggaggttgcagtgagggccgagatcaaaccaccgcactccagcttgggcaatagagtgagactccgtctcacaaaaaataaaaataaaaaaagacactgagtgggcctggttggtctcaaaattgccaccgctccaggtcaggcagggtggctcaccgctgtaatcccaacactttgggaggctgaaacgagctgatttcatgagctcaggagttcatgacaagcctgggctacgtggcgaaaccccaagtctacaaaaaatacaaaaattagccgggctgtggtgtgcacctgtagacctagctactccgaaggctgaggcaggagaattgcttgagcccaggaggcagaggttgcagtgagccgagatcgggccactgcactccagactgagcaacagagggaaaccctgtctcaaaaaaaagaaaagaaaaaagaaaaaacgccaccactccaagcctctagggcagtacttctcaaacctatttgcttaggaatcacctgggatcttattaaaacgtagactctaattcagcaggtcggggctgggcatgagattgttcacttctgacaagctcccaaatgatgctattataacaccggtcatctaggaactacttcggtaactaggcgatagaccacttccaagtcagaggagaaggcctggagaagccttctctgtggtccagcctcatagaacggcaatcctagggtcagagtgccctacaagctacaggagccccaaggaggaggatagtggcttagaagagaggtgctctcctggaggtatacaccaatttaacaagtgggcgtctcccagtaaaaattttcttaggggaaaggggggagtcaagctgtaggtgttggctccctaaaacaactcaccacctcagaattagctcccaggagcagaaaccaacgtcctgctgccacacttctctagactcaatcagctctgccccacccactccacaaaagctctctgccgcgtcttcctctaggggagaggtgactgcaggctgggagactccccagctgtgactcagaccgacggaatcaaatctgttcccccaggctcagcattcaccagatcctgacctccccctctgaccagccccaacccacctttccaagccccacctctcagtccatgggccacccctcgcccaccccacttccctgtctctggctcatcttcagatgtgtccctagctcccaacccgtccaagcgcagccgagtttctcggtccacatcgcctcgatattcccacagcatctgtggtctctcttaaaaaaaaaagtgtgcccgtatcgccgttttacggaacgtccctggaaggtccctcgagtggccctctcggatgctgaggtcctgtcaacgcccctttgtctccccgtgcggcgccgagcgcagtgcaggacacacaggaagtgctccgaaacagggctagggtgggggcggcaaccgtgcccggagggggcgcccagagcgcagggactcggccgggccgagtgatgttccccccaaaaaacaagagtcatcgggatgagggccagggaccccgaattcagcgccgggcagccctcggagccggagccaggctggccgggtccggctcaggcatcccttccttccggagcccctcgacgcgcgtccggccacccacctcagcgccctcaccttgtaaaccttgccgaaggcgccgtcgcccagctcgcccacgatctcccacacctcgttggggtccaggtcgcggcggacgtgctcatattcgcgggactttctcttctcgaaggtagacaggcgcaggatgcggcggaaattggcaaaagccatggccgggggcgcggtggcgccggctcgggctcgggctcgggctcgggctgtggcttcggcggccgcgaggagaaggaggaggagttggaggacgccgcgtctctcggggttctccccagacccgcctttccccgcagcccgacctcggtcaagtgtgccctgggcagcgccgcgccgggagcacccggaaccgcgcaggcggcggcgtgcccgcccccgcccccgccctgtcaggtccccagggccgcctcccttgtgccggcctcgcagctcctgcccggcccagccctgcctgcgagagcctcggacccgttccaggggaccgtccccgcgcccgcccaccggcccggctccacccgccgctccccggcagagccccgggaccccctaattggctgcgggcgctccccggctccgcccgtcgccgcagggcactctggaaactgtagtccccccacaccacgctccgcgagccgcgggctgggctttggggaagcttcggggaccgctcggtgggaccgctcatggactcaggagcccgcccgccgcgccgcgtggctcccaaaacttttatgggagcaagcgggacggcgacttggcatttcgcgagagcccacggatcgttgtcagcgcccagaaggtgaacctgcactcgttcatttaatcctcccgcagctattccgctaggctgccctcgcccccacttttccgatggggacgccggcaggcgagggcactcgccccaggcacacacgctggctgcccgtctgctgcgggttcctcggcgcggtgctgcctcctagtgtgcgacgggcaacgccggtgcagccgcggccagtccctgcagggcccggcttcccggcgcggtcctttccaggggctccccgtccacgatccacaaacctgccaggattagagggctgggagaaagagctcctttggcactgatttctcttatgtttcctgatgggtttgcggatgtatttgcatattaaataaaaactttattctaatttttaatttcctagtttcaaaaaagatgagcgcactacatacagatcaaactaaagtcttctttgagcaccttcattctcgatcctggctacttgagtcacttcactgctactgttgcctgtttgtcctatagacggttataacatgcttttacctgaatctaaggagagtgctgggggtggggggggggggcgggcagtctgcaagggttattatttggaccgtgtcataaacaagttgagtcttcgcaaatgtcacagttcaatagctccaaccccagagaacggctgtgttgaggtgttttcgccccttcctcggtgctttgttcgaaaacatcctttgaacagtgtgcaaacaccaagcatggttttccactgggaaagccagctcaagaagcctgcgatgctggtagtggtcggcgcagagggtgtcctggttgctaagccgttcggaatgtttccacagctgcaggagtgcctggaattgtagagggtctttaaaagaaggaaacgccgctcgtcgctgaccgttctcattgagtcaggcgctgtctgaacctcccaaaacatgctgaaaggcaggtctttcatttgtttcagaccatttggccaactgtacgaagcgggtggggagaccaagagggttgcttccatactaggagatgaaggctctgactccacgaaagctgtaggcctggagggctctgaccagctctgagagctccagaaaagcaagcaagcgagagaaagagagagagaaaggaaagagagaaagagagaaagaaag

SEQ ID NO: 590 - DNA, 129941 bp, Homo sapiens
  source 1..129941: mol_type = genomic DNA
tattggctgctgcattttacgaagtggacttcccggtgtttgtttgtttgtttgcaatacactcagtgcagccttaagcaaatgagatcattttcagatttcattttttttttcagtctttctacttttgtaataataggaagttagtaggactcacttctctgattaataagcaatttgcagcacacagcgttccactgcggggtttcacgctcacctgaaaacacctgttcccaacctacttcttggtgcaagttgaccaaatcgttttaagtggtaactctttccaaccgtagcagggttgttttctgttaagcaaagccgagatccagtgcaatacctggactgtcaccgtcctgtgagtggtgtacacaatgggaagataataagccgtggtgttttgctgtctgtctgtgtcacaagcatgaaaacccgtgtgtcattgatcagcaccatttgtggtatgttccgtgatgagcgtttagtgagcctgctggctgcagagcactatgaaatcatggtacgtagtccccggcacctgtcgttattcctatatcctcctgcaactgtggtttgaaactgcgcattctctagtagtatatatcgtgcctgtcttcaaaaacatttccctttttatactcattccccccaggcatggggtagtgtcagtcggactgcacagggaacacggtttccagtggctttggcccctactcgggaaacgtctgcctgttctcgatggtgatggggtggctgccattcccttggttttcctaagccctttctaacgagagtctcaaacaagcggaggcgagggccaattcaaccccattctttccagcgccccgcaccatagcacctgcccacctgagaaccaggaacgcaccctctctgtggagctctgactggtgtagctggaaacaaacagcaacttgcaaacggacgaagagcctgccgtgtgttaatcatttgccttacaagatgtaccagacggtttccagtactaacaaagggaataaaaatacctcacgccacaatccagcatattgatgttttaaggcaaaacaaccaactttgtctgtagtcttcattttctgtgtggggggggaggggggaaggggacactccagcaagggtttctaaagccccagtgttcagagtgacacagggagggcctgccccccactgttccctatgctccccccacctccaggcaggggcagagcaaacaaacagctccgggccacacagcagcatcaggctccctccagaagtcaccactcactcattcctggagacttggggacaaggcagtctcctcagctatttatttctgaatgattgattgattccaaactacttgctggacactggtggttctgacctgtgaccagcacctctgcttcctgtgtgccctcaagaaaatactagtgtgggtaacagtccatctgagtggagtttgagacacactacacatgagacacacaatgatgcagatactcgttttcttgagctttattggcccctgcatgatacagtccctgtgcttaagaacatgccctattaggtcactctgcctttgctgacacattttatagcagaaatacacaagctgtttttaaaggagggaaatataaaaaatgtttataaactgacagtgttttgccagaggaaaggtacaaaatgctacatacagaaccaaaccagccacttcacaagagcaatgcagggataaaactattggataaggaaggcagatgcacttccaagaaaatcagaacccagcaagaagtggccagtgcaccccaaaccacactggtgtccacctcattggcagcagccagccaggacacagctcaaaaacgcaggagctaccagccacccagtccacggccctcgtctcccagaggctgagtacctccccaggctgcaggctctgggcagctgagccaggagcagctcagggctggcactgagaggctactggtgacagtaaacccgtctcaaaggctgggcctggctacagaccagcagcagttgacgctgaggcaggttccagtggtagccctggtgcctgggctctctcttaatgcaggcctggaagtggcgacacaaaagccagcttccttggctaagatgcccttaaaaacattggggctgattttgtgcgtctacagaaagtaacagcccaggagagaatgtacacagaggcgagctttctaactccatcaaaccccacctcccccgacaggaaatgctgccagtcaactctaaaagaaccacttgttgctctacgggggaaggggctgagtatgatttgtctggcgactgcagagactccccgttcataccagtattcattagaacccagtccctcgagcggctcacccactgttactagcatgagactggcttcagtgctaaaaactgtgatgtcattgtccatttgtaaatctgaagaactctgtaaatcagaaaagctgctgtccgccctggctcacttaaaaatcaggtaacggcacaccctggggaacacagactcaatctgtgtgattcgcaaggacaaaactcatctttgacttatgccgccggcctcacgtaaggaaacagttccccacacagaatactccctggaaacacaaaatgaaatcttctccaattttattattcaacataacattcttgtatggagtaatgagtacaataagaattagcaactcagttctatttccccaaccaaaatatatcccttatacaaattaagagttcaacccaaatccacttctaataaaatacctcaattttagagcttaaaaaccagactgcactagcaaaccgacacaataacccactcaagcatctgtagctcagggctctgtcccctccctatagcttagaggccactagaccagcagatagctgagctacatccccaagctcacccactaacttccttgcttccaaaaatcctgtcttaactccacaagaactggcacacccacgggagatgtcaatcatcagcttcaacaaacataaaagaatgcttcatgtaccagtcaacagctgctgcacgaaccctcccactccagaaacccagagattttccccctcgccaagcaaggtcccacagcaaaccaagaaaaacagacacactggctgcctgcctagcaagcataggccccttccagagaagcaaaataactcttaaggtccccggcaaccgctacagcaatcgcacagatcagcaacctccaactgcatcatctcggtgagcaagtgcgcaagcagtccagggcgctgacctgggcactcggcagctccaggcctggggacttctccctggagtcttccaaagtgtctcatcacacacacacagccacgagtacacacgcacggccacacatacacagcaggtgccctgtcctctgaagagtcacatttcaaggagtatgcaaaataagcgtgttataaaatttatttgtgtaagcattcagacatttttaggtgggaaagatgatatgcagaatccactacaaggtgcaacagaaaatcgtattggaaaggacggtacatctggcgcagaccagcagtggcacgattccaaacaaatgtcagacgagagcgcttcatggggagaaactgaaaattataatttaaagcttcatgaggcaagatatgttccaatttaaaacactaagaaatagtaccatcgatgaaaaaggaaatcaacctctaggtgtaccaaaaggggcgtagggcaaacggggaaaatttgcatttgttgaggtacaaataggagtgttctgtaagagaggggcattaattattaatgacaaaccctgcaaatacaaaataaaacccaaatcactggtcacagaattcaaaatgtacatgtaataaaggcaaggcaatagactcaagttatggcctgtcgaatatttactccactgacgttatctacagaagcacttggccagtttgtacacagtgattccttatgcacgccgaaagggtttccgtaaaaatgacattatatacaaatctgtacacccatccaccagagcgattctccagctcccagagggagttatcaacttaaagcaggatacctgaggtttcatgtctttagttgccttatcataatcccaaatatacatttcagggtttgtttttgtttttaaagacactttcctggaatatgtgcactatggttaaaattaaaaacaaaagtaataaaataaaataaaatgatcgctggaaggagctgaccctccccacccatctgagagacttcatctggctgcagcacagtgaagactgtgtgtgtccctggacgggcgcctggcgctggggtggctcccagtggcgcacctcttcggtggagtcagcgaaggctctcgttgacttttaaaaaaggaggaggatgaagaaggaaaaaaggaaaaacaaaaccccaaatgccaaaggaatttcagtgggatgaagttcctccaccacttagagagtatctagggaaaaagagagagagagaagtcaacacatgtcatttctcatccctgtgcaaaaattcatatagtaaccaaaatcttagttttcataagaaattccaagtcatacaaaaataagtggagcaaatatcaatgtgtaagtctaattttaaaagaatgcatataaagactgagaagatcatgattcttacacaaaaactccagagcatgtcaccaaaaaccaagaatgggttcagcctccctggagagatgtgaataaaacgggaaatcatatcccttttacttacgatcaattgtcaaaaagtgaacattgatccatacatgatgacacagtaagattccagggatgcatatgcattcccgatgtgagggcaggaaacccattttggccataaaaatagtgatgcagtccaagaatctatttcctagaactgcttccgaaatatggtccaaagcaggaacaacgtgtctgcacaaagatgtctctcgggattttcgtaattacactaatttggaaacaactctgatgcccaacagtacagaatcagttaagtaaattatacaaactgaaataacagactaaaaatggtaattatctgtatttacatatatatattaaagcaatattaaaaatatgtacaagtttaaaagtacatacaaaattacagattgggcatcccttatctgaaatgcttctggctttggatctgggaatatccgcattatacttaccagtgtgcagccccaaatccgaaatctgacatgccccagagagcagttcctttgagccccatgctggcgctcaaaagtttcagattggggatttgggatattcagcctgtatatgtgcactatataagtatatttacatgaacaacttctgtatcctaaattaagtactatagaaattctaaaaaatcttctttgcactataaggtagataagagaattcagtaagtttatgacctggtatgacaacagaaggcaatgcacccaaagatgctgatgagatttgggctacagtggtgggatcatgggtaatttctgtgtcttccaaaaattctacaagattgtcttcagaagacaacaaagggtgagaacggggtcccctcatgaccacaattccctcaaccattttacaacagactccaaatcacaggtccaggagagatggctgaggatgtctttgaccaggcttatctcaaacgttccaatctagagctcctcttttcaggcatttgaaatacttggcatctctcccagagaacaaatggttacataaggtcctcccaaaagcacacattagccacggagcctaagactcaactatcaagaaatacaaatgactaaatcacgggatgagttgatgtcacacaaaagaatccaaacattaattccagctgagacagaaaggctctgaaaatgcttcagaggagaggcggctctcatttttcctacagccatccactgaaacaacatgtttggagcaaaactggcaggaagtctaagccatggccaccgtggttttggcagccatcggggtgaacgctcagtgggagcttcaggagcagggaaggaagaagtgggtaccacagccaagcctgcagagagatgataagcacctcaagaggcagctcatctgaggacagaggaggaaagagggcactcctcatcacagacaaaggaaagagagcaccaacttggcttcccccatgcatcactgcaaagtaaagttttaaacacaacacagacatcaggtagctacagacccgcccgagggtaaatagggtcaaccccagccacgatgcccagtgagcacgtaaaatgtgctgcgtctgaatggagatgtgctaagtgtaaaacacacaccaactccaaagacggtccctccaaaaatgtaaaataccttattgatgattgttgttattaatgttgaaataatactttggatctggcaggttaaaaaatgtattgttgaaactaatttcacttctttttgctttttaaaaatatggctactagaaaatgtaaaattctctttttgtttggtttttagagacaggttctcactctgttgcccagcctggagtgcaaacgtgatcacagccatagccgcgaactcctcagctcgaacaattctgcagcctcagcctcccaagtagctagggccacaggtacaagccaccatgcctagctaaattttttttttttggtagagacagggtcttgctattttgcccaggctggtctcaaactcttggcctcaagcgatcctcctgcctgggcctcccaaagcattgggattacaggcatgagccaccacatccagcagaaaacataaaattctgtgtgtggcccacgctgtacttctactggccagcactggtacagatcaacttgccttaacaactaaaagaagaggaacagagagataggggcctgggaatgggaaacgtggatcagttcaacacatacaagccacacactctgtgccctggagctgccctggggaaatcaagtcacgtatataaacaaacagttcataacaatttcaggcaattctggacagtgtggaaagtattggttttaaaagtaatactacaaaagcagagagcaaaatgcccaacaagacagtaacaatcctacccgtttctggttttgttctatttgttttattataaagctctttctaatgggaaataaatgcctctagaatgaggtatgtgatgctaagtttgagaaatcaaaaagtttgtgttcaggcaaaagatgggtgactttttaattctattttcctttattcctatattgtttttagtatcaaaggagggagggatcgtccttcaattgcctcaaaattgaaggcagccaagtagatcatttttattttctagcaacttaaaaagttgaaatgtcttactaagaaacccgagttcagaagcataaacgtgaagtatcagaactgtggttttctcctgctgtccccacgtagaggggctcttcacaggacagtaggcagccccttcaatcacttccaaatagcaaaagggacctcacgtgtgcaaaacttctttatgtactgtcaggtgggacgcagtctcaggaaagacccagaaatccccctcatgatcacagagtctcagccagctttgggaggtgtcagcctggacacctgaagatgaactgtcaaggcagcagcacgcctggtcctcctgggggtgtggaggacagcccagtgacaaatcaccctcaggtcacacagagcggcttcccagcacacatccactgcctccaaacgcctgcacttgtgccagatggcagtcaggaggggcttggttcccatggatactcctacaacaagttgggagggggcagggagggcaaaactgtcaccccactgagtcctcacccatagtgcattcaacaggtggggccactgggcagggacaaaagctccctacaggctggcacagatgaacccctaccaaggaggcttccagacatgacacacacagctaacacagggaacacacctgcgcccgctcccgctgagttgaccacaccaaagctgctgtcatttctcacacttgactttaaagccgaaaaccagatagatagttacacacatctggctaagaacgatcattctctggccaataattaagctgcataattaagaggaaacaggtatttcaccaccaccctgtatttatgtggcaaaagctacaaatgcactaagtcctgtgggctttccagtagtttccagattcagatccttcattcacattgatttctagaattcagaacaaagtctcctctaattcaactctgtctaccctgaggcctgcaagataacaggaacagacaggccaagaatcaagtaccaaactcatcaactaagtcccagcccaagtgcaggtctctccttccccagcccagaggggccctgggtagttacctctggagccgctgcacgagctgggccaccatggtgtcggagatgccagggcacgcctcctccgctaggtagatggcccctcgcagctcttcaatggaccccaagttccctccgcacgcctggctcttctccttcaactgaaaacacacgaacaggaagaatggcatgaagcacaccagctgcaaaactgggaagcatgctgttcaaggaacaacacggcgtgtggaccacgacactaccccagccccagggtgtccgggaaaagctttggctagggctccaggccacttcaaattgcttttttttttttttttttttgtgagacggagtctggctttgttgctcaggctggagtacagtggcgtgatctcagctcactgcaacctccgcctcctgggttccagcgattctcctgcctcagcctcccgagtagctgggattacaggcccctgcctccatgcccagctagtttttgtatttttaatagagacaggatttcaccatgttggccaggctggtcttgaactcctgacctcaagtgatccgcccgcctcggcctctcaaagtgttgggattacaggcgtgagccactgtgcccggcccgggttccttttgaagaaaggtgattcaaatgctctgagagcagttatgtatacacagggcaatcatcagaccataatcattactgttcgaggccagaacagagacgactagctctctgtgtgcctttcccaagtctcaccgtgatggactgtcctctctgtgctgttttcctatttcaaccataaccttgtaccagaaaagcaatttcaaagcctatcctaagttattctgatctcaacactgcttacttcctaatgttaatgggttggttcttaaactccagcaaactgcctttgtgatccagagtagagtcaaaatatttgatttcatgtaaataagtggcagccttaaattctgggaatctccagtgttcttcctggcacctctactcccaagagaaatcacaacagtgccttcagacacttccctcagttgaaggtcaactccaagtctctctctggaggcccaaaaacgtgaactgtgaaaataagagctgttcaagtcaagatacagcatggctcagaactcaacagaagaggctctttgtgatggacaccgcctcctcttcagggaagaaagaaacatctcaggcgacattcagcttggttttcaggttgttgaacacatgctgtcatttccaaacccagccctgccctaagagcaacggcttctctcttcgctactgaaggggcaggcaggaactagaagggtctgaccttggagggccagtgggtgtagagagcatttgttcctgaagttcttgctgtcacagggccacgccgccggccccgaggcggccactcgtgtttgtctaggactcccaatcacttgacagtatttacaagtcccgagagggtcagctacaatccagcactctccctcctgcccatgccccgcccctaagtctcaaagaaggagcaaaggcggcagaagggccgccctgggagagggcctgtccccttgccgtgtggaacgtgctggacccatcactgacttcagggagcaacctgacctgtgctccctgaaggaaagcagggacgccaacacccgtctcctcaatgtcctcatctgtaagcatggggatataatccttctactgggcttctacaagtattgtatgaaataatacacaataaacactctgaactctagggtagcaaatatcattcttaaaaatacattgggaaagatgcctgtgagtttagcaattggttacctggaaaatccaggatatgacggcgtttaggatatgtcctgaataattatgtcaaagttgcttcatgggcccagtaaaaaaataaacagcctcaggagaatgaaaaagtccatgcactttccctaactgcctgactgaccctattccagcggccaatggcagggccgcaggagcacagcctggaaatcccacggggccaactcccatgggacaaaatgaagcgcaggatggcgctcaacccggacatcctagttaggaagaacacaggtgcccagaaccatgagccagggctgaagccagacatcatccagcagggcctccgcgtgccctgtggcttccccgacaccagcgggctcggctacttcccacttgaagctgcaggtgaggcctcgggctctggccacagccctgctcccaccgggccctgaacttgccaggtcagaggccctcagacaaaccctccagggcacctgctgggcagggcaacaggtgaaggcttattggagggctgggaagaggcactggcaggaccgtggctggccaggcacggcccatggccgggggtcccccgctgcgtgacgcaggcacaggggaggagaatgagctcctatgacacttcctctcctgagcacctccccttcaaggaccaggacccctaaacacagccgcagtggaaaactgcccaaagagggaagatccccacgcaaacagatgcgtgtgtggcccacagtgagtacctcaaaggcagcctcagccaggaaggggcacaacaagaaaagaggggacttccaacttattttcaaatccgctactaaccagatgcagaacaatcttcattcttataaagcctacttttgaaaatctctcaaaacacggccacgggagcactttcctctgggagggagaggctgagcagggagtgggcgtggggaggcccagctgggagcacagcactgctgagcagaggagggacttcagtgaaacatgtggctcaggggaaaccggaggactccagggcatccaacgtctccttagaagaaagaatctacttttcacatggccagaaattggtctgaggcaaagagagcaggctgtacacaatgagatttgctaaaaagcagggcaacgggtgacacagggtctcgggctgggtcactgtcatccagtctacacattccaggctgcggcggagtgggcatcacccaggacaggggaggcgcaaggtggtgctgacagcctttgggaaggcaccatgcaggctttccgagcctttgccagcttgtcttaatgtccccaactcttaactggcaacatcaccactgaagtgtgtccagcttctccttccccctcccctcccactccgaaaaggccagccaggtacctacctctgcaaacagaggagaaataattgtagataaacactgagagaaaggcctcttcgggatgtctttcatcttgggggagagggaaaaaaaggtcatcagaaacagttgacgttcacattggcaataatttaataaacctcccacctggactatggaagcgcaggagttgcctctacacttcacgctgaggaaacaccctctgcgcaccataacatctgaaggagactatcggctgcctctcactagacttcaaagtttcatctgcagtgacatgcaaaacccacgcaccggggaaaccagcatctgggttccatgtggaaggggactctgtgtgggcacaggcggtgaactgcctcgtcttgctatctacgcagaagtgctttactggttgggcgtggtggctcatgcctgtcattccaacactttgggaagccgaagcaggaggatcacttgagcccaagagttcgagaccagcttgggcaacatagtgagaccatgtttctattaaaaaaaaaaaaagttttaaataaactgggcgtgatgtcacatgcctgcaatcccagttactcaggaggctgaggtgggaggatcacttgagcccaggagtttgaggctacagtgagctctgatggcaccactgcactccagcctgggcaacagagaccccgtctcaaaaaaaaaaaagagagagagagagagagagagaaaagtactttactaatgaaaccctggaaatagaaatcaggtcaagattggccattccaatggctgtctaggacagagaccgagtttctacttttgcaacctctatttggacatttaacacctgttcacttatcaaagcgggacttgtaggatcaacaggggacagccactggcccaccctgcctgaaagaaactacaccactatgctttacaagaccctaaatatatggcctttcataaatttaacaggcataaaaccaattaatcaaaattgttttacataaatatcaaaagcaatgcatttacttataaggtccttaaaactcagtcacaaaattatgatatgtatgtaagtaaccgcaacatgcacaacagtccctcagagctatgaagtcatttcacgggtcacccccaaaccccatgacattgccacatcgggacatcctaactcaacagcagggctgcagagagcagaatagagtggcacaaaacagaccagaggccagactccctggtgtgaacacctggatcatcagacagaactaaagctcttcatctgcccatcccctagcaacaaaattccaggacagctgccacaaaggaccccagccgcacccacagcaagcttcacacacaagtgcctccaaaacactgcagactgaggtcagcgtggccattctggagtgagcagacgtaccttatttctgtccaagtccgatggctgaagagctccattctcgagattcttgggatctttttctcggattgtgaagatccagtccccagaatcactgccccccgaggcttggccatctgtttcccttaacacagaaatgcaggaaatcccatcagtgctcgcacacctgctctgggggcgctgggacgttcagggggaggccgcctggggacctctaaacccacacccaccagccccaagtccccacccatcacacccttgtccagtccctctgggatttcccaaagacccccccgcctcctccctcacagagaagagaccatcgggaggtggttccacaactccctggcgtgccagtgtgtgcatgcccaccctcctcctcctcccggagaacacctcccccacctccctgggagcccatctctgggacatcagcttctctctgctgggctcctcctctcaccagggaagcagatgtccctgtgttgggtgtggtggctcatgcctgtcattccaacactttggcctcaccttggccatctctcagccctggttctgggattcacactcactgcctctatttggtaccctccactcgctccaaagcccacccgtgtccctccgagcgctccctcccccatcatgagatgatggtgtgctgatcactccctgtcctgtatgggcctcagaggcaatgagccccaggccctgctgatcatcccctgatgcctgtggccccattaagcctgcacctcctcccgcccctcggccatacctctcccctctcactcacaggcggagcctcaccctcacacctaggggccagcctcactcccccacatgccccaactgacacccttttttctctcggctcaagtgacctccacagagcagtggcccctaagcccgcttcacctgcccagctttctcacctgaactccacacctcggtgccacttcacactggacgtctctcctggacaactcagactcacacacggttcaccccacactcggcttcccgcaccacacatcacaacacctggtgccacgctgccccagcctggaacattggcttccctccttcacccaaatccaccgccgcgtcctggctctccaaacctctctccagtctctttctcttgtcatccctgttgctaccccagcaatctcccaatggcagtacctcaagaacttccgggggcagtggtctcaaccttggctttaaactggaatcacctagagaccctgaaaaaccacttagggtctcatccccggaaatcctcattcaactggcctggcacatggacctgcactgtgggccaactttaacttctgccaaggcatgcacgagaacagacgagtcccacgctcggacttccagacacaagtctgcccgaccacctcccccagccctccccacacaaatggctccagccccactccgcctcttaagccaagggaattcctagatgccaaacttgacagcaattctcagtaagccactcctggtacagaagcttctaccagacacaatacagaatcacaaacacatgcatttctggcctttcagacatccatgtaaagcagtttcacctgatcagggttttacaaacaggaagtttaatggaaaacagaacagaacagaacgaaacaaaacagaatgaaacagccaggtccagttccccatgcacagctctaccacaagagttcactcgcagaaactccaccagcaacgtcaagaggctaaacaactcccaaacaggcccaggctgtgtctaacacaacaattgccaccaacctggattgtctaaaaaaaaaaaaaaactcaacagaaaacgaaacccacaccaaacagtgacaaagaccagcggatccctcccacacacatgcttgggtcactcaggggccgacttacgcgtcggaatcctcggagctcgagtcgtcatggctctgctcggccttccatctcttgtacctgtcgatgagctcggtcaagtaggaagttttctttgcattgcgtagtataaacttgtgcttcaataactccttagcagtgggtctctggaaaaacacacccaacaattaaagtatgagatgaagttcttggtcctaccccaaaggacagacttctgcctcaaaatgtcaaccgccacactgacacctgatggctggactctctactccacagcgcttctcactgcaactcacccaaagacgagtcgctcaggacctacgcctgggctctgggtgctatggtgggcagggcactgtctttccaaggatgtccctaataaatacattttcacagaaaactctgcacagagcttcacagggatcatttaagagagcttaaatgatctggtcgggcgcagtggctcacgcctgtaatcccagcactttcggaggccgaggcgggcagatcacgaggtcaggagatcgagaccaccctggctaacatggtgaaaccccgtctttactaaaaatacaaaaaaatttagccgggcgtggtggtgggcgcctgtagtcccagctactcaggaggctgaggcaggagaatggcgtgaacccaggaggcggagcttgcagggagccgagatcgcgccactgcactccagcctgggcgacagagcaagactctgtctcaaaaaaaagcttatctcctagtttataaaatactttatgacaaatgctgacaaaatatatgttctgtgttgtttaacttttttttttttttttttttgagacagttttgctcttgttgcccaggctggagtgcagtggcacgatttcggctcactacaacctcgcctccccagttcaaacgattctcctgcctcagcctcctgggtagctgggattacaggcctgcaccaccacaccaggctaattttttgtatttttagtagaaacgggatttcaccatgttagccaggctggtcttgaactcctgacctcaggtgatgcacctgcctcggcctcccaaagtgctgggattacagatgtgagccaccatgctgggctgctttgttaactttctgtattaacgtttggccacatccaaccatataatagaaatgtcaatttggaattatctcagagaaactggaaaggagccaggagatcccctttttcctgtctgctgaaagagcaactggatgcgcttcaccaccaactttcccggtttagaagggctatttcccaggtccctccctcccttcccttgtgattgggctgaggacttcacccatgccctgggctcagcatggccaccgcaagcagcacctggtcagctgcctgccttgaggatggcgatagtgacagggaatgtgcttcccaaggaaaccagcatggcccaaatgggaacagacagcaggaacacccaaacaccgagtcgaaccaagttcccactcactccaaattacaaaagcttgattacaagagccaagcatgttttcagattcaaactcatgagaaacgtggatcacctcaagtattctccctccctgtccatccaagggtgaaaccccaactaccccggaggtgctcatattctcgcctctcagccagctcctcggtagctgtggggtggagctctgtgtgctggggcataagcccatacaggacacatgctttgtatgggaagacatgcctgcacacatctccactggtgctggtgcatgatggctgcaagaaacatcatcgtgtaataaaatgcagagcatcgtggcatgcaggacaagccccaccaccacccgatgctgatgtagtcatcaaacactggtgtggtggtctcagcctgcatctccttagacgtacttagaaaatgttgcattacccatttaattcctttaccagaactggcatattaggaaaccatggtgctcttgtaaaagtaaccacccatttttacataagagttaagaaaaggggggctcagcttagccttcagctaactctgctggaaaactcagaaacaaaacaaggacatatggtgctacctccaacaccaacacacacacactactttcaaagaaatgtcctaattcagacagaaaatgaggcaaagccacacagtcgttactgctgtatggctctgccagagtctattaaacctaaaaagagaaagtaggcaggaaggggaggggaagaagcacagagggtggcttggttatattttctaatcttttgtttcctaacacatgccacctggaaagtgaaaacatttactttaaagacatatttagccatttgtttccagctaacctttgccattattaaaaacagtgtaacagtttatggcctgatcttctataaatattaaacatttatgattccacatttaatattaaggagaatattcttcagattcaatgaagtatgagatggcagaaatctaaaagaaaataaggagatttttaatacttaaaaattaaaatgtatttgcaaaccaaagaagtcaatcatacttacttagaaaaagaaaaatgaataataccaggaagacagctgaaaagagtgattaaagcaatcccaacaggatgtatctcaaccaagtcaagccgcacatgaagaggtacgctgtgatccctgggaaacttacaaagctcggctccttattcaaacaggcctccacaaactccttgaggggtttactgtagtttccttccaacgtcggtgggttgttctttggaatgaggaataaaactttcatggggtgcagctcggaatgaggtggttcccctcttgcaagttcaatagctgttatgcccagggaccagatgtctgcctgcaacaagaaaagcatctttacaaacaccaagcaggaatctattccaatacacagtatttagggggaaaatggtaacatgtctcaatacttctgaggttttgaaaaaggtatttttaactgatatttaaaaacataagccctcgctgtaatttcaaaagagacaacaggagaaactgtaatatgccaaatgttttctgcctctacatggagatggcttatcaattcactcctactacgcctcctgctggatgcattcggcattccccgtggagtcccgggggccagcaggaccagtaagagaggtgagcagagaggaggagtccggagtgggtgtacgctcgcgagtcaccccctccagcagtgcttagaacttagggcacagctctgaggtcgagagtgggcaccttggtctcaagatacctgggttgaaatgccagttctacagtcaaagtcctgtgacgttagatgaaagagctaacctctgagccctgtttctctcatctgtagaatggaggtggaagaggaggaggtggccatgtaaggtgccttaccaggggcccagaacttaaaaaagtttattatgaaaatgttcaaacatacaaagaactgagaaatattaatataatgcatcctcatctacctattgcatgaatttactaattaacattttgccatacgagctttgtccatgtgttccccgagtatattttaaaatcaatcagtcatcatgacattttcccccgagtatttccgtgtgccaatatacagactttttactacctatcagtgcctgaaattaacacgaattccttaatgtcatgtataattaaatgttctcagctgttcaaaaactgtcattccatggttggtttatctgaatcaggatccaaagtccacggggtacaactgactgccaggtcgctaaggctctttcaacctacaacagtcctgtccccagtctccccagggacatcaacttaaagaaacaggtcccaaattcgggatttgtctggtggtttcttgctgatgtcatttactgtgtctctctagtgtctgcattttctgccgaatgtcccagaggagacatctgcagaagccgtgtggccccactaggacatctcaggtccagctgccccacctccttctgcccagcacaggcctgtggcacaaccaagcagttaggcaaaggaatgaattccttgaatgtgtcatgtcaatgagaagagccaggccatcctaagaggaacttgacagctgatgagacattgacagcatgtgacaccaatccccaaacaggacagaggccgacaatgaggcaggacatagtcctatatgggctggcgaaagacgaatggggactggggtagagaacacgcctgagtctggtacagctttcctgctgttctcactgtgcactggaatccatcattattccaagaacttcagtgagaatcgaatacatctctcacactcactctacagcaaggaaatgcataggcggaagcatcgttgtggctgcagggtgctttaactatccagaggatacacttaccatgttcctgcagccttagtgagtaccagaaatccctactggaagcccccaagcccagcagtccatgggaatgatgcctacggcatattctatttccttattctcagtgaagatgaaaagctgccagcaagtcttgttctaaattctttctactaaatcttgtactgaaggggtcagtctagaagagctgacgttggaagtaatactattttccttccctctacaacttggactctgctttatcttgcattgcattatcttaaaaatcagcagaaatgcaactgatcccagtctcttgcccctaggagcagggaagcaggtgcatgggagcacagggtgggcaagcacccagaactgtggcagcgacaggaggacaggagtgagcaggcacaaggagggaggaccgaggaggggagaggcaagaacagaggtggcaattgtgactcttgtgtggcagcggttctccacaccaacaggtggctctcaagtttgtgtgattccacatctgtctgcttcccccaggcctctcagatttcattacagctactgctgttttcaaagcatgctgtctcctggccacacagacccagagccttctcatttgtaagggtacataatagttatatgaattttttctggtacaagtatacagtgtgtaacaatcaaatccgggtagctgggatccccctcacctcaaacacggctcattcctttgtgctgggatattccaaatcttctcttctggctatttgaaacacaacaaattattaactacggtcaccctattgtgctactgaacatgatctctgacggatgcacctccagacctccaagcacctctcaaccagctaaacacactcggtgactggcaggcaggccctggcagaagccgatctctgctgagagtacgtcggtgatgcgcttgccttgattttactcagaggcccgaggacttgctttcaggttcagggacagataataagcaggcggccgaacgcctgcttgcgaacgcctgcttctgcacgcagtgtgcaccacgggaagttcactgagaaaacccctgctggccccatctgaacgcaacccacgtatcagtctcctggcttccaaggagggcagccagtacagcaccatcaagaacaaacatgggggccaggcgcggtggctcacgcctgtaatcccaccactttgggaggccgacgcaggcagatcacttgaagccaggagttcgagaccagcccggccaacatggcgaaaccccatctctactaaaaatacaaaaatcagccgggcatggtgggctgcacctgtagttccagctacttgggaggctgaggcaggagaatcatttgaacctgggaggaagaagttgcagtgagcgagatcataagtctgggtgacagagcaagaccctgcatccccccccccaaaaaaaaaaggcggcggggggaggacatcctactaggtagccatgccagggacacgagggtcacccagctccttaggatcccctctttggaccctcctaaatccagctgcaacccagggtgtatggttcctgggctctcagcaccctgcgtcccctctacccctcctaactttggattagtctaaagggatctcttctccccaggacttctgtagggggctcccaagtggtcttcctgcctgctggctctcccaccagacatctaactatgagtaatttggaatcctggactggcatgtgaatcaatggcaagcaatttggcatacaaatcgaaagccacaaaaatatccaaacttgttaaaaccaattacttcgattcctaggcatctctactacattttaaatttggaaaatggtatgggctgcccaaaatattcaacagcagcattacttatgttcaacctcagaagaatgattaagttgctatggcacattaacttaatgaagtaggatgtactcaacaatgtgttgatagggaaactcataaatataattgagtttgtctattactgcttctaggaaaaatgacagcagatcaagaacttgtgtctgaggtttttttgtgtcttttggcagggaggggactcactctgtcacccaggttcaagccatcctcccacctcagcctcctggatagctgggactatagggcatatcaccatgcccagctaatttttaaattctttgtagaggtgggagtcgggggggcaagggggggtcttgctttgttgcccaggttggtcttgaactcctggcctcaagctgtcctcccgccagggactcccaaagtgctgggattataggcgtgagccactgtgcctggcctatgtctgagttttaaagtaaactttatgtggggagcaggcagtcatcttccaaagcaattaaaatgaggtggaaggagagacccatttgggaaagatatgaaattagacattaagacactgctcacagagaaaacaaacagtggtttctaatataagctccagtcaaaagctgcaaatgcacacattaactgcgaacgaatcttctcctggggcatgctcctgagtgaccaccctgagttctctgttactgatggttctggactctcctcaacattgggagatgtggggatctatgcaacagcatcctacatcttcacaatatcatgtcaaataaagtacgctagctacacatctgaagatacaatttaagtgattttaattatatagagaaaataattctagaagaaaccaactctataatcaagaagaaaaccagggataaccctaaatcacagctgtaatcaatcaaaacaaaatctcatttgatataagcttattacttaagcagatgcgatcattaggaacacacttgtaactggcatctagaggcgtatgtgatgtttatgaccattaagagcaacacaaggttgaccaaagtggcccaacattactcatgcaaaaataaagcctgctgtctcctggttcacattcttccctggccctcagggctcatcctcccagccaggcctgtggacaattcctgagccgtaggcaggagcagggagtccatgggctcagtgaccagtgacaggaagggctggtacgcagtgcagtagacaggctggctgcctgggttctggcagcccatcggctcatcccaccacgctttcactcatcttcaacaatgctatttttttccatcaatgcatcaccagtttccacttttcaccatggttacacttcaaaccaagcacaatccattcgctaacataccatcgtaatgatcttacaaggaaaaagggagatgagagttcttcagcccaagacctttctctagtgttgaaaccggaggcttcttcgcagtgagcagaggtatctcccttagcaccatctccaaaggatggggactccttcaaacaaaccaaacttccccaaatcaccttaaaacagtagtagtgaaggttcttacgacatatgggcaatcaggacttagtaatgtcatgcttaggttaagactgacataagattctctttgtatgcaaagacattcagcaacacctgagcagcccagacaagataagggggcacagctactgccagaggtgacaatgctcaaaaaggttccaaacatatacaggaaatggaggtttgtattccctttagttcagtgagatgaagaagctagtgaggcaggtgaagtccatcacttctcccaacccacccttcctttgacaatctgcgtgtgaacctaggtgtgacttgggcacgtgccttcataactaccatacagaaccctgtccccaatagctggaaggtctttccttacctgcagtgcacagactaggaggggaaatgtctacaagtcatgcaagagagaatggagggaaagctgggaagcagctgagtgagccatgagaccagagcggcctccagtgtaccctgaagagcactggctgcctggcaggcaagccagccactggagggacacacacagggcagccaggaagagcgcccttatcaggccctgcttgcgacaagagctgccagtccagagccacgcccagtgggaaacaaaggaaatctcagccctaaggccccagcgtgaaaccccacttctgagaactttgagacgcagacacagacgtgaccctcatcggccctcaccacacgcctcccgggtccacaaacctggaaagtcaatttcacatcaacataagagtttgctcatgatttccagttcagagttggaactggaactctgaagggaggacttgcccttcaaggaaggtgggtgcggatggctcaggcagacaggacagctctcgaataaaggttctcatgtgagcagtgatggtgcaaccaagagcggaagatcttcacatggccctgtctccttttttccacggcactttgcatgatctgaaactgcttatttattgtttcttctacttcaggagaggagggagtgtgctgtcgtgatcacagttgtattcacagtgcagttgctcagtacaaatttgtgaatgaatggcaccagcttgattttcttcctttgaaggcacttaattttttaataagtttgtaatacaacttttttcctctggaaaaggttctgacatatgtaatcatctctattcattcattttgcttggtaccaggcaacctctttgacttatgggttcacatcattcttgaccttgggtaagttttaaatctttaaacattcttctatttattctggagttttctttcaaaacaccaattaaagctgtgcactgatgctttcaaaactcttttaaacctctctcagcttgcatctcaactagaacgccatcctgccagggcccaaccctgaaatggccgcacactgaggtgcccatgccttctgccccgccactctctagggatatttgtcacctaaggcaggtaactcactgaaaatggtgactacaacacagcacgcttgctcctaaagtgctgttaattcttcctgtttactgtcagtctcccccatatgaatttaagacatacaggagaagagacttttgttcttgtctactccagtattactggaatccagaaaaatgtgcctacacagaatgggttaaatgaaagaatcaatatgaaataaatacaataatgaaagagagagaaagagagaaggaaggggaggaaggaaaggggaaaggaaggagggagagagggaaatctaaaatcagagtcctcagtcacatggtagatcagctaatttactacaaagaatgagaagagaataatcgaggtggtgtcatccaatgagttaagaaacatgggttctagtctcagccttgccaaaatctacacagatgaactttgataaatggggtcagcttaaaataaagagaatggactaaacatgtaagttcctggtcgagtcccaaaattacatgaccccaggaaaagggtcaacagccaaagtgactgcagatgagaagcagccaaggcagtgtccctcccacgtggggtagagacactcccaggcaagggcacacacccaagaccagccaggtctgctgtgtgggtatgtggggggtgggggaacccatcagtcactcaccagccagaggctgtcaaggccatcatagtgctcagaaaagtcacagccaccgctaccactcaacagtgagacgggctcactcctcccaaggtggaaccaggtacgcctgcaacttgagctacaacctggacgctttctaacagtctatagcttgcaacggtgacctgggtctgcagggaaagtcacctggtgcttcctgtactatgtttaacaaggtgggaagtttactgggtactgggaagatttctgtttaaaagcagcagcaaggttcggcctatatgcatatctgagttaggtatttgtttgctcagaaacttggagcccaggaaagccaattctccgtggatcatgtggccttttaactgtgtacagggtcctaagaagagcagactgtgcgaactgaagttaaaccagagccctaggaggcaaagtcccgggattttttgtcccatctaacagagttcacaaaagtggagggcaacagagaaaaagaatatgagaaaaattaggagagtgtccctaacacaggacaagtaaaaaacagtgggaagaaagggttagggtttcatcacatgttgacaaggacaggctgggaacgagaatcctcagaactaaaaataataggaagaccctgcagcagtcactcaaagcactgttcttcctccattctcacgcttccgtggactccctttctcttgtgggagcccctttctctacaggccccttcaaggttgccgattccacgcacttgcacttcgacccccagctgtgcccagacagcaggtggagcccctctgcaaccgcacacgcctccacccctcaccaccatggcccttcagttcctcccacccccctccaaacccgctccatcctgtgtccccgctgccaccaaacaaacatagcctgagttaaaaacctcgatcatggtgggctggatcagcacagggtattaaatgatacagcaggagacagaggagaaaactgttcataaccaaggttgaagaattacctttatgacctacctcaaggtaccagcttcgttccaacttagaaaagctaccaggctaaagaacaaaaggcgggagccctccaggcctcgtgaggcacggcgccgccctcaccctcccctcaccttcgagtcataggccgactgtttgatgacctcgggtgccatccagaatggggtgcccacgaaggtgttccttttgatctgggtgtctgtcagctggccagccacgccaaagtccgccagcttcacctcgccatgctcagacagcaggacgttggccgctgcaaaagaaagccaaggcggccctgggcggtgcggacttacaactccgtgcactgccacaagcgcgtcttctccctggctgggtggcgaacccaccgagcacaggcaccggggctacactttttgtcagaccccctcaaagccagcccagcccaggcaaggcaaacgtgcaggacaaatgggcgccagcaccttcccttgagaagtcttcagggcaaccccaccaccaccttcagtatttcaaaggaatgaaaacggatgtcctcttacctttaatgtctctgtggattttcttctccgaatggagataatcgagtcctttcagtatttctcttaatatagtagcgatctgggtttcatctaatgggccaggttctaactaagaagagaaaaaaattcttaaagttacttaaatgattatcttatgaaaagtttgagataaaacagaaacactatccatgttaatggacaagggtaattaaaacctgaaatcttcttcacttaaaacacatgattttgccctaacaattacagtccactgagggacccttaaaaaaacaaagggcccgagaaaatggctttgctcaatgaagccaagccagcagagaagcaaagaggagccaatgaggaagcccgcagccccgcctgcgcctgcagctgaccacagggcgaccccctggccatggcaggggcggggcgcaggctgagccaatgaggaagcccacgacccggcctgcgcctgcagctgacctcagggtgcccctctggccatggcaggggcggggtacaggctggggatttcactccaggaaacgaacagccaagagacagagcagccaggatctgtcctaacatatgtggttcccttaccagaaggctcacccctggtacccaaaaacacccaggaaagaaggcctaggagccaggcgcctctgaggatatccttgtattagaattttttaaatctgcagttaaagctccccaacttgggggaatgcagctgaaagagcttaaatcctaatagtttgggatttgttatataatagatattatataataataataactattatattatccctaagataataattacctctgaaagcttttattctcagaaactcaaaataattgttcctattgactcctttatatccacaactatatcagatgaaaggaagaaatgtcaggtatccacatctccatttaaaaggaaaggaaaaccaggctaacaaaggctcacttcaaaccagacgggaagcccccccccgccccctgcagagtggggcagtcagtcacaaacagtaattccacagatgacagcagcaaagccaccagtgctccccggaaccacagaaacggagccagacagagggcagatgtctaatcgatgcaggtagggttcccccaaatcatggtcccccattcttggttttcagacttgacagtgaatgtcttcacagcccacacccacacattttagccaacaggaagatacaatctggggcctttcacttagttttaaaaagataagaaatgtgctttaagccaaaggggatgaaaactagggcgctcctccacaggaagcatccgactcaggcgtgcacatctctgggacagagcccgacagtccttgcgtgcctcagctccttcacatcctgttccacatccggaagtacttgtggggtgcagtgtgggggcaaccgagacagcccttgtcaccgaaaccacagcctgactcatacctggccctgctttccggcccatgggtgagctgtgctgccttggctcgcaggcctgccctggtctacacagcaatcccagggtcagggccactctcagaggtggcctctcctcacacactggcctcgctgggactctggcctgcctggcagcagacacacctggaatccagccacccctggccttctccacccaggacccaggtgcagagaatgcacttgtcgcttttagtttgaccgcacacatatgctcagagaaggtcaaaatgcccatctccatcgcctgccagaaattgtcccaaattccaattaagatattgtccaaaagttacctcagactaaggcattacgccacagactctgttccccagaaagtagttttttcccagttacctgaacaaaagtcttatttataagaaatgcatatcaaaactactattctaaagaacacaatcaggaaaactatgccttaagtcagctttctccacatctatttttcagtgttcatagaatgtagaaattttaattttcaaaatgaggaacacagacttttctcatcacctgggtggacagtggggaggaggatagagatgccggagtgtttgcttttgttcataatgctggagtgcaggagaatccagtcgaccaaagatcaaagtcatgttagaggccaggcgcggtggctcatgcctgtaatcccagcactttgggaggccgaggcgggtggatcaccttgaggtcgggagttcgagaccagcctggccaacatggtgaaaccccatctctactaaaaacacagaaaaattagccgggcatgatggcacatgcttgtaatcccagctacttgggaggctgaggcaggagaatcgcttgaacccaggaggcagaggttgcaatgagccaagatcgcaccattgcactccagcctgggtgacagagcaagattccgtctcaaaaaaaaaaaaaaaaagtcacattagagtcgggtcccatctcccatctcctccttcaccaagtctgtgcccaagccgacgatcaatacctgtggttagatctggacttaaccacctcccttccattaccaagtctcccaaaagcaacggcagagcggcctgctgtcattcccaaagggcgctaagaggaagaggtgaggaacactcatggaaaatcctcccctggataattaagggctggctctgtgatgactgtctgcatggttctgcccttttaaatctgccctgaacaccatccatcattgacttatatgcccatggggaacgaggaggaaggggagaaaaagagataaaactctccttacttggggggaaatcctttctgcgtcaaaattcactataaagggtattcggctgctgtctaccccccagagtgcctcatgagcagctcggaccaggccaagctctccaagtcagcagctggtgttcgccattgcgaccatgctctccatcattcaggcacttgcagactcttcaaataggacccaggaaaaaaacctagaccacatcccacctctgtgtgacttctaactccccctccccgagcctgtcctcccctgcttcgaagctctgtaacagggactattggccggggcactcagccacaacaagaaaccacatttcccagactctgagcagcagcctgtggtcaggtgactaagacctcgccagtgggtcagacaggagcaaatgtgccccatgcccctgcttggtcttggccctgaagcactggcagtgggagaggacaatggctgaagaccaagggaagcctggggctccagatgctgaagccacccaccagcacagaccgtgacggtatggaccagagccactgaccccatgtgcagggggagaaataaatttctatcttttgtgagacactgttttagagctgctatgatggcaacttggcctaaacattaatgaatatgccatctcatttcttaaaacccatgtcgtgtactcattttttaagtccgtcaaacatctctgcctgattaagtgactggtttatgtagcattgtccctttgtaattagattccaaggttgtccctcggattctctggcaacactggctgatcttttaatcagctaaaaccttctggtctcaggccctctgtggctcatcctcactccagctcccccattcacctccctcgcctgcattgttttccttgtaaggaaggaaccttctaacaaacggtgtaattgacagacctccccaccagaactccccaagagcaggactttccgctgctgtgtccaacggcaataatccccaatggccagagcagcccctgacacgcgggaggcacacaactctatgctgaatgaaaaatggtttccctccccgggctacaaagacagactgcatttaagttagggtgtcttggactgtgtgatacttcttatgctcttctaagtcagggcaccctacaggcaaggcggctggaacttgagagatgactgacttgagtagttttcaagctatattccaagagcccagcggccttgggatcatatagacacttaatttccatttaccattttattttaaatttttttaaatcaacggactgagcacacactcaaatatgtgcattcaaaataaaatgtgtacctattttctattttatattcatggctcttaataatactgtctctagtctccacctgaaatcccaaatttgcattttttaaaagttaaaaagcacctggagagcggaaaaggtggctgctaagggatgcacccctgccagctgagggatgcccatgcccaacagcagacctgggctcatcccagccttcaagtcctaaagcctctctgcttcgtccttcgctctgatacgtggggcccgagatttatgtatatgccatgttgtctgccacccaatttttaacttggggcaaagtcacttcccctctctagggtgccccaggcatctgtaaatttccagatggacttccagttcccctcagctccgggagacccttgcacctcgagggggcccggtgctgtggatgtgggaaagaagcaaagactgcaacagctcccagcctacctccaaaacaccccttcccaagaaagtgtggcctctttgaggggctgagagcaggccaacagaaaagggtaaagatggagaaagacaacaacatcagaggttggtagaggacactgcggggtcaagggaggccacaggctctgagctggcagagcaagggtcaaggcccagccctatctgctagctgggacccttcaaccctgaaggtctcctagctgagacccctcacccgtgagggtctccattcctgcaccaattaaatgagacgattaggggcattcaaaaaggaatgtctgtcccttgtcaccagcactccttaagcagaagtgaaaaacagtttgctggaagtctcacactatgtgggattttttaagtggagagttttacccttccttccaactgtaatatctaaaatttcacagactgcaattcaaagaaatctgaaggttatcaccaaataaattattatatcattaaatatgaacacgctaaagcattcctggaattgctcttctgaaggacttaatgttggaaaaagaatccctgtaaacaacttcgtatatgctacaaatgaaattcacttagataatagtaaatctaattacataaaatgaggtaattttctacatttctgtagtatttcccaacagggtgaaaaaatgaaaagctctttatgtgtacatttatggaaaggaaccaaaataagttgtaaaagtaatcccactacattgctgtttttccctttttaatataattttataccatattaatttttcttgaaatctccctttttaataccatttttatcaattatttttatggtttataataatatttgattatgtaaattgggtacgttagccttctgcagatacatatagtttcagaagtttatcttcccaaaacaaactatcaattgctattattactgtgagaaaaaagtttcattttattctagaattaaattttttacagagataggattttgctatgtggcccaggccagtcctgaacttctgggctcaagtgatcctcccacttcagtctcccaaaagtgaacagactgtaagcgtgaaccactgtaccaggcctaagaagtttcctctcaaaggggtttcctttccttaatgagtaatacccgtgtagactatgctaaagtaacacagctaacttcagctctccctgcaaccacagccctgtcatcctgatggccgcctatcatccaggacccaacctctaacactgcaatgacagatctggcctatcttgaaaatcaccactcacctaaatgacctgcacttacagaaggggtggggaaagagtgatcacagtgacttcgctgcacagccacagcggggatgagacagcaagtgctaaacagctgcacgaattcgtttgcatttactatgtttcaaggatgacttcagctgtgctcatgacatatgctggttatctgtaagcactgcatcaaaacccaataggaagccatgttttacacaagcaaatcacagaccaggacggtacagccaccctccacctggcttccactaccttacatgtggactggaggccacagaaggcacttgagggagagttcagaggagacatctggtgcgggccagccccacctccacaccctgggagcgctggcaagcagggaagtgtgtgttccccttaggcatgaccactgctcccacatccgacatccgaccttcataatcacaccctgccccttacttccaaaattacaatattacatgcttattttggaaactaagttgtcatgtgaaatatgaaacgatgagataacagccctacaaaagtaaatagaacctgtttcagaaaataagctacccagctgttctcagttgagataattccaggcatgatccttccttgcttccttctatgaatacatttattggtttcccatgaaacaaaacagctggtttcaaaagcagacagacaggcatgagccaccgcacctggcctataatcccagcactttgggaggctgagagcggggatcactcgaggtcaggagtttgagaccagcttggccaacatggcaaaaccctatttctacccaaaaacaacaacaacaacaacaaccacaaaattggccaggtgtggtggcatgcacctgtagtcccagttacttggaaggctgaggcacaaaaatcgcttgtacccaggaagtagaggtagcagtgagctgagattgcgccactgcacttcagcctgggtaacagggcaagactctatctcaaaaaaaaaaaaaaaggtaaaccaataatttttagtgatatataagaagcaaaaaaacacgtaaggaatagtttggttccttttttaatgcaacttgaaagaaagaaaaagaaatggatacatgcaatggattctttaaaacccaggtttcctgagaaaaagctttgatacgtattctgcatccaacataatacttactagatctagtgcggagcctccaccaagatattccattattatccataattttgtatcctataaaacaaaaaaaagaagagaatcattttcaaaatgaatccaggaaaattttttttaataatcaaagggtatttttcacaattatattggaactagaaagttttacaaacatgtaccagcacgggaagtgtgtcaaagtgagagctgtgcagggacctccagagtgcagggacacccccatcatgctctgggagggagctgtggggtgtgctcgggggcccgcacctgactccccagggctccagggcatgcgttccaccgactgccccaggatctcagaaagcagactgggtgtttccatttttaggccacttcactgggggatcctcaggcacagtgagagctgagaacttgcagccacttgaggcagtggtgtcacacacatcgggagagcagtgccaaggcaagaccctctcctcttcctccctcctgcagcactgagcctcccctgcgccccccaccccctaccgtgtgtctccaggtccctgtgagtggaggggccgcctagcgtggcctccgactcacttgcctgtttggcagaagggcagccaattctagcacctcccaaagctgccacagtctcccctcagggagctttccagaaaagcaggtctgtcctaacatgcatgtctgtgtcctctcaaggccccggctctcacagtccccagctctgcgcctgccttccctgtggtctctcttcaagctactcagccctcatgacttgcagagttctctttttaaaaccacaaatcccaaagtgctactccctggaaaacaagcccgcaaacctgtccgccctccttggggagccaggcagtgcagggcacggggcagcctgggcagggtctggatcccgactcccacttcacgacctaggggcccgggcagctgtctcctgagcttctgcacgaggccttggccaagagcctggccacggcgagcagccaagaacccatggctggcacgggacgccaccgccagagtttgggttcacagtgggttcacggggttcagacgtcagcctgctccgctgctgactcaggactcggtggtggcttttgcacacatggaggaaaaaaaaagaagaaaccttttttaaggctctttggtccctttgggagagcactgagtccggctcttagaacacccaaggaagacccctcagttcgcccctgactccaggtctcactgcgctgactccaagtgagctcaccctttgagaacacgccccaacttcccaggcctttttgcttttggaggttccgcaagtcaggaaaatgcttcacttgtcttccctccccacgccctgggcaaactttacttttattatctattgctctgattttcatttcaggtttacttctctgcattttccacttaacagcaaactcaagtgctcagggacagcgctggtgtgctcgagctcagtaaatgttaactgtggaccctgtgaccaaggaagagtaactcgtgttgactctagggaggcgctaacggtaagatgcactgcatttataaaatacattcctctcacaattcaaactaaatcctgccatctggagttgattctaagacagtccaaataaacagcccaagttttaatgtatgttgaatgcttttcaagcgtttaaatgcccttgactgctaagataataaagacaacttcagtcttgaccggacaagtgcggaaacctcgaatgatgtgtctgacacccaactcagagggacaggcatgtcgctcattcaataaccatccagtcacgggcacctgccttgaggaggcttggtgatcccaggttctgatttcagggaagcttccatcatcaagagtgtccttcagcacaccttcatctcacacacacgctcgcctgcaggcttccacaatgcttgctcctggggaatgggtatgccacagtaagctcttccaggaaaacaccagtatctttctagatggcaaaggaaatctaaatcgcttttccctaagagagctgggaactctgacgtttctactcccactccctttttaacagctgctgtttaactggtttcactggctcccatcccttctattttctgggcattaagtctgctcacagcaaggggagctcccagcagggaggtaatctccccgcctcttctcccactgtagccagctgtgcaatatgacaccctgggaaacaatcttttgctgacttaggggactgagggtcaccaggcagcttcctggagcagcaaggcacaagtgaccaccccctcgtccttctgcacttccaaagctccgccctcctcagttcgctgctctctcaatctgaccacgaaggtacgtcaccacttgccaagcaaacaagataagtttcacctggctaccttctccttttaaggagccctagcaagacacctcaaccaagttttctgtgtcgccctgatccttctggggacgtgcaagcaacaacagaacatccagagctctctacccagagcaaaccccgcctcaggaccaaggccgcctccttcctggagaggaagatggagaaataacacagccttcccgcttccctccaactcattcctggtagcagacgcgctgggtggcaaggctacccagacacaaggctcaccagagggcactcaggaaaccagctcaagtccttattgaggtcactgcgtctcaaatacccgggctgggcctgtgactcacacaccagcaccaacaaccagggggtgggatattgcatcaggaaaagctccactctgggtggaacctgcttttcaacctcattgggtgtgtcaccgcccagtgggttcaccttgcccgctgcctagacagagccgactcatcaagacaggggaactgcagttgagaaagagtaattcacgcagagccagctgtgcaggagaccagagttttattattactgaaatcagtctctccgagcattcggggagaatttttaaggataagctggtggggtaggggaagccagtgagccagaagtgctgattggtaagagatgaaatcacggggaatcaaagctgtcttcttgtgctcagtcagttcctgggtgggggccacaagatcagatgaaccagtttattgatctgagtggggccagctgatccatcaagtgcagggcctgcaaaatatctcaggcactgatcttaggagcagtttagagaggctcagaatcttgtagccccaagctgcctgactcctaagccataatttctaatcttgtggctaatgttagtcctacaaaagcaatctagtccccaggcaagaaggaggtctgctttggcaaagggctgttaccgcctttgtttaaactgtaagtttctcccaaagttaagtcagcctgtgcccaggaatgaacaaggacagcttggaggttagaaagatggagtcagttaagttcgatctctttagtctcagtcatcattttgcgaaggcggtttcaggtttgcaagcattccagccgctgaaggtcggcccgggggaccggatggagcccgctagacacaggcagcagctgcaccaccgcctggcacttctggggctctcttcctgtgctctatgcaccagccattaatggaggaggaccctaacacccaacgccagccactaagacagcagctttcccctccttcccacagaaatgggaggaagcggaagaggagcagggacaggaacacatggactcggggaggggaacatcacacactggggcctgtcggagggtggtgggctaggggagggacagcattaggagaaatacccaatgtagatgacggtttgatgggtgcggcaaaccaccatggcacatctatacctatgtaataaacctgcacgttctgcacatgtaccccagaacttaaaagtattaaaaaaaaaaaaaagaaagaaaaaggggacagagtgaaggccgggtctcagtcttctggtgcccatacatgtgggccgcactcgcgccacacccctgcagcactgcactgggaaggtaggacaacagacagtcaacatgggcgccagaagagggccctgaaatgtgcctccaatgagatcccaaagaatcgtttctaccactaccaatcctaaggaagaaaccttcaaaggtgaacacacggataagcttgggaaagcaagagacaagctttgggggctgcaggcaaggctctccttcacagccacaccagggatcctccaccccagcactgacttttggagctgctcagctctgctgcaggcctcccccatgcactgcagggtgttcagcagcacccctggctctgtccactagatgccggtgacacaccccaggttctgataactgaaaatgtctccaaacatcgtcagtgtcccccagagggcaaaatcacccaacagagaaccgctgaactacacccacgatggacgctgacaaatctgacatggttcctgaccagaagcaccgttcagccattcttcctcgtcttggcttacacactgaaactcctgcagcaggaagaccagctcttaccaggagacatcaggcaagtcatttaaaccctctaaattcttcatccacaacaagatgggaatcagatcggtgcttccaacctcacagttccaagtgacaattaaatgagatcatgagtgggaaagcacttggcaaaattcatggtgctcaacagatgcaaagtgctatcagctttatcaacatcatcacccagaaatgcctctgaataacctggtaaaaccaaaagggcccaattaacaattctaagtagtttctaagcaaaatgaagcctggtacaatgattcacgtattctgcaccagaggcctcatggcaggagcgtctgagtggcagcctgttctccgggaaggacccagctctgtcctgcagatgtggaaccactgtcctcataaaaccttccaaaccatgacttctgaggcactcattccccaagaaaaataaaccagcaggcttctcaacacaatgatgactttaatcgaaataatttcatgttttttcaacaacctcaaataacctaagttatgaatgacctcgtgatacaattttctcatcagggaaataaaagtattcatttaattaataaattctggagtgaaaatttaaaaggtgccaaagtatatacagtgagaagtctccctcccaccctgggcccccattacccagcaaaccaaccgtccctgccccagcaagtcatcacgacatctaatgtaacctcagagaaaaatagttatgcacatacgagcaaatacctacaaaactttaccccccttttacccaaacggtggcattctacacacactgttgtttaccttgctttttacctaaagtttcttaaagagcagtccatatgtaaaggacttcctcatttttttaaccataattagcccatgccttattgagctcacattgtttccatttttcgctctgacggcccaggtgtcaaggaagagctgtacatttgtcagttttgctgggtcctggaagcagacctgctgggtgaagggactccatctgaatttttaacagatactgacaagtgaccctccaaagaggctgtcccatatatggcctcagcagtgtctgagggtgctaatttccccctttcccatgccacagtgtcatcaagttttattttattattattttttggtcatttttatggactgaattgtgcttccctctcccacacacccacgattcacatgttggagtcccaattcccaacactgcagaatgtgactctttaaagaggtgactgagttgcaatgagctcattagggtgggccctgatccaatacggctggtgtcataaaaagagatgaagacacacacacacacacacacacacacacacacacacacacacacacgggaagaccacatgagcacacagggagaagacggtcatccacaagccaaggggagaggcctcccaagaaaccaccctaccaacatctttccaggtttattagcaaacgaattcctgctgaaggctcccagtctgcgctacttcgttctggcagccccagcaaattaagccagttattcattcatacacaaaggatgcttcaggggagttttatttatctttctcctattgtaaggctgaacatctttatatattgaagagtcatgcatattttctttcctgtgagctgtgtatatcctttgtccatttttctattgggttactgaccttttttttaaagtaggagtttttaacatattgggaaagttcgccttctgtaataggagctgcaaacactagcttttgcttctggtaatttttgcttacagaaattaatttaatatagacatactatcaataaccatagcacttccaggcaaacttgccccaaagtatttggaagtgcctcctaagaacccggaatcattgaccggaaccagggcccccacattaacaactctcacaggagcttggcagaggtcacacgaacccaccaaggttaaaaaaaaagacaaacgagaaagggcagatgctacacagctaacagtgaagattttaaaacaggaattcgaaactgcaactctgctctgcacctgaaatgcccttggcagcctccacatttcaccagctgtaaccaaaggccaagaccaagaggtataaacaatgcagcgggctttattaaaatcacacggggtcacagacttccttaagagcgtgagtttttgtaaaaggtacctttccgcgcagatgacgcatgtggcctcaaagccttaaggcctggtttgcatccaggctcaggccagctctgatggcaactacaacaaggcctcgcctatgagcctccacttcccattgcccccgggactaatgtgcatgctcctcagaggggcttcgatgatgatgaagtgaggccgtgtacacagcaagactcatcaacttgaaccactattactgtgttaactccacagtgtcctctgtctgaactgcaggcttgcgaacccggaagaaatccaagcctgttgcctattttaccttcagagcagcccctgaccatcttcaaagtgcaggaaccattcctgagctggaaaagcttatgtggttgttcctcaggctcacagacgctaggatttcttaactgattcatctaacacataacatacctactaggtacccagggtggctgagggggaacgcagagtgagtaacaccctggctctggctttcaggaacttctaatgacagaaaagtgggcaaataattagcatcagacagccagtggcagatgccacaaaagacagggaacacctggttgctcacgaaggtccgtctaacctccaggagggaggcggcacctgagctgctccctgaagggctgtgacctgccagcctggggcagggggtgtgtttctcacaggctcaggtggagaagaggaggaaaaatcctgttcgcagagggcagctaggaatgagagggacacccttgaagccagctgatggtgttcaaagttaatttaataagcaatgggaagtcagcgaaacttgtgctaatagaacaaatgaccagccactgcctacaacaacaaatacatgaggagaaaaggaaagtaagagcgaggagaaaagcaaagtaaaagcaatgagaaaatcaaagcagaaggtcagggaaaggcccaaaacggttctagaagtggcactgatgagcacccacagtggacaggcatggaaagaagagaagccagaagccaagatggtgtcctcctctgcacccaagacagccagctctgccaggacaaacagcaacagcaggtaggtaggggagggagtggagatgggtgcctgcatttctgtgacattgaggaaacactctggtgggatattcagcaagccagctgcttcctttgctggctcctgtgtgcacagatataaacctttttctctcattaatatgtcacttatcagtttaatctgcaggccccaaatgctgaacctaacctagagaaaaagagtttttccttcctgacaagtgaactattgccaaatttttaactcaaagggcatgttgatcatatgcaagccaccctaggtaaataaagtccagccctatcacttattatctttagttaataagaggaccctatattcaccggaaaacattacatcctgtgggtcactcttcccatgtactaccctagttccaaactgcattttgaactcttacattatctcagcaacacaattaaaggggtgggggcaggacatacaatactaagttggactaacgtccagggtcaaagcttccacgtgatgaatgtggagtaaaggcgccggccttccattctcccaggtgatcattattagaaaagaaccagccagcagtgacagcttccagtgttggagaaaacccggattggacaatgtggaaggaaggcctcatcctcccttgtgttcgcaaacaaaaacgtccaacttaggcacacagcagctcaacgtctccaacccactcccatagggaaggcagcctacattaaaaaaaaaaaaaaaacagaacactggagtttctgtagcaaatcatgtcactactgattgcctactaacctgaggaggcttcccacagtgaaggagaggctagatggagaatgagaagtgttctctggagaaaacgagagagagctgcaaagatgcatggggaccagcccagcacagaaagccgggggagctgtcaggctagggtggagagggaagcactggttgtccttccctttcagatgccaggcactgcgctgggtttctggcgtacatcatgtcaccagtcctcaccacgttcccgtgagctgggggtacagctagcccccttacagaagaatgcagaagcccaccggacctacaccccttctcatctccctgcgagcaatgccttctctgctgaccctaaactaatgtccaagttcccaacaggtggcttagtcactatttttaggtatgagcatggggtagggggagatcactgctgattaggaaaaggagcggggagggagaccccaggcttcgctcttccagagggccccaaatgcaggaagaagtgcttcaaagcaaggaacgttttcttgtgctggcaacaaacgttcactgggagaaaggccgctgtaacatcaacatcaacttaaacataggggtgcacgataaaacctgaaataacacaaagaggaacaaaacgaagcaactgaaaattactggatcacatcctcacatcaaagaaaaaaatctaaaccatcactacaagttagctacaaataatactggaaacactgcaacaccaaaagctatacaatccagccaaagatttatttcaaggaaacccacagcattacaaacattcattactaagccaaaaaaaaaaaaaaaatactaagtgttcaatccaaaagtctaagaaggaaagcaaagaatagaataaagatacatgcataaataatcaaaaatattgggatgagaaatgaatccaatcatttttaaaatagataacttccagttactataaccaaggaaaaaatagatcacatatccatttgcaatagagcaataaaaggacaggaaaaaatttttaatgcaaataaaacacatggcaaaattttacaatagtaaatttgaacatacagaattagacaatttcaataatttattaataaaatttactcaagaaagaataaaaactataggcagaaaagggtgggtgaagaaatagatcaattcacctcctttaaagtgcgtgcgcgtgtgtgtgtgtgtgtgtgtgtgtgtgtgtgtgtaaacaaatcaacagatcgcaagaggctcaaatggttttgcccttgaataattccaaaacgtgaaggaactggtaattttagcaactccttcagggcacagtattttttaagggcatcacaacataatgccaaaatcaaggaggaagaggaggaggaagaggttcctattaaggaaggatgagaactcctagaaagtgggagggtgcagttctatgtgtgaagagcgaagccctttctgcgataggaagctgtagtctagtgagaggggctggcccaaagagggccctttctaggggaggaaaaaagggtgcttttggaaatgagtatgtgatgtatgagagtctccgggtatttaaatctttttcagctctttttctcgaataccaccggcccacccctagcaatcctcaggatttgctccgcacagcccacccccaggtgggcaggatgcaggcttttcaagaggcttgagctgggaaagcaggaaagcctcattctccttcacacagggtggccacaggcttccttaggaagaaaacaaccccacaatttttctctccctggtcaagaagggaggatccataccaccatcttatattagtaccatggggcagcaactcatactgtactaaatacttcatgaagagaactccactggattctcccaatcatcctgtctccccttaggtaatcagcctcttcccattttacagattaagatgcctgcacatggcaaggaaggagagaaactgggactcaaatccagatttcctgacattgcatcagatgcctaaataagaaccacaagaaaaaaaaattcacagactattaatttctaaaggattccagtaagaaaaatactttgactgttcttaacatttaatttttaactgatttccttttagaagccaatgaactctaatctgactgtccaaaaagtacatcaatttatgaaaacaattgcctgtaatttgaaaggtttacgtgcctcattccatcatgcaaggtttaagaactcctgatcccctttaataaactggaaagaacactgggcattccctaaaacattcttcttgggatttatgtcacagaccatctcttttggaaagggttgcgtgtgtgcgtgtgctcgcgtccaatatgtacagagatgttcctcttttccataaacacaaacttgacacattaaatctgctaatgggaagtttctgtgcttaaattctagcagatactaagaggaataaaaacattctgcttaaacttaaggatgcttacaaagcaatcagggaaatacaactacaaataacctaaatctgagggaaaagaaaagaaacaacaaagagaagcaggaaaaagtaccctgggaggcaagagagagattttttctttcctccccatccatcttcattaaagagcaaacatcacagtaaatgatcatcaactgccaagtcagataagttccatgccatcatcttgctatgaagctagtaacacgtgttctttctgcaaaagtggagtatttctaataattacaatattgttctgctagatgacaatcttaatgtcaatatgtaacatgttacaaatatcaatgaaaaccaaaaaaagtgattttttatgacttagcattaattctttcaagacccagccgaaagagaccaaacaagaccaagtcagaaagtatgtctgagaaagaataaagacttaacggtattctgcaaaaaaaaaattttttttttttttttgagagggagtctcactgtgttgcccaggctggagtggagtgcagtggtgcgatcttggctcactgcaagctccgcctcccgggttcacaccattatcctgcctcagcctcctgagtagctgggaatacaggtgcccgccaccatgcccgggtaattttttgtatttttagtacagacggggcttcaccgtgttagccaggatggtctcgatctcctgacctcgtgatccgcccgcctcggcctcccaaagtgtaaaatttttaagaagtgcctcggccgggcacggtggctcaagcctgtaatcctagcactttgggaggccgaggcgggtggatcacgaggtcaggagatcgagaccatcctggctaacacggtgaaaccccgtctctactaaaaatacaaaaattagccgggcgtagtggcgggcacctgtagtcccagctactcaggaggctgagtgaggcaggagaatggcgtggacccgggaggcagagcttgcagtgagccgagattgcaccactgcactccagcctgggtgacagagccagactcgtctcaaaaaaaaaaaaaaaagtgcctctaacagtattataaggaaaaattatggaatgagctggttcacaaacagcaaatgctgtatttcaaatgcatgggtgacaaattcatatttatatttccactgccatgtatggggtttaaccccaagctaaacagcttccaaaggaagggactgttcactgtggttgtctgttcaacgcttgattgtcctgaggcattttttttctagtgttggaaccctctggttctcttccctcctaccttttgctacttcatttttattttctgcacaattctattccagaaggaactgtcagttatgtaaatcaatgtgttcttgatttataataagtttgttagccgagagctactgaaacagtcacactgcactagggtcagacatgcaaatccaagggcacccgcactgaggcaccccggggcacaaacacccagctaaaggcccaggagaagggtctgcgacccatggagggatgcagagacagctgctcctcgccgcatccagcacagaaggaaccaccaccaacgcctcggtgaagatgaccctgtggcagcacataaaacccaggcaacaggatggcgggctccaagaaacagcctcccagctccgtctagcacccagcaaaccaggtccgatgtcagcaacaaccacgacaacttgttactaccagacaagattcaagaaaggggcctggttcccgcagcccactttccttattttgaagcaggtgtctttacttactcaaatgcctggaagtcatgctgtcctacaagaactgctgaaggagaattgatttgcctccctggaaataagtctccttttattacttacctgcagtcctttattccataatctaattaacatttgtgatctcttgtatcatgccacattgtagaaatttactcaggaatatagaagttttagaaaagaaagcatatggcataattattttattgaaatatatcagatgtgtttagataccccagacaagaggtttaaatttgcagaatgtgcatattgagacaaaaagaactaaaaatgccattaatacttattttaaattataggtaacattagccagaaaacagagctgaatttctttttggagaagtaaaatatttagcctaattggaattttaattccattcaactttctggacagagaaaaacataaaatgaagctgccaaatgtcttcgggggctttcttcagttacactaggacagtgtgttcagcagagagaaagggatcatagtccttgtcctcggacacatttcaaagcagatcttttatattatcttcggcactaagcctacaatttttaccccataattgattgcgaaatgaaatgtacgcccttgtgatttcacagcaagatttccttgctgatttgtttcgtcgttgctgatgtgtttagtccacccaaaagcaaacagctttgcttttacccactacagtctgataccacgggctccatggaccatttcaatattccacaaaagctcaagggcagatccctgcacactaaagatttttctcagagaaaacagatgtgcttctccctctcccagaagttgcagctgtgccagactgatcagggaggcagccgatgacttccaaatggcaaaggaagccttggtgcatggctgccctacactcatgcgggaggggacaaaggtctccagcttccctgtggggagccatgggtgggatgatttaagcagatgagcagacactgatgcagggaagtgaggactgtgtcaagaggtggcaagcatgctcgtaagaaccagagaatcctcatgtttggaataaacaagtcagatttccaacccttggcgaggcagcaaaagtggaagggagaattgccacaatccaaactgaagtcacaaggataaagattttgtttattgcttagaggaagggaattctcatggaaaaaagaagtcaactctgactgccctaccacatcaaaggagggcgtgaggctactgagcaaagaaacagaagtccccagcgtcactgggccccggtgggctgtggctgcgcaaccagaaaccaatgactagggtaactcaatggccaccagacaaaaaccctccatgtcccagtaagggctcctctgggtgtgtccccacacgagatcaacgatttggctgttctcaaagaacactgtgccccctcttcaatgcaataaaaatccaacttacaaacctctggggaaattgccactaaaatgagctgcacatgtgatcctgtttataaaatgttgcagactctgcttattatatttgcaccacttaaagagaatcacaaacccaaaacccattcctttagagggcagagttgattaatcggagccaacaaatggtgaaaacagaagtggcacagaaacaggacagacatttgcaagtaactcttaaatcaattttgtttaaaatcaccagccaaaaacctaagaaaacaacgcagagaagtcacaaaacagacagtgaaatgcgcaagccacatcatctgcgggtacacatcctactctccccctccaagttttaacatgctgagattagagtaggacagtgttgggacccgcatttctaggagcaagaaacccatttccgattctggcagaggctaggtgcccagcagccccagggacaggcacccctcagctgccaggcccactcttcggcacacctcttctctggccacctccctgcccgcggcacagtcctgctttcctcaccgccttcctctggggtctgcctcaaagccaccctccctgtgagctgctccctgacccctccactgagggctccagaagccccacccaagcctccctgtgccccagttttctccgcagcacttatgaaggtaggactaaccacgtatgttaggaattggtttatggtctctcaccacaaactccaggcagactatgaacaaaatttataaggcacatttctttttccctgcctgccagatcaaaaagagtaagacaccaatgtttctgttcccttgttttgccttccatgtcacagatacagtgacgatgccctagtgaaaaccaggacgccatgaaagagaggtcagaacctcttgtcccaatctcacactgcttacctcaaatgacctgtcatgctctttgaggaattcaagagctcccaaaacagaggtggctcaggagacctgggccctgctggcaaagctcaggagggcagctccagccactaacacaaattctgtggaccacccacaccctggctctggacttgcccattggcttgtctctcatttagataaaagaagacggcaccttcctcccatccctggcgcagagctgggtggataccaggatgtacagagaaaactggcacagcaatggaaaaacaacagggtacagcgtcctggggacagatgctgtgaactgtaacactaactctctaaaggaatctaccctcaattcaccaagaaagaccaagtgggactggctgcactcagcaactgagccaccaactcacttcagggagtcccaagcccacaccccactacacctattttggtaccaagagtggttctagaggaacaaagtcttatggatgcattttctgaattggttttggagtttctggaattggctctctcatctgattggatcttaagatgctaatgatgttgtgtccagttagctgagcactgatggtctattgtttgaactgttgatagagatatgatagacgtctgcactggatactcgaaagacttacaagaagggtctaagttaactctgtgtatgatcccttccaacatctttgaaaaactgagaatatgatgttggttggttgctcctaatgtcactggacaaagtggtgaaagactaggatgaactaaggaattcaaatgctcagctcaagcactgcatcaaatcatctaagagcagctaggtgtggctggagggaaagtctctcctcctacagtcactgggctgagattgctgaaaagcaaagccaggacctcatcctgtgattggttgaatgacaagttacaagttgacctcccagactcatggggtgtctgctggtaaaatgagggcattggttgggaaagaatgggatcctgtaacttgggatgagcccctaaattctggtgagtcttctctgcaagtgaaagagtggtgtgtgaggacctctagggctggacctggctgcccaaggcctggaactgaacacctggctatcaggttagatggacatgagagaatggtttctttgtccctcctcccctgccgtctccccactgtacaccctgcacaagaatccaggaggcattacctgcccatgtcctcctgtctgcagacccatggcagacacagcaggagccagtgggacagaaagggaagggaaaacaggacagagccaggctgaggcatcccagaccgccactggggaaaaatgttctggtaactctgtctccagattttctgtctccaagaaaccattcatgattccatcctcaacggttcctttgaaaacagcttcaggcaggcacggtggctcatgcctataatcagcactttgggaggctgaagcgggtggatcacttgaggtcaggcgcttgagaccagcctggccaacatggcgaatccctgtctttactaaaaatacaaaaattagccagcatagtggtgcaatcccagctactcgggaggctggggcagcagaatcacttgaacccaggaggcggacgttgcagggagccgagattttaccactgcactccaacctgggcaacaaagcaagactctatctcaaaaaaaaaaaccagcttcaagtaagggcctaatgttctccacacattcacacttgcaaggcatgaacacatttcccagacgcacggcagagggaatcccgcaccttgggaatttaaatcaggtcagtcgggtggggatgcggcacctgcattttcacaccctcctggtgtgttcccacttggagtgattgcgtatggaaagaagcaccctctcatcaatcccttggaaaaggtaacttctgactaattcactgagtcctggctcatcagctgaaagaactcactgatggggcaggtggaatgtcatgtttccatggggcatttcaggggtggggtgcgtcatcgcttccctgtgtggatctgagaaggagagggggcaggccaggtgcagagactggaaacccaggcttggactagaagagtgttccaagagtaagcagggagcagtgatcagtagccgaggtaaggaaggaccagcggaagcactggaagccctgatcagcaaagacaaggtcttgctgcccaaagctgagggcagaggtcactagcctgcccacagctgcattccacactcccaacggtgactgacttcttaactgaaaggactaaatgcaggagcgtgagccatacccacctgaggcagagaacacgaaaaattgagacaaaaagatttcaggataacacagtgttaatcagaaccctttaatcccctcaatctctcaatctgttgctgaagattttaacctactgcagggttcagctcctgtgatgtgcgtgctagtgttactttgtgtttcctaaggaacaggacattcacaaataccttgcagcttcttttctctcaaatcccactgcatcactcagagagctatttactggaaaacaaaaccatttaaaacattaatatgctatttcaggaattgccttttatttaatgcttcatggtcctttgtcacttcatctagttttaaaaacaaacattttaagaaatgcatttcaaccacagcaaatgagcaggaggcccacagaaagctattactgactgcacttagcatctctggacttagttcttcaccacgtttcctaaggcctcatcttcccaagtgtgttggctggagaagctatttaagaaggctctgccatgtcttgatatggaattgaaatttaccattcagagaggggaggggtgtcccacaattaaatactgtcaggaaatgctgcatattaaacctcccttagagagtcccaaaagctctgagaatactgtaacagaaacctgctaaacctgatgcgtccaaactcatgagaccaggtggcacctactaacatctcaaagaatgggactcctatggaaacgctaccttaggtcaaaccttcccacccccaccccccaccactcccgtgaccatcggctcgccagtcagtctgagacccttctgccatgcctcctcccacacctcgccccttccttcccctcccatcctcccccaacccgtccacaagcccaactatgacaataattagatttagcacacaggcaagtgctgggtaggcccaacttaataaaatacagtgtaagtgatgttagtggcaaatttcatgattccagagacccaggagaacactgggatgctcacactttttaatgacacacctagacttttaaagtcacacacctcaatgttcttaagtagccacatcttttcttactacatctgatgagtaaaacatgcgcgtccatgtcacactggccaatacacattcaagttactgtttaaaactttgaaatgaaatgagaatataagggggaaaaaaagggaaaccacaacagagggttccaacaatatttatatcacattatttacacctcttatgtgtagtttcaaactctttagtctataattaagcaaagtgactaaaaacaattcagttttcaggaactgaagtcgggttcgcttgcacagcctcaccgcggagtcacagaagtggcctgtggagctgagaaaccccaggaggggaatcgccctgaacctgcacactccctcctcacagagctgtggtgtgctccagacaggcactgtgcaactgtgcaaggcccaatcctcctcttcctcggctagccaggggtggggcgggggccaggagggcaggggcagcgagagagactccagaagagagccccaggaactgaggaggctgcaacctacctatgtcaaagttttagaacatgaatttttcaagtgaaaattcttatttccccagcccccccagtttaagagcagaaaaccaccttatctgaataataaactacaaaaattaggtacatgatagaatcgattggcagaatacaattcaagataggttatctgtatcaaaacagctcatgtatcccataaatatatacacctactgtgtacccacaaaaattaaaaataaagcttaagtaaaaaatttaaaaacaataaaaaattttacaaaataaagtcagttatctgacactggccaatcctcatgtatcatctctacggtgagataagcacgataagctgctcccctagccctgtctgctctccgacacggcccaaggtccccatttggctttcccctgttgccctatcagtttggtgcctttattaagaagttttcctaatatctccttcttaaatttcccccaattcctcgccctctgacccagagtgctgctgccggaggttcttgcagagtcccctatgccattggagggtcccctctttaagctgctgccccagctctccaaccctaagccagcagaaaactctaaaaactaatccaggaagctattgccccgtcttactctgccccaaccctggcctcttggcctcttgtcctgaatggttccctgtcctgtgttcccaaaggacaaccctgccctgatcatccaagcacttactcagggtgacatctgcctggttatttgtctctctccctcactacaccaaagaagttctgggtgcagggccacatctgctatgttcctatctgcgttcctggcccgaagcagagcagctgggtccagtaaacataggaatcaatgagttgataaaagatggggcaggaggaaaagactgacaccttactctaggtcttaaagccctagaaacagggtcttaggatcaagtgggaacaaagacctttagaaacaaaatgacttccacagtcataatgctacgatttgaatgtgtcccccaaaattcatgggttggaaacttaatctccaatgccacagggttaggaggtggggccttataagaggtacttgggtcataaggacggagccctcatgaatgtattaatgtggtgacttcaggaacaggtttgttatcgtgagagtgggtcgttatacagcaagtcctgtccctggtgcctttctccttcgcacgagcttgcttgctcttcccaccacgtcatgacacagcaagaaagccctcgccagatgccagtaccatgttcttggccttttcagcctccagaactgtgaaaaatacatttccttataaatcacccagtctatggtaactacccagtctttctgttataacaacagaaagctaagacacaaaatatgctactagagggagaagacagcactgggaatcctaatttctttggatatgtgaaattccatttacaattttaaaaaggaaacacctgagaggactactacctgtgaggaaagacaattcagattttcaggtaattaagggctcacacatcccataatgaatatattagaaatactttccatgtgtttttttttttttttttcagtatggtacaactgaccaccaaccagttaaatgtgctctaggggctccaggcataaactcaactgccaaacaaatacagttttcaacaggagatcccaatttaccaagagagtgttttttaaaaaaaacaagttaaagatgaacacaactccgcacacttgtagcacattcagtagactgttacccaacacttatatgcactcaaagatggctgcagaaagtcagagactaagaatgtgcctgccgctcagtcaccagccatgccaacagaccagttttaatttcccaaatagaagatgagggcagaaacctgattaaaacaaacaaaaagtaataccaaacttggtacattactaaaccaagagctgaagctagaattcatttggtgaccttgagtttatgacctcctggcagcaagtgaaagttcattgtttatatggctgcctcacattaaagtggctgctgctcattcacacagtctccaaaagaaagggcaagggcaaggactgcggacagcttcacgttccccttggaaagtcagcacgccagtgggagacgtggaaaggagaagcacatgtaagaaccaggaatgacctttctaatacagccacactaggcagagccttacaagggcactgcttccaagtgtgactgtgagcttaaaatatccttagaagtcataaagataatcttaaagggtagaaataagagacagaaaaaaggttaacattgaagatttttccttttttaaaactgcactaactgtcataaaggaaatgttcagagatgtgactgcccccaggaacatgccacgactcccactgaccacagcaaccagccagaaccactgcagctgccctgcacagtccagcgtctgttgacagaagccacccacgcagaatctgcctccacctcctacacctgcgatggccaaacactctctcctcattactgtcccagagggagatgtgaagtctatggagaagacagaaagatcacatttgggttaaaatcgacttctcccagcagccattcctcagcttccaaagatatttttacttttaaacagtaaaagtgaaagttcattcctagttgattttcccaagcacacaaatgaaaatttctcttctctcaaccctgcagcctaacttaactgaagacaaaaaaaaaacaaactttaaaacaacaaacacacacttgttctgatatatccatccctttaataataagagaacagagcaggagaaagtagagcttctgtcaacaacagtcaagcctgtgcaaggttgcaatccattttccagtctgtagctttgctctgggaaaatgcagatttctggtccaccatgcctcttccctgggtcaggatctggaataataccttctagaaaagtcagagcttagtctctcaaacactagcacgagactcaggtcgtggtgaccaccacagtggttaacagcaatcccgctgacagtttctcctttaatgcaagaagggaaatagactctttcaacttgtccccaaatgacaacagtggttcatggtgagaatgaagcctactgtgtggtgaggggcagacacaaagctgtggagtcgtcggtgactatctacacagcactatctcaggggaactccctgtcctcaaccaggaggaagctgctagagcttgctttctctccattcatttctaagcccaggagaggaagggctatttttcacctgaggtcgctgatccctacccttggctggaagcagagaaacaacagcctccagtactccatccacatgtgcacaaggtgtggatggaggcaggttcgggctgatgaggaaggtgcacgtctgtctgggcgacgctgacagagcagcttacctccgtgggagtctgtcgatgtcagggtcatgtgcccactgtccactgggctgccatccctttgaggagagggagacactgatgggaaccaaaggatcttctaaaggcaagttcttaccgcaagctggccccaaggtccctgtaatcaaagaaatcattgtggttttgcatttggcatatttatgccccctttcttctagggacaagtctgtcagcctctgaacgggatctcaactttcaaaaggaaaagtgtccggaaacacagatccaccaaggtataaaggagacgagagaaaggcttcatgccacacctcagtgtagacagcaaacataatagcaattcattctcaaaaaagagctgtagatccactgctacttttaacgaaccaatgttttccactaaacatttcaacttaagccaactccacctcatcacacttgttggaaatatatgatcaataatgactccaaaattcatgtactatactacaccagccttggctggaagccaacagcagaagcatgtatgtaaatgaagactgcagatgattagcttctgtaagccctggtctataatcaaccttgtcattgacctatctccactgattccatttacaatgacagggaagagtcattagacccaattgaagcatataatcgaaagccaatctcataccaagccaaccaaaaataatcaaaattctgtaaactaacttgagtacctaatctagtgcaacaatgattggtctcttaacaggttatgtaaatttctttcagcaattccatctgcagtgaccaacagccacccaatgtcaaaacatcaacactttctaactaactgcacagctagcaaaagtatttatgtatgttctattatatatcaacacatcatttccttgaaaaaatctgcttttcccgggacaaagaaatgcctgcagatacttgatccttgtcactacagaaatgtgaataatggaaatcagaatactgttaacagttatctgtatatcaaacatacaaagaaaggaagacaaaaaaatcttttcatgaagagttttctgtatctctgttttaaaagtttgattcaaatatatgttttagatagccaatcaaaaaaggagaaaaagcttacctacaaattaatttacttctctaaagatgaactgccacagacaaaaggactcgccaaaacaccaattaagttttacgtctagtagcttttcaaaaggcaaaaatctaaaccagtcaccactccagaaacgactaggaactaactccaaacacatcagtcaattctctagagcccgacgggtctgaactgtcagacaaaaagagcaacgttctcacggaccctgtgctaggatgcaaaggtgacaaggaaataaaatacaggtcgtcaggaaggatacagcttttcagacagctggattcctaataactggaacggctgcaatgagaacaaatggaatcaccgcccagattcataggcaaccgtgaacatccacaggtgaggaacacagcagtgctaacgaaggaaggtgcaggaccacaaaaccaaaacgaggctcctggcagcagctgatgcgagcacaggaggggaggacaaggactgccctgccgagctcacagggcaatgtctcccgtagccgaagcagctcctccgttatcaatcacacagtgcaatttcccactcaaacacaaaggacagacttgtggaccctggctaagcttccggatctatgtcaaagtggggcacagctaccggcaccaattcaaattcaatcatttaatacatatgagtacagaggtgagcatcggcgaagcactaaaaatgcactaaaaccacggacacgtgttaggcaagaatttctcctgctgaactacccaataaatacggtggccgtgagtaagaattcaatgctaggacaaatacagtcttttgaagatgtgacctaatactctcagattccaggcaagtgtgaaacggtgaccctgggccaggagcccgcaggcccgtcttgctaatttgctcaggctttcaggggaacctcactggacacatgcaaagggcgtgctgacctgtgagcagaggcctgagtgcaaaggacggtgctggccgacactaggcctctgtaaatgtgcagctgggcgggagagccagcgaggatgcctccagcaaggcagtgccactgtgtctgctccacccgattctccctcctcaactttgtaaaatggctgaactattgaataaatatctgaaataccctctgtagaaggagaacacaccactggagagagggaatccggtaagaaaatgggggagaagtacttaagaggacaaccgtcaggtgcagggaagctaacggtagaccaggaatgaggaaactctggccctaaatcccagctcaacagccaaagggctgcaaaagctttgaaagcctgagcaaattagcaagacaggcctgcgggctcctggcacagggccaacgcttcacacttgcctggaatctgagtatttgtcctagtgttgatagtagaagaaaaggaaatcactcagcttctctgggccatggttttctagcctagagaaagaaagataagggctagccacctctgaaggcctttccagctctaattatctttggctctgatttctctgactttacacaaggaataccgtatcttagggccagctgagccaaatcaattacagactgcaaataacttaaaagacaagtatgcccagtgtctgcagatgaggaaacagagcccaaaattagactaccacactccctggcttcattcccagccaggacgggatatcctgaggcaggtctccaggtctccagatctccagagcacagagtcaggaaggcgggagacaaacagaaatgtgatggtaaaggcagcctcccctctaactaggtcttgtctctagcttcttttatgacacttcccaaaagcccattgcagatctcttcccccaaccctaaaacctctattccaccaagtcaagctcaagtggtgttatcccataaacccacatggcccaaaatgcaacagggaaagtaccaaaggagaattcaaacaccaatgcataacaagtgtttgacattacaataaactcaaaaatataaagaaacacgtagcctgcaatgacggtcccagctacccagaattcttcctgctccccaccgcttcttgctacttcaaatactaaaatatgaaaggctaattataaagctaatagaagaaaaaaaataaatatatttgtaacctatgagaagctgatgtatttcgtatacaggatcccaaaagcagaaatcatataaggtgaaaaactgatggattaactacattaaaatcaaggatttttttccccaacagaggacgcttcaaagttaaaactagtgtgataaagtcagagaacacacctgtggtatcaaaaaccaacactaagagacaagaaacatagtaggaaatttcacagaagaatgtatgttaataaacagcaagagtatttgcctacaagtaaaccactagcctttcagggtcagcagaaaagaatgccaatttaaatgcaacttacaccacaagccccactggagagcagaaatgctacttagaatttctgttgggacagaagatgagatctttcttggtaaacttattgctattgtccgggaaagtgagggtgggaggaacagggggtattttaaaggggccaggggcatgtctgtgtacacagtgtctggttccatgccatacgagctatggcagagagaaaaagcactttcccctaactctcagaaaaggtggtcttaaatcagaatgagttaactttgtaacataccacaaactaaccttcagggccacgcctcatattttattcccatgaagctcccacttaaaacaattcacaccttctctgctttgaagtccattcttcagctttgccaatttcaaagctgtttcatcagttctcaaagggatggtcaagcttgaggaatgtgactagcgctggtgagactcacaagagctcctgttcacagactagaaataatttgtaatgaattaatttgtaatgtggctaccaggccaaaacatatagttttgggcacccttttttagtttcacaatacttcataagcctaattatcagacaattatttcctgactagaaaattgaaagggaatttgataatcacatgtaataaacacattaaactatagaaaacttcctaggagatatgaattcaacagaataatcctaatggttaagaacatacatagatgctcaaagttatgattaatagaaatggaaataaacataaaatactgttatagctaagagattggtgaaagaaagttttatagtatcaatgttgccaagaacgtagacaaaccatgctcaacacaattagccatgattagtcatgagggaaatgcatgtgaaaaccatgagatactgcttaacacaattttaaaaaaacaaacaaggggaaattgaaaccttcattcactaccatgagaacataagccactactgaaaacagtctcaacagttcctcaaaaacaaaaaaaaaaaccagttcctcaaaaggttaaacataaaatttgtatattacagtaaactcttcaaattttatgttgccttggcatccattttgaatacaagtttaactttctcataccagaagcagggcttagtcacccttgacacggtctccagttctagaccacacccaaaaggcccagctcgctggccaagataagaacttagaggcatctcctacacccagcagactgagctccccatgttccatctgcttcctttaaacagaacactcaggcctgcccgagaacttacagagccccacgccctgttccctcttatataatgtatactgccagttgtgcacactctctctgtcgctctctctctctgcctgactcttcattcttgccttgtgtaacccaggacagaggactgcctcctgcccaggatatgtaagtaataagtctttgaacttggatttgaccacgacatattatatgtaatatcaaaatatcacatgtacctcagatatctgtacaatcattatgtagccatttttcaaaagcatcttctaaaatatatgtttgaacttgcttcctgttgtgatggtgtacggactctgtaccctccatccgaagaaccaaccacattaccccaggacgtgtgggagcaaacaaggttggactcccagcaccagaatgatggccaggtagtcagacaagacccacaggggtgtccgtcagtataaacaagtttcccgagtcggggctcagaccattatgcgtgagcccatccaccaggtaaaagaagcatcctgtgaaaggcacacggtcatcacccacatccagctgcctttcagttccccttagggaagggtcgctagctactctgatactggaacccaattcagatgggggctcccaaaacacatttgacccaataaccccactcccaagtaatacatccaaaagaaaggaaaacatatccacacaaaaacttgtacacgaatgttcatgggaacagtattcacaacagccaaaaaataaaaacccaaatatccaccaactgataaatagataacaaagtgtggtctatccacagaatggaacattattcagcaataaaaagagctattgacacatgctgcaacagagcccttgaaaacatgccgcgtgaaacaaaccagacacaacaggacacatgttctataattacacttatatgaggtgtccagaatacgcaaatctatagagacagaaaggagactcgggaatctgggaagaaatgggaagtgaatgatgatgggtagagtatctttcgaggggatgaaatgttctaaaattgtggtgatggctgcaccgctctgtgatataccagaaactcttgaattgtatattttaagtgggtgaattgtagatcggtaaaggtttttatttttttacttaaacacagaaacaaaaacccacagctaaaccaggcatttagctggtaaggctattccgaacaaccacacggtagtattttttccttactaataaaagagatagacagtgtctcactctgttacccaggctggggtacaatggcacaatcatagctcactgcagcctcgaacacctgggctcaagtgatcctcccacctcggctttccaaagtgttggaattacagggtgagccactgtgcccggccccatattcccacatggtagcatttacctaaaatgaatatcctactccaaactctagagtactgacgggaaatagtaagcgtcttaggacaagatactcaaaaatcataagtcattagggaaatgcaaattaaaactacaatgaaataccattccacacctactaaaatggcaaacatgaaaattactgacagtaccccaaatgctggtggggatgcaaaattatacaggcactctggaaaattaaacagacattaaatagaaattaaatacctatcctactcataagtatttgctctagaaaaatgaaaaacttatgttcataccaaaaaagtgcatcaatattcatagcaacactgttcataatcaccaaattctggaaacacccacatgtccttcgataggtaaacctggttatacacaccctggtgccctacttaacagtaaaaaggaacaaacaagtgacacatgcatgaacacggaaggattcctcaggcatgacaataactgaaaaacgccactaacaaaagccactaacaacagatgtgtgattccatctacggtgctccggaaaagccaaaatgctaaggactgatcagtgactgccatgggcgggggatggttcaggaattctttggaacgttggcattgttctggtcccatgtgtggtggtacttataagaatctatacatatgttacaacacataggactatacatccaagagtgagttttacagtaatttttttttttttttttgagacagagtctcgctgtgtcacccaggctggagtgcagtggtgtgatctcagcctcccaggttcaagcgattctcgtgcctcggcctcccaattagctgtgactacaggtgcgtgccaccatgcctggctaattatttttgtatttttagtagagacagggtttccccatgttggccaggctggtttcgaacttctgacctcaagtgatccaatcgcctcagcctcacaaagtgctgggattacaggcgtgagccactgtgcccagcctacagtacataaatttttaaaaatgttatggggaaaaacaaacccatacatacaccatacacaaaaccatgttttctctattgaagacacacagattaaaacagaaaaggatcttacataggtcgatgatgatggtgccatgaactgcaaaatatgaaaaactcaactcttacctgaggtccataaatagaacagagagaaagaaatgcaaccagaaaatgagcagcaattgacttagagcgaaacaggtcattttattggctagaaaggagtccaaagctcaaagaggctactgggaagagccctgctttagcactaaaaatacacatcatgtctaccgagaaacaaaaacaaaacaaaaaccctaaacacacacaaagtaagttttttttttttttttttaaaaagggaaagcaaggtaccagcccctaacttgctttctccttcattaacactactctaatgaacaaggtcaaaatataaagccagataattctgacattggtcattatcagtttgctacaaaacatgcaaaaaacatgggcaggtgaggacctccagtcacacagccccattccggatgtaaataatgtctcagggaatattaacttttgtagaaagagtacaagtgtccaagggagagtcacaaacgtcccattaagactccactcagtgagggaggggctccctctcatctgtggtgtcttctgctcaactgtggaaagcagggtttataaggaacaccagacttaccggggtcactgccaacacttatgtaatcagtccctgctgcgaaccggcttctgcagcccatcggggtccacttgctgccctctcttacctcagaacaaaagtaacccagaaaagcatctctgagttatccgccttcccaggcgctgtgtgagcattcacagcctcgagaacagaggctggccagcccacgcagggtggacacactgccccgagtatggacacgcccttctcatgatgctggcaaagcctgcactgggtcctgccacggacatcatggtgggcacagccatgggctccgagaccctccatccaaaatgccctttgggatattccaagagtcccaaatgtcagccctagaaacaccattacttaaacctattttctgggacaaaaggttcattccacgcagcagtttttcaacagtggcactgtggacattcgggctgggtgagtccctgtgtggagccatcctgtggacgtgataagcatccctggcctccacccacacccccaagtagtggcagccgaaacatctgcagacactgtcacctgtgccttcagtgaggaaaggtccatatggggcagtggcaggaggaacagagaggtacacagtgccagatctaggtggctcggttctcttctctgttaagatcacagaagcccttcagactgcacaagagtttctccatatggtggagtctcaactttcttctgggccctttcaatttcatttgttatctaattcaaataaactgcaaatcatctctccatatgtactaaaatagtatctcattttcaccatctcaatgaaagcgcggctgggactctgcctttgaaggagcaaagacatgaatgagaaagacactgtgtgctttgatgagaatttctgaggcataggagagttcacccacaccaagcatatatctgaactaaaatgctttcagaaactaacataataacccatctgaattcctaagtatgcctgaagccaagggccaatacaagagcatgatttgctatgaactagcttaaagaaaggtgtgagtaaagataaaattcacaggtgtcctaacaggatacattcatcatcatgtagctagactggtatttcttctctgcaatgtgaagttatcatacaatatgggcaaggctgagaatcacggtgtttttctgcagataggcatagtaagtaggctgattattttctattgtccaaactagggtgcatctgaaagtcaataggccagttattagttatgcgggggagaagcatccaagactgcagatggacactgacctgcacagcagcctcgttcatggagacgctggccacttctatcagtattttttactcttttccccaaggataaaatgactggtttttctgtttcatcagaaactatttcccctttggggaccacagaaaaaacaatagaagtcccaagaatataacttggaaagatgactgtgaagtgagattatgaacctgtaactacccacaatcaatcctttcccagaataacctgtactttcatagagtacttagttttctaaaactcaccaagggactttcccatattagtcttctggtgaatctgatgggtcaaactactcagaaaagtttttaggaactgatgaaaacttgtaagtcagggatctgaatccgcaatgagacaacagggcatgtttctttaataatgacactacaacaaaaactactatggcaaggaagaaatttgaaaagcacagcttttaagacctcgcacctgatttgctttggttaaactggcttgatgtttgagaggaataaataatttatcataaaagaaaatgataaaccttatttttagcatgctaacaatctattttaagacttgtgaattttgagtctgtttggcgcagataacttaaaatttttttaataagggaaaatcatcatttactaaaaatctactacatgccagcactttacatacatgatctcatctttatagtaatcatggaagtatatctgcgtttcctcaagaaaatcagcagcccaaacagcgaccagttgagtacctgtactagaatctgagactaaaatcttggctataactaaaagtgaatctcaatatggacactctgatagaatagcaagctcctcaaaacaaaccccctgaaaaaaaaaaaaaaaagatttgtaagtgctgaagggaatgcacatttgcaaatggtgcacagagaaaaaacaggtcagcatcccgtactacaccatcctgttctcgttacaattatatgtcttcactgcctaattaaaatacaaaaccaaaaaattctctctcccctcctgcacactaccccatatcccctacccaaccccacacacaggcagtttcattttgacttcgtggatggtacctcagtggcagaaaactccaggggtataatggctgggacatggaggattctggttaagtatcctagctggtttaatttcccaaaaagtaaacactgaaactacaacgggtgaagttttttccatggtctgtgatcatcctcaagacctttccaggcctcagatccataaatattgggggggtggggggattcactgttgtattgttccttctcctccctaaattctagcccttgttttcaatctttaggggaaaaaaaatgctacaaagcaattttgtgacttcatcactgctactgtcaaaattaacaccactcaccagatccttagtaacattcagaatatttagaccacttctctattgttttaaatccttttttctagactaaaagaatgaaccaaaacataattatgagacctgtgaatgctagctaccccaacaatgaagaaacccatttctggtaatctcttctttgtcctggcctgctatataaaagtcccttaacacagggtgaaatcctaaggccctctctccaatcacccttaaagaactaagaacagtagctctgaacgctacagggagtgttttaaaatgacagtgaaaaccacatagagcactatttccagctctgtgccaaagacccatttgtcttacaaatccatttaatctgtatcctccttgacattaggaccacactttctaaacctaccaagatgatggaagaatggcctctgactcaggagggtccccttctgggccaaagaatttcatgacactccattacacaagaatgggcagacagaattacaggtctggattcttctcctgctcaattataatagttaattattgttttagaagagcagttcatgatgtatgtagccaaataagacaattgtccttcacatggctttaaaatccgggccaactttccacaatggccacgttcttccaggcattcttgtggcagatactccctaaaggacaatctgcttagtaaaatacagagagcgcactggataaagtatcaacacttttcaacctgcctggaggccatcagcacctgaagaccactccctgagctattccacttcctacagagatgaagtgactttgaaaaggccagcctactgtgcacacagcctgtgtcctcttcccacgaagcacactattcaatgacatttcttagcctctcctgggtcaggtgtgggtcatgtggctgagttctgaccaggagaacatgaacagaaacaatgtgccctacgtccaggcctgggcacataaaaacttcccacacgtgagcctccatttctcccccaacgctgacttatggcagctgagcacagccacttgtcaagatgaaggaacaataagataaaaggaactcaggttcctgaatcagtgtctgaaggaaaacagcccacggatcagggcaaccagtgaggaagagatacatttctaacatgtatgagtcgttacacatttaaggagtttactacggcagttgacgttacaataactaaacaaaataccggggcaaccttagatcaaggttaggctgatctgaaacctaacgttctagcattagcagctcaggcaagaacaggacctgtttggatggaatctctagatacatgcagatatgtactgtggccgctatatttggccacaataaagcagcccattccagcatgcagtaaagatcgtgctaaggagctgaggttgaacaagatgttttgaaccactgatccttaatttccatagttaaatattagctggtataaatcaccaaatatttgtcaggatcctccacacttcctttgccaaaaccatcataataattcatattaaaatacaacatcagcaaaccacacgaaatccaactctgaatttactagaacactactgctgaagtaatttcacagggaatagtacgcagtacagtggacagaatccaaactgagtttctttagctgtttgttttcaatcgaaatttaacatcgaggccaggcacagtggctcatgcctataatcccagcactttggcaggctgaggcaggtggatcacctgaggtcagaagttcgagaccagcctggacaacatggtgaaaccccatctctactaaaaatacaaaaattagccgggcacggtggttggtgagcgactgtaatcccagctactcaggaggctgaggcaggaaaatcgcttgaacccgggaggcggagggggcagtgaactgagatcgccccactacactccagtctgggttacacagcacgactccatctcattaaaaaaaagaaatttaacatcaagatgctggcattcccccacggaagtcacatgtgtagtgctttcgtttttgctgtgtcaagacccaaactgggtgcaccacacagcaacatttgctcttcttgttggcattcttcctccattctttaaccctggtttccttggtttgacctcaatggataccttaactgcaaactaccttcattgcatattcattgcagggtaatttaagagatgaggtatgaataaatgctaccaaggaaggaaaatacgcattaagtacctactacatgtcaagtactttcacatacttaattccatttaatctttgtaacatatgatatataccataattttccattttgcaaatgagaaagtggagaagttataaaaaataatgaaaactcactcaaggccacacatcaaagtaaatgacaagattcaagtcctgtgacacctgactccaaaactcactctttccatttcaaaatgctacatttgacctatgacacactgctgtcctttacacaagggataaaaaagggatcactgctcaattttgatttcctttaaatatccattttagttaatcaatggttctcaaaatgtccatcctctgacttacaccttactgtatttctacaaaagcaaaacctacacgctcccttctcacatcagagcagcttacaagttgtaacttagagactttagagggtaaggccaggggaggaagaggcctggcccaaattatccaggtttatcgctgcctcccctggaaaatcatcatttctttcttcatagttctgtattccacaataattatttcagagcgtttttttccccaccaattcttatgatttctaaaaccccattttaaaggttacaacatttttaagttcagtgaaacaggtatattttgaggaacttgaaacacaagaacggtcataagccttcttagtgttgtaacaggattgttctacgatgtctaaaatggtaaaatggttccatgcaggatcagaaaaacatttttaatactattctttcccacttaaagaacagagtggcagtgcaggacaatttttgtgtcatattattataactaccgttttatttaagtaattaccaatttgcctagcattcttaaaagtcaagcgtagataagctagctaactaaccaacattatcaattctcatcagcagtttttaacagcattaaattaaaccacagctggtaagtgagaatatcaaaagattaacattcttaagttggtatgagtttttaatactaatcataagcagtcctaaaattaggtgaataactgttataataacttaataagaaacagttttaatgacaaagtcccaccagaaatactcttccttattcaaaagagaattagaacatcaaacactttcaccacaaatatttctataggagacatttgagatgatggaactatcaaagccaggttcttttgatcacgaaggtcaaaacatctctccttgctctgaaacctgctgtgctttgtcctatcagagtccttcccattccctgctggcacctcagccaagtgctgcagaacggagaagcacgttattttaagccttaccttcagataggatccataatatttggttacatatggactgtcacactgactcagcactgtgatttcttgttgaatgtcctctatctcatcttcagcttcttccagatcaatgatctttatggcaaccactttctgagtccgattgtcaatgcctttgaacacctctccaaaggagcccttcccaattttctctagttttgtaaaaagctcttctgggtctgcctttaggttctgtagagagaaggaagagaaaagggaaactttagtccctcatagcaccacaactcctttgtcaattttatgtgtaatgttatagaccacactgtcttccagggactcatctattttctgtgtccagcatcaggctggtggtgaccacagctctgcaggttcaggacataagattcctaggtctcacctacacatgcgcatcagactatgaaaggcagcaagcgtacaataagaacaatcacccagctagattagaaaacatggaaaaaatgccaacttttgtataatgagggtaaattaaaatctaagcacttattggaatgttaggatacacagacttatcgaaaaatcacttttgtctaagcaaaaattcacttttctccatacccaatccccaaaagttcctgaattcaaatgaatttttactaaaatgttaaccagctatatcacagaacagaaaaaaaaacgtataccgtaactatgcatcttcatgaatagtactgccttcaccaaaacaataacaatctaaccagattccagaaaacaataagcagcctgttttgtcacatacatgctgtaccctggaaatagcctctaaaagctcttaaccacctgattagttacacatacatatatagtatacatttctaagaaggctagctgtcagagctcaagctctcatcctaacagctacacagtacagagtcgtgtgaacagctgagttctcaaagggggcagtaacctgtcatccacagggcctgtttgtcaggaaactgagaagcaatcccgatgtttagcaaggcaagacagggacgctgcatatctccccacaaataactgcccagctcaaaatgccaatggcaccccggtgacaagcactagcctggaaccccacagagcaaggaaggactctaagagacaccactgctgcagacacatcttccctcagaaatggtccatagaaggaacagaacgccaggccaaccctccaaatctatgagtcctttgaagaagctgaactactaggaaaaggaacaagcacagggaggagagggaggcctgaaaaggaggtaaagaaagagaatgaggagaagaaagatgacacagaagagggtatccagagtggtgcatgtgaggtgggtcacacacacaacactgcagcaacggcggtgcctcatgagtgacgtgagcctcagggcccatcaggggccacccagccacagctctccaaggtgagacacactgagttccgagcagctgctctccaagagaactgttgaaagccagtcagcccatttctggtttgcaggccttacagtgctacagcgtgtccaccatggcaacaacgcacatatcgccacaatgacacacgagcagatagccacagtgacctcctgcacacaggggcgcagagcccctgccccatgtttgtttgaggctgcacatcaaacaatgcaaaagctcacaaaacccaccaaccatcttagtacaaaatgaaccaaggcttgcgtggtggacatatacccaacgggaaatgcgtcctggggttaccaagagagcaggacaggccagaggccagacactgagtgctcagcccacaccggaaggtcatggccagcgtaatccgaggtctaacgagcggccagggattacaaggactacagttttagccatgatcccccttggctcctaaaacgctacacaaacatccactgtgttaaaaatcaacctatctatccaacttccacttaaagtactgcactaaacatatcaattgggtgattaatcgagaggcatttaatttttttcctgaacaattgctcaattgttttcagtcacggcactacatttcaaatgtcttatgacggtcatacttaggaggaagcctggctgtgtgtttacaggttttaaaaaacacagtccaagactcctgggtttaccaagatagtcaatgacccacaatcaaagcccaggataattttttcaagtgaagactgtttttggagctcgtgagcagccctacaacatcctcctcttcctattttcaagcttatcaataccccaggctgagtatcaccagtcacttttgggaatgccacagaatgcccgggtgggtacctcccacctgactccccctacacgcggccttgaacctgcacctccacctcctctaacacaagctgctaggatgagcagctttcggggatgcgggggaagcagcgcatccttttttagctataatgaaacataccccgttttcagcagctactatcctcgctgctttcatgccctctcccttaccgtgctccctccaggatgaggtagagtggccctccttttattcaaggccagtccccaaagctgggctctggagtccatccttctctcctccaggataaggcttcgtcagtaacccccttctcgctccttcttccattcacccctctctgctggctctctgcccttggcaacatgctccagtttctcccatttaaaacaaacgaaagcactctccctaacccaaagccctcctcctccactctctccttcctctggagtcccttcaaagtcatctggacctgcccggtcctccccaccactgcagcctggctccgctctggatccggtcaccagtgctgcaatgtcgtgtctgagccttgtcaaccacgccctccccctcctctgggtaactttccagtcctttagcatccacagccccactcccgctggcttcttccagtccctctagttccagaaggatcttcacgcagactccaccttggctggcccttactctaggtcccagcctgggcctctactccttctccccaggggtgcccggtagtttcagggtctggggcccttgtttcccaaacctgcccgaacagaaccacctaggacatctgacattcttgcagaaatatatgggagttcagaagaggaggtgaataatccatgtttttaaaacaccccaatggattctgatcaattgccaccttgaaggaaaggctgtgttaaagactcacgtacatgacagctttcaaagcgctagctcaggccttccttctgaacaggaaccccccagaccagctgcttcccaagcattctctctttctacccagacatctctagctcaacatgtgtgcacggaatttgccacttcccctgctggactgtcctcccacagtagccctctgctctgcgctgtctcctttgctcagctgcaagctgaagagtcaggggctgtgtctcacgcacctctacacccctgtgcccaggtatgataagtggcatgggactgtggtcagtaaacatcccctgagcaataagaaaaccccagactcaccctggctcgaacaggacccaggtcagacacctcaaagcctatcctacacacagacagggggtcctggagggaaggggaaagcccttcctgctgacaagggcgagaggggtgctaacagcctgccttcctgaggtcaggagagccggttagcactgtcattcccgggagcagtgattctcagacctgggtgagcctcacactcccctggaaggcttgttaggccacagagccccatcctacgaagaatttctgattcagtcaaccgggggtgggcccaagaattggaatcccggggtgagggagatgctgctggtccagggaccacacctggagaaccaccactcggcacaggctgggacaggaggccaagcagccccaacatgccactaaaacaccatcatgttaggtcaactcatcaccccctccagtaaactgtcccgctcccatactaagagtggcctttcctttctgagacttaattttaaaaacaggcgacaagaatttatccaaacccttaccacattgttgaggaccctgtgggagactgttacaaaaataaccacccataaatcccacctctctgggtccacacccctatgaatgtgacttgggcactcctcccagcaagagacagtggctgccgccctggcccttgaacctgggctagtcttgctctgtgttctgatgaacataatctaagcaaggccccaagaggacttgcagagctccctccagagggacgtgaccatgaggcagtggagagctggcaatcgaaaatggtgtggtcagaaagacaatgacatccgcccacttcctcgacgccagctgagctcccaggatgtgcctcaagtcatcctgggccacctggcctcaaccatgccattagctgactgcagagagcccagaaaaggccagcaaaactgctcaatccacagaatcacgagaaatcgtgagcctgctgttttggccactcggttttggttggcttgctactcaacaataggcaactaatacagaaactgatgctagaagctgggcactgccccagcggaggccccgacggcccatgcttgactctaggtcagaactgctgcagcccatctgttgtgagatgcctccatccctgccctctttgaagaggagtctctgtggccgccccactcttcctgtcccacaattcttgttgagctgaggctctctgaatcaagagctggcagcccgtccacacccagccccaaagcaggcagggcacgcagacccttgagtcagacgctgtgccaggagggaagtgaggagatgctggatggaagagcatctcttgcatgtgtgaggggcatgaaccctggggaccggaaggcaaccctgtggattgttacaataatggcactaataacccatcccttgtgtctacacccccaccccccgagactttgcctgctgctcccataagagcagcccacaccttgaaccacctggcctgtggttcctgtgctggtgtaccctctccaaggtcaagcctcaagggaccccgcagtgttcgctctgcctcctggaaggcctccatcagcagcatgtggagaggcctgttctagacactggagaggccacgtggaagagagcacggcaccggataaacatgcagccaactgctagacctggggcgagacacgcagccttcctcgctgcctctgctgaacccaggccccagacactctccagctggccacagccacacgaatgcacctcagccaggcgggtggaaaaaccacccattcaccccaaggaatggtgagaaatgctaaatcgttattgttttaggttgctaagtgatatagcggtttcttggtttcttatacaacaacagataatagaattcaacagaaaccactgcgggagaaaagtgtctatggggtgtcaggggtagacagatgttccagattctggaatgttttagtaacctgcctgttttccttttgcctggaccaagacggcttagaaaacagcaattttcactcttttactattgtcccaaaagacgtttccaggcgtacggcacctgtacaataaagggtcactgcattgtctcaatctgctcaagcacggcgactttcagaacccctggcctctgtgtcagcagctgtaggccaggctaaaaattacccctggcaagaaggcagccatctgctgaggccggggcaatggggcactcaataaagcagggttccctgcgcgggcagccctgccctttggcaattcttgcacgggttcattaccatactgtgtcccccatggccagaagaaaaatcaatgccaaagaggccctctttcaaataagaaccttgagattctgctgccagaatttgctcaccgaggaaagtagatttccttggcaaaaaaggcacaattctgccagccttcttgataatttcctttttagaagggtttgggctgaactaagcaccggctatggcctcagattggaaaggcctggggcccctcaaccccacagcccgtgcctgaaaggaagcaaagcctaagccagggcaaggcaggagaatcaggacgcccaagggctccgccttttctgaagcagtgggaggtcaggacacatggacaacccccgctccccaacattcccctccaaagtcacctcccctagggcaagaagactaggggatgggggcggggatgggagcagcctgcacacagcaccccctccccaggccctggactcagcactcaaaaatatcaattagatgccttgtccctacagtggagccgggctcgccaccccggtataggcaggaggatcggcttctctatgaccaagggaagcacaagggagtgacttccccttcccgagctcaccgagcctcgagccccacaagccgcctcacactgatgagccctggggcttgctcctctgaggaaagggttcagggataaaaagacaatgataaataatagtatctatctctgcattaagggcaactgagagtgaggatccagcacctgtggaggtgtctgacacatcccatgcagggtctgaatagaaggcactcgaatactgatttctctactcacaactttccaattccctaaaatccccccaagaattttaacagcccaacttccccttctgggggacctcggggttaagagccaccacgcccgcccgacctgaaggacaggctttggttgggtaagtcagggttggtcagctggaaagctgagcgggtgagggatggtggctggagtgcggtggagggaggagcattggcagtatgctggggtgaaaggggctttcgaaacaggtccgtctttgctttttctggtttttaaacaatttttgtcctgttttctctcagtcttctttctgtgaacagatgctttgtcctttgtcaagctgtatgtataatttttttcgtggatgcaaaattgttgtctcagtgtcccaatatgactcaggcattttccccctgcagtgcacacagcgtgtagccagcctaataggagtggatttattgagggtgtacttgttccaggctctgggtcaggagctttacatgaactgtctcagcacattctcatgacaaagctaagaggaaagtacttctgtctacctcattttacagatgagcaaactgagcagaagagatattgagtatcttgcccttggtcccagagctggcagagggcggtggaggggtttgaacctagccagcaagctcctgtctcctcactgtactaggcttgggaccatgtcattagaaacaaaaaagcaaatattccattacatggctgcattcaagtttatttaactgtcttctgctgcttaattaggtagcctttacttctttttaaattttattctgtttttcaagaaacttgggttgtgcatttctgctgtggggaggagtgagtgagtgaccgcttgtcagctcctggccaagacttgggaaacgtgattggaaaggaccacaaatggcttcctggaatttgctcatcagcttcatggcccatcccagtagtgcgggtgtagaacacgttattcagatatgcaggaccactgtccacaggcgcgttttcatgagacgcttgccaggtggaaatcggcctgctgataccgaccccatgtgaggataacacgcccatatggtcactctgtgtatgtgtcagattccctgagaagaggcagtgacatatatcgatacacactcggaagtagaaatttgttttgtaattctcatcggcatccttttggagtttatttccattttgtgtagatgtgggcctatcactcttcacagggaatggccagccactgagaataactgaaaaatcagagggcccatgtatgtgtgcacacagcagagctgggcgtggtggctcacacctgtaatcccagcaccttgggaggcccacagatcacttgagataaggagtttgggaccagcctaggcaacaaagtgagacctcagctataccaaaaaaaagtctgcccttctccctccacttcatctaaaaagcccagagatggagatgacatctgattccagtggccaagaccccaccccaattagagcggtgggaacatgtggcctgcaaaggggcaaggtgccgggaatcatgctccgcgggccaccagtgaggacgaaagttaagacctcaaaggccagatcagagtcaagagcatccgagggagccctgacacagaggctgtgcccacacctgggcaactctcccacgggccaccggcacccccttccccactcttctctgaacccacctccatgtgcccctgtgccttgaacgactggggagggcacacaggccccgcaggcaaacctgagcggggaggctcctggatgcagaggacacgggaccaggaccgggtgagccacaagggaggtggggggcccagcactgcctcaccagcaccacccagccacagacgcagagccagcggccacgggagaccagaggggttcagaggcacaccgtcgaaaatcccaaaacaaggggagggacagtcatcacctgctttattggaacaaatgtcccctgctgtgactgcagccccagttcatgctggcgtcttgcagccccgccagctcctgtacctctctgggcctgactcaacggcagaaagcaaaaggagagctctgggggcgatggtctcctcagccacagctccctaggctaataatcaggcctccgcaaagctggagagagccgtctccatcaggctgacccctgggttcccactgggccaccggactctcattcatgaggatatgcaggttggcccagggcgggaggtccaggacagacccgggcccatcagtctcgggctcccttcacagactacacagaacggccatgacctgggggtttgcctggccaatgtcatgaccacacctaccttgcaaggcgaaaacctaaatgaatgagaaagacagatggaggtatcttctgatttacagactgattctgcgctcaatgagaacgccagaaggtgggtgttttcctgctccctctcatctcacaaaacatggtcccctcagcccagtctaggtggggggcaaaaccagcaactccagccaggcctccagggttccggctcctttgaggagaaaacccaagtgcgaagtatcctattacccacccaagagttacaaagacaattccgaagctctgcccttctgcagctcagaagcagggccattccacaatacaacacaacactttattatattccataatcccttgaaagaattctttaaaattgttctatgatgactgaagtattttatatttttaaacctgaatagctgtcatcatcttcttttgatcatttctggcaatgaaaaatgcatgtggcattaccaatcaactttcagtgttactcagctccaaatgtaccacttgcacagtcaaaccacactcaactactctggttgaaaccaagcttctctacgcttttccatgaaaacaaaaagaaactgagggtgacgtgctctaatacccggtacttctcacaccactatccctactggagcgggcgggaggatgctggaaggaagctgagcctggagcagggaaggggagttggctgcaggcacggactctcaccactctggccttggcaagcatctctaatgaatcacaaacactctcctagagctgaaccgagcctcagaatctactcaccccagccagtcaccaccgatttggccaactgggcacgcaggtggaaacctacctgttggcctgtctggcgctaccacccacagacccatgctggtggctaccattccagctcacccttccatacccgccgtctccctctccccaggccccccaccacgtgtttcatcgttaacagtgttgctacctaccatttctaaagctggaaacctctgcacccccattcctctctcaccccaacatgcaaaccgcgtcatggttcttccgaagcgtctctccatccagccccttccaggtcactgcctggccctccctcccccacagcagcagcctccaactgatccacttcaagacctgcctgtgacctgctgtcagagttgatcttcctaaaagctcacggtttccttcactgcttaaaacaactggggacgacccactgcccttcacactgaggtcacactcagcttgtgaatctaaaccccaaagctcctttctaatcccctcacttaccctcttgtcatccaacttcttaatactgtctacaagcgccaaaggtcatatacagtatgagtccctttatagaaaattctcaaggtgacaaaatttgactggtggagaatagatccttggttgctgaggctggggtgaggaaaagacaaacaaaccaccaaacaggggggtccagaggcccctgtaggtccagggatgggtgtggttggggtcctaacacgaggcttccagaacgagcattcagccatcaaatgcaatgactctacccaacttaaaaggctcctaggtctaagaaatgatgctgggaactacagaggcaagatcatggctaccagaatttgcagaaatccacggacctttaaaattgccttataaaggtaaccattaaacctcttaaaatagaaagggtctacctgcagggcccaggaaagaaggctctactccactggcactgctggagaaggaagccgatgttagacaaaaggccaattgcaggaaaaatgacggcaaagaaagaaggcaaaaggcactggccctgtatgtgggtgcaaacacacacagatatacacacacacacgcacacacacacacagagctgtcaagaggaccagacatgacagtttctgtctgtggcccccagacagaaacacacacaaatacttccagaaagtttgtgtaaagagaactcctaacaatttctgaggagaaacttaattgaatctaagagaatgtcttgtaaaacacctggaatacttaaggcagctccgtttttacccccataaaggaactagattgccagagctcctggccttctcagtgtcacagattaggtgacagctgcagtcagaggtaatgacactcttctcttggatatggtcttggatgtggtctgggcagaatgacaccataagcaaagctactgtcatgcccgggtgccctctacggaggaggcacgagctccattttctgacgattatgtgacttgtcttcaggcacagagcctgaacaggaacctatggccatccgactccaaacactgagcaggtccatcactgtctccggagctctgacagcaacatacaacacaagggcacaaaagaagaacccaaagccctggaatgaaaagctgtggtgcgctgctgcaagacctccagcaagttcttagcttctcagtcaaatggacaatgagctcacaggtctgttccgggatcaaacctgccggcaacgtggtgaactgccaccaccttcaccagagttggcatagaatcttcagcaagcacactgaagaacatgggaagccatctttaaaacagcactcaattttggagacatttttggaaatcactaactcgctggccataactcttaactgagaatatacgaggtacaacacaatgcgacagggtctccaaagagtaaaaatgagagtagatttttagtatggctgaactttaggccaatctcctattttttaatacagattattcttcccctaagtaagaaatcctaaagctgactgcaaacaaataaaataccctggaaagccatgtcatctaattaaactggccattaaatgtgaagaggcattctgtgctggaaggaatagtgaacaatttgtctaaagcaagcctattcatccataaaggtcttctttcattctaataagtttaaagctcactctttatcagtctttccaatacgccctcccaaaatctgaaaatcaagctgtcctttttataaaatatctacacatgcagggatatgtacagaaaaggccaatggaaagtttataaaccaaatgaaaaagaccaaataaaaaccaagtgctcttttgtgggcagttttcccgccagaagttgtcatcaaaaacctgtcatggtcgaaacccaatctgggactgcatatccctggcctcctccattgccctgggaagcgcccagggcatttccactatcaggacagcatcacaccttagggactcccccagtcagatcctggggctccacacaccagccaaccctagacaccttttgatatgaacagaaccggagaaacatcaagctcctgattttgacttaataagaagtttaaggtcaggactagccttcataccagtgctgactcaggacatcagggctcctcttgaagccaaggaacaaatttgaatccctgttctccccctcactcgaccttcaccctttgaaggtgcagatggtattaatgggtttttggctagacatcactaactacccaacgatgcctatcgtccccacaatggcctctgctctgttagaggtgagctggaactgcatagacgcaggacagtgcatcaggagaaagacgctcgtgggaactatttgctctgtgatcctgaggtcagcaccctcccagggccgaccctccctgctgcatgtggctagggattctcaacctgggctgcatgtgggtagctccctaaacagctcgatgtcccagcttcagcctggaccgattaaaccagaatctttggggaagggccccaccccccatcagcttagttaagctaaccagaaactctcacacgcggccaaggttgaggaccaccggtctagtctaggagattgccccaggctctgcagaagtcacaatgccagtagtgatgcctggaaaactctttttatcctgggtcacactcacctttctacacctgggaaaaaatcacatcagtgcaggggaggaggcacctcccggcacctcacctttttcatcttttacctctcccacctctcttctccatgagagaaggagagggcaacccctccccaccaccttgccagatgacttcagtgactagtaattgatggtgcatgcccatcccacatccaccaaagacccatcccacacccaccacacacccatcccacacacatcccatcccacacccaccacacacccatcccacacacacacatcccatacccaccacacacccatcccacacacacatcccatacccattctaacctctctggaggtgagccccaaagggtgcttcgtgtacggtgaactagttggttaatctaaggtctccaaaataaaaatcagtatttatcaaatacctatctttagcaaatggctccaagaagctcaaagaattgacagatttttctagtcctcaaatattctttcgaagaaaagtgttatttctagcctactgataacaaatcatttttatacagtaacatgcttttctacacattacaataaatctactaattactacaatgtaagttcttcctagtctgtgtccatgaacagataatttacttctgtaagtggcactactcagtttatctacctgagctgtattaatgcgttacaaatgcccccaccatctggtttagtaaactcatttctcccatagtatacactttattttatccctacaataatcacatcatctagaggacaagctgaataaatatcctacagtatttgacaaaacagaaaattggcacaaagagaaattaaattctatgaattgcaaagtctaggtctacacaatcaattagttttcaggccgggtgtggtggctcacgcctataatcccagcactttgggaggctgaggtgggtggatcacttgaggccaggagttcaagactaacctagccaacatggtgaaaccccatctctacaaaaaatataaaaattagccaggctaccagctactcaggagactaaagcatgagaatcacttgaacctgggaggtggaggttgcagtgagctgaaattgcaccactgcactccagcctgggtgacagagcgagactatctcagttttcctaaattccttaatatttcctaaatctcctaaagattaaggaatacttaatattttaattaaggaaaaccctagtgctagcatctactatctataaaaaaatacttaagatagaaatgctctagctaagttaaaaatatagcagggcttcgtgactcaagcctgtaatcccagctacttggaaggctgaggtgggagaatcacttgagcccaggagtttgaggctgcaatgagttatgattgagccactgcactccagcctgggtgacaaaatgagaacccccatctctaaaaataaaaaagaaaaatataaattcgatttttgaaaagtattaaaaatgagaaaaacactactataccacctagatcagtttatcgcctgtggcctcagtacccaacacacacacacacacgcacacgcaccacaccaccacctgctctgttaccttaggaaaccactgtttgaagctccgcaaggtcacagtgcaggggaaggtgaccctagagagaataatgctcagacaccatggggtccagtctggacacagcatagtgtgtgccaaggtgaggctctccacccaactctcctggagtcacactccttctcagcacaagttaaacaaaggctctgaggctctcctagtctgccgacgcctacccaccacctggtgctagcgggcaccccgcttggtcatctcatccacatcctcctccaaccgcatgaggcttcatagcagaggcagccgaggaggcaaggcccatggtcacaaagctccagcacccccggagtccccaccagggaacctcagccctgccccaggatctctcagtggttgtgtggggtacttttcttcaacagaaggctccctggctcaaagacgaggcctgcggtttgagatgacaatgaaactgcctctgcaaaaattctaacagtgagaaaatgatgacagtgaaagagatctgacctaaccgactccatcttgcttctaccctccaagctgtccttttcattcctgggcatgggctgaactaacttcgggaggaacttagtttatagtttaactttgaaacaaaaatggtaatagccctttcccaaaacaaacccccttcttgcctggggactatactacctttgtaaggctaacaaattagctacaagattagaaattatggtttaggggtcacgcaggccggaggctacaagattctgaacctcccaaaactgctcctggggataagatcactgttgtaaaaactaagatcagtgcttggaatattttgcagacccagtgttctgatgcaccagctagtgccacccagaccggtaatctggctcaaccagttctgggatcccacccaggaaccgaaaacagcaaaaaacccacttcaatctcctatgattccatctccgacccaaccaatcagcattccccacttcctgaacccctacccaccaaattatccttaaaaatcccaatctccaaattttcagagaggctgatttgagtaacaataaaactctggtctcctgtatagccagcactatgtgaattaaactctttgtctattgcaattcccctgtcttgataaatcagctgtttgggcagcaggcaaggagaacccactgggcagtcccaacaaacaggccctgacagcataaccaggagtttcatcaggcaagaatttgataaaaaatatgcaacgggccaggcgtggtggctcacgcctgtaatcccaacattttgagaggctggggcaggcggatcacctgaggtcaggagttcaagaccagcctgaccagcgtgtatttactaaaaatacaaaattagctgggcgtggtggcacgtgtctgtaatcccaactacctgggaggctgaggcaggagaatcacttgaatctgggagacggaggctgcagtgagccaagatcacgccattgcactccagcctgggcaacaagagcgaaactctgtctcaaacaaacaaacaaacaaacaaacaaaaaaaaaatatatatatatatatatatgtgtgtatacacacacacacacacacacacacacacacacacacacgcaatgcattccaaataaagtatatagttccttggaaagtgaaactggcacctcctttattaaaatcaaaatgcaaacaaaagccatggaaaacatacccagtgtacaaataaacagtaacaaacagtggcagctcccactgctgaagctcctcccacgggaaggccttgtgctgggcagcgttcacaaatacggtttctagacctcacaaccaccccatgagaaagagaacactgtcctcattacacagctgagacaattcgggcacagatcttacacaagatcccccacagctcggaagcggggtttaaggatcatgggtcattctctggactgcaaagtgctcatgagctgcaagcttcacagggtgcctgactccagaggcacctaagtggcaaggctcatcctgtcatcacactagaatgccaggagtaaaatgtgataccacttcccattccctacaggtgaactcaccttcctgtattttacaagaactgatggaagcaatgatgagtatcaggaaactgactattctagaagccagaccaaatcgttttggtgtatgcagatttcaattaataacgcatttcctttacctgaaaatcttttagcttttagaggcctcgaaggggaaattcctggaatggaggtgcgaaggtcatagacaaggttgatttgtcacaaataggaacacacgtatcctgcccaccggggggaaaaatgtcactgagtgttcttttctccctaggtggggcagcaagggcaagagggaacgtgagcaatcaagatacaatctgtgagccaaatcctacatctcacagaaaccctgcaagctccaggccaacacacttcagtaggggccagaaaacaaatgccttaggctttggggactaaattgtctctgttgcatattcttcttctatctttttttttttttctcttccaagagaagggatctctccctgtcacccagacaggagtgcagtggcacaatcatggctcattgcagcctcaaactcctgggttcaagtgatcctctcacctcagcctcccaagtagctgagactacagatgtgtgccaccatgcctggctgactgttattttactttttgtagagacggggtctatgttgcccaggatggtctctaactccagggctcaaatgatcctctcaccccgacctcccaaagtgctgggattatagggatgagccaccacacctgcccttctctccatttttaaaagctcatgagctgataaaagccggcctcctagtcccctgcaggagcccagtgctctggggtcccgggagctgccctgacctctcagaacgatcttccaagcatcactcaacagaaccagaaacacataccctgccagccaccacactcctccgcctgtcctccagctgtccggctgccacactcctccgcctgtcctccagccgcccagccacactcctccgcctgtcctccagtcgcccagtgaaagggagggggaagcaggcccttgtgtgcccccgacactggccggagcccgcccctcccggctcatctccttacctcccccaaaccccttgaagcagccgcctccaaagatgagaaggggaggcttggcaagtaagtcactcacccagggagagagccaggatggtggccttcagctccttgagtcctcaagccagcgttcttcagcctacactgtgaccccctcaagacctacctctgaaggagcaggctacctgtgcagtgccacctctctagacagtggccctcagagggctcccatcaggcagtcctcctgggtgaggctgctgggatggctaaggacacctgtcttcgtggggcctctcacaaacacacacacctcatctggagtggggccttccccctggatggcgttaccctatggccgctgtgatgtctgctttgaacagcagcgggctcattcacaacagcacagtgcccggcacacgggagacctcaaccccatcagctgaataaacaagtgaggcgagtgcagctgaggagctgaggccccagccgccagctgtggcacgagaggcagacagaccttccagactaaggaccgggccacgcactggccagggtgccggcctcactacccacagcaggacaggggccccagctccacccaggtgcatgccaacagcccaggaagcagcaagcaggtggagacgtgcacccgtaagtacagaatgtgagacagaagcaagaggaggtggcgatctttatagtcttcacctgggttcctttctgctgccccctcagtgtagtgcaggggctgagggctcagctcctggagccaggctgcctgaatcgaatccccagctctgatgagggattcgatttaagtgactgacaaagtcacttaaacgccctgtgcctcagctgcctcttctatagatggggataacaagagtacccacaacacagggctgtgggatgaacctgctgaggggctcagggctccgctgcatggcccaaccacttccatgatgccccagctgctccgctcggggtgcagctggaggtcagagtgggcagggcctaccttgtagatgtcacttgtagcttccaccctggttttctgtcacaacagacacctgctttctggtgcccatcaatgtcactaatccacagggatgtcaacaaatcctcatcacttccagaacttccttcccaagaaccatgctaagcttcaggttttagtgaaggaaagggtattctccatcggctaggtcaatcactgctttggtgcttgctttttttttttttttttttttgagatggagtctcgctctgttgaccaggcttgagtacggtggcatgatctcgatcactgaaacctccgcctcccaggttcaagcaattctcctgcctcagcttccctggtagctggggttacaggtgcccaccaccacacacagctaatttctgtatttttagtagagatggggtttcaccatgttggtcaagccggtctcaaactcctgacctcaggtgatcctcccgccttggcctcccaaagtgctgggattacaggcatgagccaccgcggcttggtgcctatttttaatcccttcctcaagcagtagcttactgcaccttcaactgatcttctgctccaaggggagtttgtgagctcatcttattcattctctgcccagtctcttgccacttctttctcctagtcctctattctggtacacacatacacattcacacacatgcatgcacacacctgcctacaaaaccatgccttgtgctaaaccctacctcctggagggagcttccagagcagcccacctgccgcctgacctcctaggttcatcactgccactgcctccttcccacactcaggccctggtgtcccttctttcttgctcctcggtgaggcccaaacaggtgaaaatttcataattactgagaaaaccacagaaaagataatactttgttctgccctcgccacctgtcacaatttctggaaggcattcgaaggagacacaggagtcagggctggtggggagggggacacagaaaggaaagggcgacagccaagactcacacacagtcactccccagacctgacatccagctgtacacagcagagcacccgctgtttccatcaaaggctcagcctgctgcgcactttgtacacaattttccatttccattcggctcactccagctgtgccgccctgaagcacacacctcttccatgggtgggttcagcctgctacaatactaacatcctccaagagagcaaatactataatgcaactctttttgtgattcggctgcttttctccattttgccatatttatataacaatattaatgttgcaatggaagtaggagtacatctattggcaccataatctgtcgtccccttcctatattaaaatgattcttgatgatgaaccatccttggatgcctgaaaaaaagaatcaaatcctttatcttcagtgctctcacagcatttgaaaataatgctagattttaaaacatcacaagtcagcaaagcaaagtgcttaagagagtaggctttggagtcaggctggcccagtgttcttctctcgacttgatctctgcaaagctccatttaaaaacaaaaaaaaaaggaaacttacattaccagcacagtaatgacggctgcatcattatttctctcttatgttacctcagaatttactaggtccataatggcaactttttactgctttgtattaaaattacacataggagaaatgggaacattacaaacggctggagggagcaaaatgacgtggccacttcagaaagccatttggcaatttctcaaaaggttaagcataaaactaccatatgtggaaaccagagagtctccaaggggaaacaaaaaacctaccctctaacccagcaactccattcccaagagaacaggacacacaagtccacgcagacacacacacagatgttcacagcgacatgattcacagtaaccgccagtgcaaacggcctaaatgtccaccagctggagagtaaacagacaacaaacaggtggcccatccaaacaacagaatacgattctgctgcaaaaggaatgaacaacagacacaagctgcgttgcgagccccaagaacgtcatgctaagcaaaagcagccagtcacaaaggaacacatactgtgtgatcgacttacatgaaatgtccagaaaaggcaaatttatagagctacaaagtagatgcagaattgtccaaggctagggtgggaacagagatcacctgtgaatgacgatgaggaatcttactggggatgaaatgttctgctctgattgatgctagctgcaccattcagtaaaattactaaaactcactgcattttacacctgaaatgaattttatggtatgtaaaatatgtatcaataaagctgtttcaaagaaaaactacacattacatacctttagacttctgtctctcacaaatgactgtgagatccttaagggcaaagacttccttcagttcatcttgccccagcatctagtaaaatgcctggcacaagtgagagctgaaatgcccagtggatgaaggacttttgaaaacaaaaccaaaaaaagctaagtattgttcacagtttcatgatttacctaaacttcacattcctgtctactcctccacctaactgatccccaaaaccaatgaccagtgcaggccacaaagctgacaacgtgtccatgaagcttggtggcaggccaagtctctctcacacaggcctctataacaactgtttcagtactgagtggttaagctaaatattaaaagcaaaaaaaaaaaaaaaaaaaagccattgcccttatacaaagctggaatataacaaaagcccaccaagagttttgcctaggcctttcctgggccttaaagcatgacaaaataaccaaagaattcttaacaggacccatttaagattaaataagttttactaggagtctgaagaagctccccaggcctccacagacaaggttattgggcatctgaaggaactccccaaacctctgtgatttagcaggagacaaaataagggttatctaccccagcacctggacgcatttagattaagtaaatctactgaggctccagaggaaggtcttcaggactcagaccttagttatagactaagagaagttgctcactaatgtctttagctgcacacttacatacaagaatatatagcttagaaggtatataagctctggaaaactttgtaattttgagttggtccggggataatttccaggccttctccctgtaaccggctgcaggaaataaaaacgctcttcctctccagttcatctgcatctcattattgggcccgagaaatagcagcctgaccctcagtttggtctgggaacagcttcaagctgatcaaaatcaggacccaacactttcagctgcatcccgaccaactatgaagggcagtttgttcagatgttcaaaggaaacagtgttttcctaatggcagtattatgaaaacttttgaggttgtgagcaaagagaccatgatgtcagcatcagagccagaaagtgggagggttcaggaaaattataacctaatttacaataaacttttaaattctttcaagagatatttcttatttttgacttagaagctgccaatgtaataaatgtaccagatgctgtccctacagaattaaatcatgtaatccccatctcttcaaagataaggaaaccagaacacaaaggtgagatgaactgtaggaaagatttgaaccagtttgtctcaacagcctgtgccctcatccatgacactttacccttttaccatgaggaagtgtattttatctgcacatctaaacagcacgcactggtattactgaagcccgggggttagcagggtgtatcacataaattccgggaaatgtggaatagagtgagcaatacttttccactcactactccattactgctgctacaatatttagttgagaaaataaaatcgtgcatttcaaagcaatctcttccttggcacagatcaaaggacacagaacacaagtgagtcaaagctcgttccatctccacccgctgttctccaagggtccactaggactttaaccatgggccgtttataactcatttcttatcccgacctgaagacaaaggttatttacaagactgcgttattttctggacatggtaatcagctctcatgatttaatactttcttgacatcacactccaccgaccctagcgctgactgatatgtcagccattttaaagcattgtaaatgggacttaaataagcaacgttttggaaggtgtgcaaacctaaataaatattgctgagtagggaccattccagccaactctctcgtctgttaaggtaaaaaggactgacaaaaacaatacattcatcctatgcacaaacaacaacaacaacaacaaaaaaaacggccaattggtaggttccaacttcctcccagctctgccttttactgatggtaaccagaacagggccagcctcaaactccagggtcaactcaagtgacaacacagtaacccctcatactcacagagcactctgtgtttttcaggaaaccagcatataaatataaatggcttcctagacccaagaaacagcctacaaggtagttcatgcacttcagataaagaaacacacattaaaaatcatacagctgagcctaataaatgctcgggtttcccggttcctaggttcctttccatattagtcccttgttcctggagtgaaagtgacgggaagcaaagcagcccacagccctagaaaggctgatggtgcaatctactttctatgcgtttgtcttttactctactttctccatctacacgtccaagtaccaacgcttaccctgtatgtccgtaagaggtcagttgaaatctagaccccctcatttccaaacaacaccagaacacgcggcctgacaggaacgggtgtatttgtggagacgatgggacggagtaccaagtctcagatccaccacttcctgtagcagaaaacagcagccagctagcgtggacctggaaggcccaaagactgaagcctccgggggcttacaggtgccagcaaaggccaagggaggggggagaggccgcagctccgctccggctgggaggagaccagtcatgccatcctccaaagtttacagcttcgggaaaatcctctctatccaagtgtccccacagagttgtttttttccccaaaaaaagagaactaaacacttgaagggcaaaccaaatgaataattcaaccaatgtgctcccgcggctggacctgacaggaagtctgcatacatttacttaactgcggctctctcagtacaactcaactttgattcggcactcagatttgagaaacctcgaccctccagaagcaccaagcaaaaaaggtctccaagcacaaacacagctgccccaaattcccggtctgcccaaactgcacctctcagagtggggcctcagtcctgctctcagaacattctggtgcgtaataaaggcacacactacgaaaggtcaaacagctggtctccatcaacagcagctgagaagcagcaggtgaggccagggtgggcgcggacccgaagacgcgggtctgatcgctgcagagagacagagaatacagagagaggggaggcagcaacaggagaccccgcactggggcccggaagccctctactcccaagtggcccccaaggatggtgctgaactatggtaggacgcaggacacccctcgactgcaagagaggagctgccagccgccccgagggtgaagcctgcagatgcggtgccggtcatcaatggcttctattgaacggatcaccgccagaagctgccatccacgactcagtatccggcagactcggtcacccacacgcataaaccacatgctatacaaaagaaacttgattttacttctgggtcttttttgatcctaggcttcataagaacagcacacaatgtaaattggcaagtgtgagtatcctggctctaatttggagtcatgttagtggacctcaggtttaaaaatagctatgaagaggcttctagtaaaagccattaaatgaaaggtgcatttacgttaggctgctgtggcccacgctgaagttaataaaggaaggagagtgagaagaaaagtccatctgcaataaaactaggaactactctcacctgaacccacagatgacaaagactacctgccgggcacaatgacctctgccccaggctgaggcgacaactgagaacacagcaggaccttaggccagcacaggggcaggaggctctgaaactgaggtggcaggtacgttcccgtggcccaactgcagacacagaagtccccagcaggcctggcccacgagggcatctccacttccctaaccaggaaggtttcctggaagagaggccagctttgcactgtgggccccaggcaactgggccctgaccctgcatctgggaagcaagggccctactgggagtggcgcagcccccctggagtatctcatcccgccgggtagagcaggcagaggcacagccagccggcagaaggcagggcaggccggagaggagaggacagagccgcccgccccaggaggcaatgctccccaccctccaagccgacctgaggccagggtacatggcaggtcccctcctaagccaaagaatccacaccgaggcatgcggagacgcctctacaaggaaagacagtggtgaaaaagaaaacaagcaaaaggaaaatatttccgaattcccaagggagaggggaaacatttcagaaaaatactctcaactctcaaagaaattacagacaattcggagcaccttttaagtctccaaaaagcattaacacagctagagatgaaggtaataaaaatcattatcaaaataaacatcacattaaaagcagcaaaaagtagaaaacaatgacaaaaaagcatatcatctgaagaatggaagcgctaaaaagatggaaaagtgatcagaaaagatgttccatacctgaaaatgaaaataagcaaaaggcaaaaaccccacttccagttagtttatcctagggaaatagacaagtgaaaagattcatatgtccaaagttttccaaaaatgtttttaaagctgcaaactacctaggtagacatcaatgtaaaattaatgacaggaattggtgcccttttggttgagggacaggcgtactcctgcacacattcaaagaaaacatgtggaatgaggtacactgagatgttaacagtatgttctctctgtttttctgcactgtcccagttgttagcaatgagcctatttcacacaggcatatttcgggaaaagcagggcaacatctcaatttttaacgtacacacgtgcagatcaaaaagtgccagactaggccgggcgcagtggctcatgcctgtaatcccggcactttgggaggccgaggcgggtggatcacgaggtcaggagatccagatcacggtgaaaccccgtctccactaaaaatacaaaaaattagccaggcttggtggcgggcgcctgtagttccagctactcgggaggctgaggcaggagaatggcgtgaacccgggaggcagagcttgcagtgagccgagattacgccactgcactccagcctgggtgacagagcaaaactccatctcaaaaaaaaaaaaaaaaaaagtgccagacttggcttcaggaagaagattttaagtttattcctggctgctcagtcagtgattagacaactcaaatccattaccctaaatcaatatggataataataaagaagctaaaagcggcaaatgtctttctatattagatgaaacatcctgaattatattacaccaaacactgtaattactgcatgacttttaaacaattctttccatagggaaaaccgacaaaatgaaaatacaaaaaaagagaaatcattcaagaaaaaaatgttaccttaaaactcttcttctgaagctaaaaaaaacatgaaagtttaaagaaattgggagatcacaggaattgcttaagatctgaatataattcaacaccagtcttaaagtccttgtcattctgggtttcactgatgaaggctaagagtacaggattaacttctgatacatgaaattgttcagtttaaaagacaatgcacagatgaccgctgcggcaaaggctgggcagggtgctggggtccacctgatgcctagtgccacccccactgtcccccaacccctgttcacaagagacagctgtgaaagggccactagcacacagcatggcaccttatcccaaaggcagtgctatcccagatgatctggtgagcagttcaggcagatctcaaatggcctggtccatctgagaaagcccttactttcaaaagccttctatctaccaactcttacaaaaacacacacgagtaaatcactttaaaagccttttttataattttgctttaaaaaaaaaatgaaatccccagacctgtcaaaagctgaatctatgccagaaggagaccagattttgccaagaatatggtgaacagggacttccttcagtcccctggccacaagtggcctcactcaccaccagatgggctgcgtgtccttccacctggtctcgcagtcaaccaacccagagataagcaggccagcttatcctccaaacatcgcccacaacaggcctgagcttcaaccctacaaacgcaggtggggcagcccctatcacggaaagtcaaattcccattttcagtttccaatgagatgtcaagaaccaagcaacaggctcaggaagagccaagaaaattgactttctcaactaaaaaaaggccagaacacatgaactccttgtgtttgtcatgtggactccagttactcacacctgaatctctgaggccctgaacatctgtgttcccccttccttccatatctaattgttgtttttttttgtttgtttgtttgtttttgagatggagtttcactcttgttgcccaggatggagtgcaatggcaccatctcggctcaccgcaacctccgcttcccaggttcaagcaattctcctgcctcagcctcccgagtagctgggattacaggcatgtgccaccacactcagctaatttttttgtatttttagtagagacagggtttcaccatgttagccaggatggtctcgatctcctgacctcgtgatccacccgcctcggcctcccaaagtgctgggattacaggcgtgagccaccgcgcccagctatctaattgttttaaggggtaacttttatgttaaaatttatattaaaattgtggccaggcccagtggctcacacctgtcaacctaagcactttgggaggccaaggtgggagaatcgtttgaggccaggagttagagaccagtctgggaaacataatgagaccccatctccaccaaaaatttaaacaatgagccgggcacggtggcacacgcctatagtcccagctactcgggaggctgtggcgtgaggactgcttgagcccaccagttcgaggctatagttagccattaccacatcgctgcactccagcctaagcgacagaatgagaccctatttctttaaaacaaaattaatgaccaactatgataaaaagtcaataggttgtttgcagtcagctggttttccagtatttgtactgagacacctcttgtccaggattcctgtaatgacacgccatgggctggggaggcaagattaagagtaaaatcaatagctgtgaaatggttttctctgcaaggctcccagttgtattcagccatcaatttagtaaacttcgccttattaccaactctttgtgaccaaaggagcaaactgagaaaatacatgatgtgcaagcacctttcctatacttcaatatcacagcctcattcaccttctcatctccagtaaactgatcccacactgtagttcttatccacacagagcaaactactgctaaaccctcatggtagatgaggctatttatgcagctgggccaccaagccctcccctctctcccttaagaactcagagagactctaacttcccgctccagcagcaaatctactggaggagctgacaccacatgaagagaagaacgtggagtctacggccaggtgcatgtggcttcaaatccacctccacctcttacaagttatttgcctctctaggccttagtttactcacctgtaaaaaatacagaaaaatgcatacatattatagttcctggggctaaaaataagatgttttcttattctcctggggctaaaataagacaattttttattttcctggggcaaaaacaaagttttttttaaaactggacatagtaagtgctcccctgttcccattatggtgtgacctgcagcctcagctgtgttgtcctttctaagccacaactgccaatgctacataaagaagcagctgaatcacaagtgacaggcacacccagtaaattccaactaaaggctgagataggaaaataaatcatcaagtgacaagaaactgtctcatctcaagggtttaccctcaaatcacacagctgatgatgcgtacacttcactattattctccctcgtgtcacatctttctacatgaaaatagaacaaatggctgggcacggtggctcacacctgtaatcccagcactgtgggaggctgaggtgggtggattacctgaggtcaggagttcgagaccaccctggccaacatggcgaaactttgtctctactaaaattacaaaaattagccaggcatggtggcaggcacctgtaatcccagctactcgggaggctgaggcaggagaatcacttgaacttgagaggtggaggttgcagtgacccaagatcataccactgcactccagcccaggcgacagagtgagactctgtctcaaaaaaaaaaaaaaaaaaaaaaaaatagagtaaatgactagatctaccatatgaccttcaatacacatgtggctctcccaaggtatgccctttagtaataacaaatagagaagaccccgatcagtgccccggggtaggacaatggtcatgaggcctcctgcaattaggctgttgctaatacaagccccaatggagacactatcctgagaccatgtagataacacatgctgtgaaacacaatttcagtgaagagaatttttttcttctgaccatctgaaacatatgcagctaaccaccaacaatgcttgtgcaacttcctccattagcctaaatacttctgtcttagtcagctcagactgtgcaacttttataaacaacatcgattcattgcttacagttctggaggttgggaagtccaaggtcaaggcactggcagattcggtgtgtactgagtgccattcctcatggatggcacctcctagctctgtcctcacatagcagaagggacaaagaagctccctcggacctcttttgtgagggcactgatatggttggaggtccccttcaaactgcatgatgaaatgcaatccccagtgttggaggtggggcctgctgggaggtgtttggatcatgggggtggatccctcgcggcttggtgctgtcctcataatagtgagttccagcaagatctggttgtttaaaagtgtgtggcaccttccatctctctccactgctcccactctcgccatgtgactgcctgttcccacttcaccttcggccatgagtcaaagctccctgaggcctccccagcagccaaagagaagcctgtaccatgcttcctgtacagcctgcagaaccataagccaactaaacctctttcctttataaattgctttatagcaacagaagaacagcctgagacaggcactaattccattcatgaaggcagaaccctcatcagctaatcacctaatcacctcctaaaggccccacctcgaaacacaattgcactaagattcacaacatgactgtggagagccataagcattcagaccacagtagctacctatttccttgcctcctgactatgcctggtgtaacctcacagttaggtggtctcacatctcttcaatgatcttgacttttccacaagaatctcacttccacaggtgggtcgtctgcagcatactactagctcattaatacactttatttatagtggctagggttgtaacactgcaggcttccctttgatgactcaattcaatactccacaaagattttcatcctagttcatgaaacgtcattaacactgttagtcatttacaactgagggaattctctagaagcagtaaaagctttcttgtttcttctttttcattttacataggaacaggccaagcacagtggctcatgcccataatcccagcactttgggaggtcaaggggggaagatcgcgtgagcccaggagtttgagaccagcctgagcaacatagggggaacctgtccctacaaaaaatagttgggcatggtggtgcacacctgtagtccctgctacttcgaaggtgaggcaggaggatcgcctgcgcctgggaggtagaggctacagtgagccatgatcacaccactgcactccagcctgggtgaggaagcgagaccctctctccaaaaacaacaacaacaaaaaggaatggcctctttcttgtagttttgtcttctctctctaaagacaaaccatcagtatttatcactcaagtccagttgtcctttctaatacttatactggtggtcccatgaaagctcagggacacagcatccttttcccagcagggtagaagcctaaagctctgggctcaaaggtaaaaaaatactcatttgcatgtaattttgcataaactctcttgtttagttccagatgcccaattctaagtatgcaaaataaaatgaaatcatttatacagcttactgcttccagtgttttcaattcaatgctttaacaataaaagcaaaaagaaaaccttctgaatcaatttctgaattaagttccttaatcaacttctgaattaagttgaagattaagttcaacttaaaaaaaaaaatacatgcatatatattgtgaccagcctataaaaatcaacacttggccgggcgtggtggctcacgcctgtaatcccagcactttgggaggccgaggtgggtggatcacaaggtcaggagatcgagaccatcctggctaacatggtgaaaccccgtctttactaaaaatacaaaaaattagccgggcatggtggcgggcgcctgtagtcccagctactcgggaggctgaggcaggagaatggcgtgaacccgggaggcggagcttgcagtgagccgagatcttgccactgcactctagcctgggcgacagagtgagactctgtctcaaaaaaaaaaaaaaatcaagacttatctacgtttcccatttctccttgttttctgtccctcaagcaaaatcagaaataagctacgaggccaccaagccttcttcaaggctattctgagttatctaatccattaaggagacttggaacccccgtcatactttctctttttttttttttcttagcacctttatcctactccaaactaaatctttctatcacggcttctttcccattatttcatgcaggagggaggaaggaaaaacctaacccttctcatctttgtcaggcaacccaaactgcagtccactctgtgaagagacccacctgcctggaatgccctctacccaccagcaccttcaggaactgctcaaatgctgactcctccaggaagggttcctttctttcacccagtttgtacctctctctggttactattagcctggactccaatgcttgctggaatgtctgcccgaagctggcctgtgagttcattaaggacagcaggtatggcgtaggcatcttccccaggctccaccatggtgcattaaacatagcagacattcaataaatctttgttgagaaatgagcatcatgtctcatcaggagtatgaaaagcacttaagtgctgcagaaattggattgcttgaggggtcttggttagaggttcgtgacattgctgatggacctgctgcgataaggaaggaaaaaaaagtcaaatggccttcgcaagccttctcttcagctctaaatgtacgatagtgaacaatcctttgcagttaagggaaccacagaatccttcctctccacattagttacccctggggaataaaatcatgcttctgtattgtctaatttttaaacaattagtcatgtattgattctatattttgaataaattaaactttataatagcttgatttttattaaaaggaatctttacatcagtagggagaggcactatggggtattttcccctccctacaacgaccacccacaggaacaaggatgatgggaagggacgcagaccctggacgctgggtaccaaattgatcagaaacatgggagaaggtgtggtcagcaaggtggggacaggccagctggggacacaagtggctacgggacagcagagaggcaaaccatctgcagctaagccggcggaggtcttcttccactcaacccagctgggaaaagactaagggaaatttgaggcagagaaaacaaagcaggaggtcctccttagagaaggacatgcactcagcttttaaacctggcctcgaagtgaattggggagcagagcaccaaaaagagctatgagaactgcccattagaatctgaccttgtggaggtccagggtggctaccgagggcgccttgagaaccccaagggcaggcagctttctgagtggcagaccagccacggggacccaggatctgccactccagagaaactgccttcggtctagtcagaaaccgaagacgccaacaaggggaagatggcatctgcagaaaaccacttgagtagggccaaaaggacacgttttcaggataccctcactgatttccaggcagtggaactatcctgtaggacgctccagtggtggatgcatgtcactatacgtttgtcaaaacccactgaacatacaccaccaagagtgagctccaccgtcagcgatggattcaggtgatgacaacatgtcaacgcaggctcatcagctgtgacaaacgtaccactctggcacaggatgctgacaccaggggagaccccgtgggtgtgggagccaaggggatgggaaatctctgcaccttacactcaattttgttgtgctccaaaactgctctaaaaaaaaatttatttaaaaaataatgacagccaccacggtaggctaagctccagagtccctgtggggtgcgtgagagccggacgggcactcagcaactctgggccttgctgaggaaagggtgaaggaggtccccagaagccgaggggccaatgtcatcacatgcgttagtgtgcaaacctgccggtggggagcacaagcagcagtgcccagaggcttcgggagctcctccgagttttctcagaggtgctggcagaggtggaaggccacatccgccaaagagaaaggaaaggtgaagacgcagacaaggcgggccaggcctgtcaggaagagaaatgaaacctacatccctccaccaaggaacgaaaaagtagctcaaggattccaggcacccaagaggcctcctttggcctttttccagttctgttctgagcatcacccaaaattcaaagaaaacatcccggcctatccgtgggtgatgctgcacagagactgggagggatgggagagacaacactgctgcagatgcccagtagcctaggaaaaggaggcgcagcatgagaaggatcctgctgcaggctgggctgaaggaatgcccgatgaagtacaaagagagttgctcaggctgaaaaaaagcaagaaaaaggaggaacaggaggcttggcgcagtggctcacacctgtaatcccagcactttaggaggccaaagtggggggatcgtctgaggtcaggaattcgagaccaacctggccaacatggtaaaacctcacctctactaaaaatacaaaaattagccaggtgtggtggcaggtgcctgttatctcagctactccagaggctgaggcaggagaactgcttgaacccaggaggtggaggctgcagtgagccgagatcacgccactgcactccagcctgggtgatgggcgatggagcaagactcagtctcaaaaaaaaaaaaaaaggaaggaaagaagggggaggaagctgatgatgatgatgaattggtcctggtgcagttttttttcttgtcaataaagcatttaagccccccatatgcaacttactccctttaaagaaaaaaactgaaatacaaggctgtgaaaaaataacaacaaacgtcctcattattccaggaaaccccccaaagagtccatacttcccaaagacatttaatacctactgctctttacagaacagaacttcctttaaaacaggacatttcactttaattactaaaattacctctgactaaaacagcaacaacacaggcgctccaatgtaacctgccaagttgtactcatggtcattccagacctccaggttatctaaaacactgcacctctcacagattaaatcaactaaaagcaaatcacctagataaaactccaaaatccctttccccattaaacctggcattttaggccagctgccagtggctcatccttgttatctgagcactctgggagccaaggtgggaagattgcttgaggccaaaaggtgaagaccagcctgagcaaggtaagactccacctctacaaaaataaaaaacaaactaaaaacctggcatttttagaatgcttaagtcattcaaatattaaagaaaattgttaggccaggcgcggtggctcacacctataatcccagcactttgggaggccaaggcaggcagatcacctgaggtcaggagttcgagactagcttgaccaacatggtgaaacccagtctgtactaaaaatgcaaaaattagccaggcatggtggcacacacctgtaatctcagctactcaggaggctgaggcacgagaatcacttgaaccagggagatggaggttgcagtgagctgagatagtgctactgcactccagcctgggaggcagagcgagactccaactcaaaaaaaaaaaaaaaaaaaagaaagaaaaaatagtttaagaacatgatcacccaaaatatcctaacactgcttttatcttttcttattacacttgattggtctagtgtgtatcttataacctagccaccatcatagctgactataatcatgacctgctctttacagagtgaacgctgagctcatgccatcccttttcccctcatgtataactggcacaatatgccctgccttccaggcagcacacacaaccctattgttggataaccatgtttaaactcactctcggccaggcacagtggctcacgcctgtaatcccagctctttgggaggccgaggcaggcagatcacgaggtcaggagactgagaccatcctggctaatacggtgaaaccccatctctactaaaaacaaaaaattagccaggcatggtggcgggcgcctgtagtcccagctactcgggaggctgaggcagcagaacggcatgaacccgggaggcggagcttgcagtgagccgagatcgcaccactgcactccagcctgggcgacagagtgagactccgtctcaataaaaaaaatatataaataaataaaaacctcactctcaacagaaaactcctgattggttttaaccaattaaaaacgtcctacacatatcagcctccctgtctttttttttttttttttgagatggagtcttgctcagtcacccagactggagtgcagtggcgcaatctccgctcactgcaagctccgcctcctgggttcacgccattctcctgcctcagcctcccgagtagctgggactacaggtgcccgccaccacacccggttaattttttttgtatttttagtaaagatggggtttcaccatgttagccaggatggtctcaatctcctgaccttgtgatccacccgcctcggcctctcaaagtgctgggattacaggcgtgagccaccgtgcgggctaccagcctccctgtcttatgtaaatgtcttcctttctctagataaggtcttttatcagcatatacctgacgaaatgcccggataagaaattcggtcccatactcaggacccacttcaggaagaactctatctttcctgacttctcctccttccccggggaattgtcagtcgcatggcctggattccccaacagggctggcagggggcatggattggccagagccccactcctcttgccacagggatcagtccagggttaaggactatgctaggacgctcagcattgcctaagaacttgtgctagagctactgaaaaagaggtgctctttgtcccccaggatcacatcattaaggctgggtgctgcgggcagccgcctttatcatcggctggggcacacctgcctaagaagtaagccctcacgttccactgtactggaagtcaagcccactgcagccctttcagtgctgtgagcagatgaatctccccttcttctttttgcttaaactagttgaggttgttgttcttttgcctacaactgaaaaacaacaacaacaaaaaaatcactgtaacacaatgagtatgtgccccaatggtgagtaacaacaccagccagggtcatgccagccaccctgggccacatcaaaccagggatggtaaaagcagcaccactggaagcccagaatcacccacctgggttaaaatgaaagtctgctgggtttaactcacctagaggcttctacccgatttttgcaggtgcaaccaagactgaggctgtttaaacagccttaaattctgctatgcaactcactggaaaactactttaggacccacttcggaagtgaccaccactaaactggacaagagatgcagggtcaaaatgatgtatatattaggtatgtggagctcagacacatgatttgtctaataaatttgttaaaaggaactcctgtcgtctaagaaattacaagctactcttgacttacgaccagctgacacactgttcccactggtgatcagccacccacagcacctcgcaccccatccatccacctgagccaatgctgctgccgtgtggacactctggggctcacattcagagcagaacctgctttgcctagcaggtaaagctaggtggagtagccaagtgtgatgaagtctgggatctgaaacacaggctactccctcttcaatcaccctctgtatagtgataacagccgtcccatgttgctagcacaaatgacctaattaatcagtcaccagactcagtctctagcctgaactcttccaccagctccagacccatatttctaactgcctgttcatttcctctgcccacaatccactcatctgaaacagaattccttatctacataggatcttcatcttccatgctagtcatcagccccaaggacttgggtgcgtgggtgcgttcattcgccccagggcacctccctccctccatcaccatcatcactgaagcctgccccgctcacccccacagctccctccctcaaatccctcctcctccccacccactggtggcacagttcgatctggcatcagcttttacctgggaaaccgcaatgagacctagctgggggaccagcctccttcctttccagtctaaccaccaaactgtcaacgcccaaaatgggtctcattctgccaattcaaatttcccagaaatgtcacatcacctaataggctaaagcccaaaccactcagcatggtcccatgggtgataatgacaaggtagtctgggagcacttattttaggacctgatatgatctggtcctggactaccttcttcaacatatgtgtcttgttctctttcctttccccttaagtccggcagaattggattccttgtatttttccaaacactctgtgccatttaaagacaccatgcttttgaacattctaatctgtctggatgccctctgcctttaaaagaaattcttctagaacagagctcagccattgtttcctttattaatcttcagccggctaggtctagatacttaattaccccctcctctgcgctacttctgagccttatacttccataaatgcattttttcccattgaaatgtatgcgacacatgtgcctctgctactgggccataagctccttgaagacggagctgttagtcatctaatcccaatgccagcactgcaccagacgtatgacagatccctcttcaactctaaacaccatctcctatgccttacacattggctgatataccacctattagatatctattcagatcaacacacatctttcttcccataattaagaaggcctaccggttttatgaactattaggaatactttcccagcatccagctgagcaattttgacaggaggaatcctgttttcatgggaactactgaacccactagagggggtgcagcaaagaggaatgcagtaaacaccagagcggtacaacaccaggagggcactacaatggagaagggggtactgcagggcacagccaggcctggcacagccccaaagaccaacctaaactaactcagaaacctgcacccagaaacataaagaaaactcctcctcctcctccaactctcttatgccaactagcttcctgccttcagaaccaggaacttaactcttaagattatagtttacatagactttggagtaaaaggcttttctagcctagcctcacaacttaactgctatttccaaactcctttctatacgaaaatatgcaggcgactaaccaacaaagttacaagtgaaatcgggaatgtatttgggaacagtccacatattttaaactttatttcttacaattgaaaaactgtgcttctttttgcatcaaacaatggtgaccacagaagtaaattacaataaaaatattaatatatccctaggctgggcacggtggctcacgcctgtaatcccagcactttaggaggctgaggcaggcggatcacctgaggttgggggttcgagaccagcctgaccaacgtggagaaaccctgtctctactaaaaaaaaaaaaaaaaaaaaaaaaaaaaaatacaaaattagccaggcatggaggcacatgcctataatcccagctattcaggaggctgagggcagaacaatctcttgaactcaggaggtggaggttgcaccattgcactccagcctgggcaacaagagcgaactccgtctcaaaaaaaaagaaaaaagtgtattaatatatccctgatatggtttggctgtgtccccacccaaacctcatcctgaattgtagctcccataatccctatgcattgtgggagggacccagtgggaggtaaccgaatcacaggagggtttttcccatcctcttcgcatgacactaagtctcacaagatctgatggttttataaagggcagttcccctgcacacgctctcttgcctgccgacatgtgagacgtgactttgctcttcttttgccttccgccatgactgtgaggcctccccaaccatgtggaactatgagtccattaaatctttttctttataaatacccagtctcgggtatttcttcatagcagtatgaaaatggactcatacaatcccttcctagtttttgtcatgcgattaaatggccacaaagtctacacttacgtaccatttttcgtaaaatagcaaagatctttacaacaaagcctgacaacactccctctttttcttaaagtgtacttctatccaaatagtttccatttctcacaaaagttaaatcactaaagacaaccaatcataccaaaacaaaaatttgaaaatctgaacaaagagaaaaagcaaatgagttccagcaaaattcaggagcactaacttctcatatctcatatcactgaaaggaaaaaaaaaaaagccaggcactgtggcatgcacctgtagtccctgcttttgcagccactcgaggctgaggcaggagagatcacttgacccaggagttcaagtccagactgggcaacatagtgaactcccatctcttaaaaaaacagtaataatagaagtgtagtagtaaaggtccaggtcccttatccaaactttcaaaatccaaaagtctccgaaaaccagcagtttttccaactcctctggaggtgagatctaaactgatctgaagccggttgacagcaaaccctgaaatgatgtgcagctactcacagtctcagtgccaacaggcagacacctcccctcgacgctccagtcctcgtgggtcactgggcacagccaagcatccactcaacgctgctcaacgctatggctcaatattgcccctgacccacttatgcaccttgtacgggatgaaaactttatacaaggaatgtattatttcaatgactactgccctgccactcaaaatgcatacagtatgattatgctgaaaagcagactggtcctattttggggtgaatgttcattcagagcagtaattttaagtcataatattggcacttatcctgcaaatctccttctcatctgagacttttaactaaatcaacaggctgaaaagaaacacaagatataagagctattttaaaccagactatttaccatatatttataaaagattcatctaaaagacaatcaaaaacataattctggccaggcgcggtggctcacacctgtaatcccagcactttggaaagccgacgtgggtggatcatttgaggtcaggagttcgagaccagcctaaccaacatggtgaaaccccgtctctagtaaaaatacaaaaaaattaggtgggcatggtggcacatgcctgtagtcccagccactcaggaggctgaggcacgaaaactgcttgaacccaggagacagaggttgcagtgagccgagatcacgccactgcactccactccactgcactccagcctgggagacagggcaagactccgtctcaaaaaaaagaaaaaaaaaaaaaaccataattcagtcaggcagaattctaactgtttgtcctcctcaggctcccacagccacttcaaagttagccagagcctagacacagccaggacagtggttctgctgtcttgagtgaatgctcacactctcaaggagtatatgtgtggaccccagtctgcaggcagtgatccttgtttcgaatacaactgggcaaggggtaaggtgcccagcaggagtgtaagtgtaacaccaccgtgtgggtattctcacttagcaacctaggcaaagcaattaactacataaaactcattaaataacacactgctttccaacagcactgccagggatgagaggaggagagtcattttttctttctccaaaggcaaaagaaagcagcaaggaggtcgggcacggtggctcatgcctgtaatcccaacactttgggaggctgaggcaggcagatcacttgaggtcaggagttcaagaccagcctggccaacacggtgaaactccctctctaccaaaaatacaagcattagccggtcgtgaggcacacacctgtaatcctagctactggggaggctgaggcgcgagaatcacttgaagccgggaggcagaggttgcaatgagcgaagatcacgtcactgtactccagctagggcaacagagtgagactgtctcaaaaagaaagaaagaaagaaagcagcaaggttattctttctaacttgtttggccagagccaaacaagtatgtatctctggctggtactcctctgtcctaaagatggggcagggctggtcgggtgcagtggctcttgccactaatcctagcactttgggggaggcaggcagatcacctgaggtcaagagttcaggaccaaccagcccggccaacatgctgaaaccccatctctactaaaaatacaaaaattagctaggtgtggtggcacgtgcctgtaatcccagctgctccagaggctgaggcatgggaatcgcttgaacccgggaggtggaggttgcagtgagccgagatcccaccattgcactccagcctgggtcaacagagtgagactccgtctcaaaaaaaaaaaaaaaaaaaaaaaaagatgtgacacgccttgtattaaaggaggcacagaagtcagttaagacagtaaaacaatcatcatgaaaaccatatggaaatgtgggatgatatttatgacacaatgctgaatgaggaacaatatcaacgtgtacctacattatgactgcaattacttaaggaaatgtgtgtacgcagacaactggcaaataaaataggaagaactacatactcaagtactgggattctagatgcttttgctttaaaaatactttaacggagatggagtgaagatatttttctgggtgaaggttcccatttctgtacaatcctcaaccccccacttcacatgattcttttatagaccatgtacgcataacggggccagggtaggaaacgggactcgcacaccacagccgataagcaactggctgttctgctggtttccaaaggcccttactatcacaagtcctccagcagaaaggaacggaattactactactctgacataaaatgacaaactcaagaagaattattttcggggaatttcaaaaacactctcatttgattgctatagctaatattaagaaatcatctatgcaacaggccatgtaaaaagtactgaggtgtttatcactttaaaagggttccaggctgggtgcagtggctcacgcctgtagtcccagcactttgggaggccaaggtgggcagatcacgaggtcaagagatccagaccatcctggctagcgcggtgaaaccccgtctctactaaaaatacaaaaaaattagccggacgtggtggcgggcgcctgcagtcccagctactcgggaggctgaggcaggagaaccacatgaacccaggaggcagaagttgcagtgagccaagatcacaccactacactccagtctgggcaacagagtgagactccctctcttaaaaaaaaaaaaaaaaaaaggtaaaaaaaattaaaaatagaaaataacatattttatatgaacgtacctgcatgcacagaaacgtctgtatatttgggggttgggaagcttctcaagccttctcaggcctcccaagaaacgatttgctccacaacatacacagtaatgcatcccagaggaaggaaccagggatgccacttggagaactagttttcaactgaagttgtttaaactatgtgatcactttatgcctccagggaaatgaaatcccatcccacaacatccaaggctagcaccgatggccccaggtcaattttgggagtgtgtacccagaataccgatgctattagatggcacacttcaatcgcatcctctgcctttattcttcagagataaacacaggcagttgggggaccgaggccaggaaatgcaagtagtttcacttcacagaagctcgtcttttcttgcagaagacaaagcaggggaaggcattctgaatgacacaagttgttttagaaagacttcagattcttcgataacaaagggaaaaaagagcgcaaatctctgtaactcctcttcctgatgtggtcaatcccctaagtctgtataatgtgctgtttacccttgtattttaaaatgccgtataaaacacatttccaggctgggcgtggtggctcacgcctgtaatcccaacattttgggaggctgaggtgggcggatcacgaggtcaggagatcgagaccatcctggctaacatggtgaaaccccatctctactaaaaataaaaaaaaaattagccgggcgtggtggcgggtgcctatagtcccagctactcgggaggctgaggcaggagaatggcatgaacctgggaggcggagcttgtagtgagctgagatcgcgccactgcactccagcctgggtgaaggagcgagactccgtctcaaaaaaaaaaaaaaaagtttccaattcctcatgtaatgaattgtaacaagcctcagaaaaactacaatgcacttaaaaccaaaagcaaagccaacaaccccaaaaccctcaaataagaaagcctggtaaaatcaaagtgtaactaaatccagtacaccctaataacagacgacattattaaaataaatgggggggagagataacagagaaatagagatcacttctgaatcaaaagtcaaatcaactatacataaaagccaacatcccaaacattgaaaactctactgatatgaaatactttttcccattctgaaatatatgtatagtattacatttagttaagtgttaaatacaacagctaccgagaaaagaaaatcaattctaaccaaagacggtcatttcatcagtgggaaaaacaccggcgggtatgcccttctctcccctgcggcatcccagcacctggagctaagaggagctggacagatgatacagagcttgctcgggggcttccccttacgagggctccctaggcagaggaaggcaagcggtactgagtctgagaatcctgcagtggctgagcatggggaggggtaggttcaaaggcccaggaacaggcactgagctttggaggagcacagggagctgagcccacccagggcagaggagctgaagagcagagaggaggaagctgggtactaaaaaaggccctgagttttaggctggcgtctacatctgatcaggaagtcaggagcagcaggcaataccacagttaagaaaagttatcctgacaaatttgagaattatcaggttcagagcatttgttctagttcggggttttccaaaaagactactgcaccctagatcttgagagatgcactccttatgaaataaggttccaagtggcacgcagtagcataagcctgtaatctcagctacttaagaggcagaagcaggaggactgcttgaggccaagagttcaagtccagccttggcaacatagcgagattcccatttctaaaaataaaaataaggttccaaggtcaaaaagacatggaacacacatcctctgcccccaacaggtttataaatacatgctaaaatcgcaaaggctctaatgagtcttataattacaggcctattcaattcccaaagttaggtcagcggttccaaagtcagtctttggaaatacaagccataggctgcaagcactgattgtagcttgctctgcttttcaaatgggcaaggctactgtgtgcttcactagagtggggagcaatgaggattcaggattcttttttgattctccagcgcagtggttctcaaagtgtcatcctcgaggcggcaatacaccaggacacttgctcagaacacaaactccctccgagacgcccagaatcagaaactccagggcagcagggcagagcctgtagtctgcattttaccaacccctccaggtgacactgagtggccttatattctattagagggctgggcgcggtggctcacacctgtaaccccagcactctggaaggcgaaggcgagaggatcacttgaggtcaggagcttgagaccagcctggccaacagggcaaacaaaaccttgtctctactaaaaatacaaaaattagcctggtgtggtcgcgggtgcctgtaatcccagctacttgggaggctgaggcaggagaattgcttgaacccgggaggcagaggttgcagtgagccgagatcgtgccattgcactccagtctgggcacgagaatgagactccatctcaaaaaaaaaaaaaaaaaattatattcgattagagggtactttttcagttatttcttcaccatccaaaacaacacagtctgggcaacacctgaaaggcaatgaacaggagccagtcagcagctccatgcccaccctaaggaggtggggctcagagctcactacagagaatggagataaaggaacaaggaaaacatctgaaagtccaagtcaccgccccccacacccacaatcctaaattccaggaagccagttaaaaataatccaggaacaagtttcccgatcaggaggagtgcacagacagcgcagtgccagcccggtgggctgaaggcccagggctccctctgctccagcaccaggcggtaggcatgggggtggcagccaaggtcagctacctcctctcacgcagacaaccgccaccaagaaggcccagcccctccggcacaggaccacaaggacccacaccgccagctgcccaccttgctgtgccaggcacgctgccagccagaagcacgccaggctatgggggaaggacctgccctcaatgaaatggagatttttcttttcctcaaaaaaaatgaataacaatgaaacatgaacacactcttctttaaaggttaaaaacaaggaaataaaaacgcccaaaacaccctctgttcacagccctgaactcagctgtttcatggaggctggagggacaatgtgacggtcaggagggcagagctgtgttggggatgtggtgcagggaatctgacacgccagggagcaggcagtcgggaggaaggaaaagaacacacatgctggcctcccagtcagggcttccgccccagtgatgctgttttctagccgaggccttgggcaggtttcataagcctcggttttctcatctgtaaaattagtctgacagccattccctcagcagagaccctgagggttcaccaagaggcctggccctcactgaagaaaactcaatcaaagcagtccccttccgacaaggcttcccatgaagggcaacaaattccaaagatgtttattttctagactgacataaatccagccatgccacaggctcagtccttccacctacccacagcaagcaacagggaagcaggtgggagaagaaagctctgctgcagaactgctgaagaagtgaggctttgtgctaccagctttttctgtgtgaattacctctcaagaaatatttggtaccaggaaactgcatccatcacacataccacaggaacgctcctcaagcaatacctttcttcatctggagttcaagtggcagtttaataactttgaagtcaccacattgaacacgcttccaaagttcgacgaaactatacctaaaataactgcgggctaaggctcagtcccaagttccagactgtttttcatttctactcaatggttcgttgctgtaaaattctacccaagaaagtactctgtccttaagcaagaaatcacttgaaggccataccccaaagaagagctttcgctgtttagatacgcacccttcaagtcctccatccattaacatgctatggatttatggccagcgctgtgcagtgcccccagcgcgcagacaccactgactctgcaacatgcaatctgctaacacatggccactgggacagccacataacacccaggccctctgacgggctattcggcatctgtggcacacgtgtgccccagtcctgcaccgaccaccacggaacatacgaccagactgatgccacctccgccctgccaagaagcacatactcaattctggaccagggggttggaaccccaaagcatcataaacttaagcaagcgtttctccagagagatcctatgaggctcccggacatcgttctgtgtccacaggatcttgggaccaaaaaaatgagagaagcaagaagagcaggttctcagttcaagttggggaggtggaggccaccgaccagtagagagatggaaaaataagcagacatgtatactgctgtttatttacagggagaaaataagaggcacaatctcatgatgaagagaacggaggctccgagttcttgcccgccgccctggcccagcagtcagtcctagctcttggaatttcctcacctgcctggccctgtctttattcacctataaactgaagaatagcaacttggaggtagaggggtcacacagacagcagcatctaattgggtcaatcctgaaatcccactaaaatcataaatctaaaaaccaccacatacctgaaacagagagaagacaactgcaatgaaatctcagaagctggaaagtaggtagtggtttaaaaaaaaaaagggggggggtggggagtagaggaagacaacgctaaaccggaggtgcagaaaacagagaactttttttttttttggaggcacagtctcgctctgtcgcccaggctggagtgcaatggcgcgatctcggctccctgcaacttccgtctcctgggttcaagcaattctgcctcagcctgccaagtagctgggattacaggcgtgtatcatcacgcctggctaatttttgtgtttttggtagagaaggggtttcaccatgttggtcaggctggtctcgaaatcctgacctcaaatgatccacccgcttcggcctcccaaagtgctgagattacaggcatgagccatcgcgccgggccagcagagaactaacttaactcacagtgctggacccccggctctcaggaactgacggcaccagtccctctgccgggggaatgagtgaaccaggcagagcctcaaagtcagccacagaagtgggtagacagccagacagcttgccccacatctcacagccaggctcccaaagtcaaggaaatgatgaaaatatattatctgcaaaggaaggaaaaattgaggatatatggaccaggctgcagcagacacagccggaagcagaggcagcatacttaaaaatggggaatgaaggccggggatggtggctcacacctgtaatcccaccactttgggaggccgaggcatgtggatcacctgaggtcaggagttcgagacctgcctgctccacatggtgaaacctcatctctactaaaaaatacaaaaattagccaggcatggtggtgggcgcctgtaatcccagctactcgggaggctgaggcaggagaatcactggaacctgggggggcagatgttgcagtgaatgaagatcacgccattgcactccagcctgggtgacagagcgagactccatctcgaaaaacaaaaaagataaaagaatatttgagggccgatgcagaaggttcaccatccaagtaataaagtttcagaaagaaagaacacagaaaatggaaggggggaggggaatcaaagaaaaaagtcaatgaaaagatctgagtcgcttcacagaaaaggcctaaccaagtatctgtcacgagaaacgaaaacagccccactccaagccacatcattgtgaaacttcagaactcaaggaaaaagttcagatcccattaggtccaggaagaacagcacagcctgcacacacagaagccggtgctggcagggcctccatcttcaacagcaacactggaagctaaaacacagtggagaaacacctttaaaattctggaggaaatgaatgtccaccctgcaattttacaccatgctaaaatatcaactgagggagaagaaaaaaaatttttgaaaagcctgtctcccacgctgcctattcacagaaaatggcgcactatatgcccaaccaacatcatggcataaaccaagaaagaaaatgacagcagagacaaaaaaaaaaaaacaaaaaaaaacaaaacagatattcaacacaagagagcagcagaaggaacccagaggatgagagcaaaggaagaccagaggatgggggtggcacaagaagcatagaagatacgcaggtgacgaaaggcacaggtgccacccgaacttcctaagacaaggttgcaacaactacagagtgctgggatgaatgagaagcattaccaaaagaaaagaaatctgatcagtaactatggttgagtaataatggctgggctgcagatccgtctgcagtccattaatgtacacaccgcattctgacctcactgacattacaacatctctctgctgggggagagcggggagcccatgtgaggaaaagaggcaagcggaagagaagtaaatcctcatccgcagggtccaaagtctatagacaatgcctgaaaccaggaaaaaaaaaaaaacacaggcagaaatttttttttttttttttgagatggagtttcactctgtcacctaggctggagtgcagtggcaccatctcagctcactgcaacctccgcctcccaggttcaaagaattctcctgcctcagcctcccaagtagctgggaatacatgcgcccaccaccacgcccagctgttttttttgtatttttagtagagacagagtttcaccatgttggccaggctggtcttgaactcctgacttcaagtgatccacctgcctcagcctcccaacgtgctgggattacaggcgtgagccaccgcccccggtcaattttttaatgttcctcataaactaaggagtaacaaaaacaaaaatcaaccaggagagatcaaaggggctgccctcggggaataagaaatggcgggaggtggaagcagctgctatctttcccaaccaaccttacaaaactacccattagacatttctaaatagaaactaaacaaaatcctaagtaattacaaataaaacaaaggatgtggacctgtaacagttctttcaaaccttacggcctaaaattctcttaaaaaacaggaagagacttaaaataataggaagataaaccccagctacgtacttggtaagcattaatttaaaacttgaaatgttcccacaatgtattcagataccaacagagcgcagaacagaaaaggtttcttttgctgacgaagaaccctcaagaaacacaatggaaggtctctagagtcaacaatgttgttccctgggtgcgcataaagtgactggtaaccaccaatttgggatgtttcacagtttgtaccaagcaaaggcatatctcagtttatttcccctaatttaaaccttgcaaaccagggagccatttaggattaagaaactccatagtcaccctcaggaggcaggttatttttcccaaagcatttggcacttatattttttataatttccactgcaaaaacatgaattatgggaaatgactgctacaaactactccgacgacagtggctgattctacgcgatgagacatggataatagagtgcaacttctatttcctgcactcacaccacccacaagattccattaatgataatcagctgagctaaggcattaaaaggcacagaaaggtggcttgggtgtggtccacttcctgcaggtaaggagcttccacaagggcagctctgaatcatcgggagtaatcgcccaaataaagagctaaggggcccgtttctcaggagaccatcggacgcctggactgcggctttagagtgtgtgtaaccgcacaagcacagcagaaagtagcagtgaccatcgacaggctcctcccttcagtaactgctcaccctgcatcttgcaccagggtcctggaaaaatactgaactgaaaatgaaactcaacctgcaccacattaggcagctcagctctacgcatcagaccgtagctccaagaagagcatcaaagtcagaaagagggtgggaaagcaatgatgccagccgccacctgcccataactgctcagcacagttagcaagctagaaaatctcatctgaccaattcctacttgaaggtcacttgcttttatgtgacatgctatcaagaatactcccagatctgagactggactcctccaaaagtttgggtttttctaatttaaaaaaaccttgtgaccatcctccccctcaaaaaagaacactttcaagcaaaacaaattcttaccattgttacattttggaacacggagtattcaaaataggttttttgtttttttgacacttacataggcaactaactaacaaaacagtaactaacagtaactgagtacttattactctttagcactgatcagcaaaaaggatcataaagcaagaggagtaatgagatactataaaatgttcactgagagttcaagccacgaagctgagtgaatgctaaaaaaatccacttaggctgtcctactgacacctgggctccccactcgcatccctgggcttcctcttccctgaagtgctgcaatgccttctaaaggggcacccagcactccccacacctgagaaagcaggagccccaaagaacaggagatcatctgctcaaaaatgtgccatacttccggctgtctacagatgcaaggcctcccccaggcccacaggcaccccactgcctcttcagctccaggaccgatctagatctagcccaccagaagctgtgtcaccgctttccaaccatgtgcctttgctcactgtgtcctcagtcactgcaaccttcttagagcacatgccccaaagcaggcagccgacctcttgaggacaggatggactgaggctctgaactctgcctccaacgactccgggcactatactctgcaggctcccctgtgcagtccaatgctgtcagtcaccagagcacactccacagttcagcaagtccccaaggtgctctccgaacccacgtctcggatgtcctgactgtccacacccagtgacacaccaaccttcccccagggtgcagatggtaacagggtaactgggcaggcacctcccaaggaaggaacggaaaagaacccgtggaaatgtgacactaacaagaaaaaaaagtacaagagcacttaagccacaattaaatgcagctgtcctgtgtttgccttcatttcccagactcccagagtgcacaggcttccctagggtggagcagagcacttgagaaaagctccccatgttcccagactggccattagacaccagtctcactatcctgatgcaaggggcattctcagcaaaggtctatttatccaagcagcaagaaaaacagaaggggaacgagggggacaggatgatgttaacaagacaaacttcaggtttttaagctattcctctaaattatctgtattttcaaatatgaaactatgttaaacttacaacttcaaaacatggtaaattaaccaggccctgcaatatgcaatacatgtgacgtatataattcagtatttttcaaactgtgggtcaggaatcagtgggctgtgaaatcaatctagtgttgcaaccagctccttttttaaatataccacaacagcacatcacaagcacaggctgagcatccctgatccaaaatgctccaaaatatgaaacttttcagcgccaacatgacactcaaaggaaatgctcattgggagcacttctgatttcggatgttcaacaagcatataatgcaaatattccaaaattcgaaacacttgtggtcccaagcattttggatgagggatactcaacccgtagtaaggattagtacggtctcctgaaacttgtttttgatcctgatgtaaaatatatttcttacatgggtcacggttcagaaaagttgaaaagtgactgataaaattttgtaacagaaatgtgcaaaccaaaatctcatttttaaatcacatttctgcaaactcaaagccgattggtgttcctgcctccatctgaagcttttcttttaatctcaattgagtgaaacaacaaatgctcaatgaaagacggagtacttatagccacagatcagcctgatttctttatgtttattcgtcactatattcattcagtttctgatgtctatttttttcccctactgaaatataaaactggggtttaagagaaaaaaagcaaaggcttcagcaactttcattaaacatttactttaaatggtaacctcattcagatctaccactttcaacccctcccctaggacctggcacatgaaagttcaataagggttgctgattgaataaattaaaaaatcagcctcctatttctaatttctttagccaatctaactagcaatgagataaactttaatgtttgcaaaagtaaccataaaacagtaacactgcatgatgagtgggagtaggaggagtagtagtttccaatcacaaatttgccacataatatatgatctcaccttggtcagttaagtcttccttggtctccacatctacaaaatggtataatatcatctacatctcaaacggtaccggtaagaatcaagaggcataaaaatgatttgcaaaacattgaaaaatggtgtttatactaacatggttgttatttttcaagcatccttgcctaggccacctgaattcactctgctttatttttttattttatttttttttttgagacggagtctgcctctgtcgcccaggctggggtgcaacggcacaatctcagctcaacgcaacctccgcctcccgggttcaagtgattctcctgcctcagcctcccgagtagctgggattacaggcgtgtgccaccacgcccagctaattttttggatttttagtagaaacagggtttcaccatgttagccaggatggtctcgatctcctgacctcatgatccgcccacttcggcctctcaaactgctgagattacagactctgctgtctttctaagccaactccttataagccctggtcaggagacaagaaaaagggagggctatgaggcctatcagagcaagccatagaagagatacggacttctctcctcccatttagcagacaacagtcgaaagcaggtgtgtttttaattgaatcttcagcaacaactcttagggaagcctcccagggcagtagcaactgctaatttgaagtagaaaataaatgtgctgttgtttttcttttgtggggtgggggaggagaaaagaatgttcttccccaaatgatacactgttaccatacagtctgtagatgtacttaggtacaggaatgactggcagaagccaacttacctacctctaaaactgtaaaactgtaacagctgaaaatctgatcatcttttccactgagaaacacttaagatctttcatactgagaaaacaaaataaaaacagttcccatgtaacacaacctaacagatacataatagttgagaggcaaagttattaaggaaatgtatcttcttttcccaaggtttaagaattctgacccactcaaaaaaaaaagtgaggataaaaatgaaaaggtgagatactagatatcacctggtaaccatctgatactgacttcacggcaccagccaaaggggctttagtaccttttcaaactgattcgctatccacaaaggccaattaacctagtaagtgaggcatttgtgctagattccaacctgatgaacacggtataaatatcaacctaaaggaaatattgataaaactttttttttaaatcattacaagagtcctttcttgctcgactagtaagaaattacttttttcacccagttcactctgacctacacacctctaaattcataccaaagcggctttagaaaataccaagaaaccacatctgattgttacccagcagtcagcagaagtttaggttttgaatgcatgctaaattcaacgctccttaaatgagagtcgacaaaagaatattcttcaagcatcttcccagtcactcttaagataataacttaactgttgctgcttaaatgtatatttatttactgcttaaacatatatacacacatatatatactgcttatatatacacacacacacacacacacacatatacacacacacacacttggactaaaattctagctgccattaaagtggtaactttgagttcctatttttccagaattcaaacctgaacagtgaaatccagttttctttttacggtttcaaaaaaagaagggagagggatgatctcactggaagaggcgagcagaccccagaggcagtcccaggtctgggctctgtgcttctcagccctcaagacacagggaaggagcctgttggtacctgtaaatcaaccagtaatctacttggatgcttttggttttcttcaaacacttaacgttcactcagctaaactggcagagcaaactttcatgacatatcctaactgcatcctaagatttccatcctaagcattttgccaccatttctgcgcctacaaagtttacaagagttagccaaggacggtagctttgtttttcaaagggctaaaagcaacgacaacgaaaacaacaacaacaaaaaacctttaacttatacatgtaaatttgaaattcaactcctctcccactccccaaaaagtcactggtaggccaaggtgtcaccaagtaccgaaagagaggtttactgggcgaagaattcctgtaaatgcaaccaagtctcaaagtgaaagtccagggtcccggggccgggcccgggaccctggtgcgcggctgtccgagggattcctccttccagaaggtttgcaactcgcactttcccccggtccgcaggtgcacgggggctccgggcaaagccactgcaagtggaactcgcggttaccttcctccactccaccctgcctactccgctcgggcccggacgagtccaggcgcgctccccgtccccgccctgcccaggtctcccgcccgcctgcccgggggtgggggacgagcctgggggacgcgtcctggggccctccgccaacccggccaccacgcagggccccgggacccggcgggggcctccaagggcatcactccacctcacttctcccggggacagggccacccagggcctgcagctccggaagagtgttggggcgaggggagcgcggaggactaggcgcccgcacccccacatccggacccaggccgcggttcctacggctcctgcacgcacacgccggagacctcggccgccggagccggcagggacgcccagggactcggactcggacccccggccgagccgggcgcgcggggagccaggctccggcgcgaccccggccggctgagcgtagggggacgccgtgtggataccgccaagttgctgcttccgccccggtcgcgcatcccggccccgcggcccgcgcccgcctacctgcatgccgggcaggcccgactgcaccggggagtgagccatggcgctcaggacggccacttcctgggacgggacggccgggccgcgacgatccgcgcggggcggcgaggcccgcgggccgcgcgcagccctcgggcggcggggccggccggagcccgaggccaccccagccctggcgggtcccggccgggcggcgggggctcagcggcgggtggcgggccgcgtctccatgcacggcgccagggaggagctgctgggggcgcagggcctcgcgcgcactgccgccgccgccgctgctgccgctactgctgggctggagccgggcggcctgggcccgcgcgcgctggccgctggagccggagtgggcgcgcacagcccgccgagcccgcgagcgccgagcgcgtcccgccccggcccggcccccgcgcccgcccccacggcccggccggggaccccgccccgcgcttccgggagggggaggggagaggccggtggccgcgcgggagccctaggccgcagccgccgcctgtcggcccggcccgggtcccagctgctcctgcggcgctcccacgcccccgcgggcgggcggcggggccgggagggggcctcggctggggcgggcgccgggagggaccgagtcggggccggaggctggccgcgtgcccaccgggccggcgccggggcgagcctgggccgcggccccctcttcccgccagccagcccaccccgccccggcggcctctgggaaaacgcgtcccgggcgagcccctgagggcaggatcggagtcgggggcacctggggaaggagagcgccccgtggggcctcggccggtggcctgtgccaaaaggccgggcagagctgcttcggtgtctgggtgaagtttccagccaacccaagaaggaaaccgaaagggaagaggccgagagagaggttaattcctagtgctttggttaccgaaaacagcccggctgggactgctgggctgggaacttagctaagcagtgcggaggctgaaccccaccatctctgggatccgcagcaaatcagaagcccccacccacgataaggggaaaatggggcgcagagggcagggaggaagggaagagaatggaaggaaagcgcgtctggactttgaactgcagccctctccctctttcccttgcctcggaagctccaggcccactcagcaccagttctgtctcctcttttcagccgccttctctctagctactgaggggaaaagtcaggatgaagcgggtccctcggcctccagaaggtgttttattacagtcgcaaacaggtagagcggcagccaccccagtgatgactccctgctccttagattgtagggacgctggcacctcactcatgctcctaagtggccattttgcgccctggctgggcgagttaggcagacaaaatgagcccccaaaagtttaaaggcctccaccaaaggagtatttcttttctgaggtgtcattgtattccatccacgaacttcagttcccccgggtgctctggatctgacatggagtaggatgctaacatctaatcccttctttccctttggaaagatgcatgttttttctcggagtcctagggaataccttagaatactttcatggttgtcattggtacacccatcccttgaggagccctgccacccgtaagtaggactgcaaggaaatacaaaattaagagaagtatgaaccctgatacccaggaacttaaaatcaggtgtataaattttgtacacctaaaaaatatggtacctaaagaggcgaacagcaaaacaagcaagaatgtgaatctttaaaatgtttctattcttcagcgcagcccaggaattctacctaaagtaacatatcctaaggcaacaaccaagaagtgtggaaga

SEQ ID NO: 591 - DNA, 128067 bp, Homo sapiens
  source 1..128067: mol_type = genomic DNA
cccccgcctacattctcaccggacagcccgagccaccccagaaggccggggagcatgcacgggagtgtgtggaagtgaagcacacaccaccgccacccaggtgggcgctgctcacagacgcaggcccagcactcaaggccgggcagctatgaggctgacccgagcccccggtgtgtgactgcggtgctggcgcgtgctgtgtctcaaagggtgcgtggacgttcccagacggttgtcctcatcccaagagcggggcctggtcgcagtcactgggcactcgctgtttgttgagcagagagccagggacaccttgtgccaccggttctctggcccctgcccatgcaccgatggtgacagagaatttcctgccgtggtctctgggaaccacagacaggcccatctctcaccctgggctgcttataaagctgtgcagatcccaggcgaaggccctgggccctcagcatttccttcccggggctccctctggcccagatgtgggagctgatgtcccccacaccagcatctcccactctgccccagtgtggggggcgatcaagggaaccagacagcacccacacctcaccagtgtctcgaaggaggacaaggtgcaccaccctgccatgttccccaaatgcacttattcaaacccccacacctgtccttgccccgagcctgtctctgacatcgccagacttccaccgagtacacggcgcctctgggccctcgcagagaccgggccacccttcctggtggtgatttgggtgccgtgtcccccatgtgagctgctgagggctggaaggctagtttctgccatgattcagaggacaggggtgggtgggggacgggaagctgcattctatcccctcggacttctgactctgctcgtggcatggccggttcttccccaaatgttctttggccgttgtcatctccatctcgcagcccagccaaggacgggagggccctgtttgccaggggtgcagtggggctcatggacacaggtctaggcacatgtccactatggccgctgtcctgggaaggggcacagacccgccacacccatttcctcagaggaaaccagcacaggcctgtctggagcgctgggctgatgggctgagcccgtcctcctccagcgagaccagagagaagcacacaggccgtttacccagttagttacagttccaaccacagaaccacccagccacagtgagagggatacgtccctttatggagggccaagcactgcccggcactgcggtggctccacggtgcacggtgctgtcctgggctcctctgcctccaggaccgtctctgccttccacagccttacggctccagggccacggagacaggcacccaccccaaagccatggtccgggagctctgccctgaggagctgcccaccccactggctgccccaagtccaggccaaccagaaacggcaggcaccggcctgacggccaggcagacacaggacgtacgcagaacatgcaacatcgagcggttctcacattgtaattctcagaggtgaaaactacagaaattgctggagcagtttgaatctctagaaaacattcacctccccacccactaccccaacccatgcccttgacctccaagacctgagccgagcctggggcacccgcggcctgtgctgcaagggtcaccttgtgacgagggccgtgcacagcctccgggctgagcagggacaaagactcctgtcccatccatggccccagctccccgtgagcggtaagagggcgcccagcagcgcttcctccatctaggcgggtctcgggggcccacgggaaatgccctccacaggtgtcccctgcacccacagcctcttgtcccctgcaccaccacgagcctgaggtgtgaaatgtgtccggggcactgtgggcaccgccagccaggctgggtgggaacgtgaatgccaggcctcggcccatggccctccctctggcagccgagtctccaaagcagctcaaggggtgaggaccacgggcgtcccggcctagccgctcccggccgaggggcaaatggggccgcacatgggcagggcggagcgttccgcctcgtcctccacaggctccgcagcatccctggactcaggggcggggagaggctccctcgggaggtcctggctcctcttcagcctggggtggcaggaacacatggagggcgttatgcccccacctccctggcctcacggtcccatgacctgcccacgggctcatggggtaggccatggcgtggatgcccaaacgtgggccacaggctcggtgtctgctggagaggccatgctcccgatacactggcagggagcctggggacgggtgggggcacgtgagcatgctggcgaggctcggcgtgtttccagccagaagccgaaaggcctgactgtgcaggtgccataggtcagtgacttgggaatgaggctcggctaagcctcattcttcacccggtcatctgatccccagggtgccagtcagtgccctcagccgtctgcacgtgctgccctgcacgtcctgtccataagagctcagacccacctcctccaggaggccctccttgccccgtgcgggcagagggagcatccatcctcccttgggccccaccgtggcagctgctgctatttctggcctgccttgcctgctgccagtcatctgtgccctttctgtcccctggggcctgacattcaggaaaggtctgctgagagactgagggcgtgcctgggtgggggagttgacgtggctctgatggggcctcctaggaagtcaccacccctcatctgggcaaatgatgtgtctctccccagaagattccagccacgggccccgcgtggagcacaaacatgccagagcctggcaggggcctcccgccgctcccctccatagctgctgctcagagtccccaaagagagcagggccacgcaccccaggcccacaggtgcccgctcacgtggccaagaaaaccttaaccttagccccattttcctcctctctgccaccacgcccacccacccccaacacactcacttttctctgttaaaaatcacgaagtcttgctggatggcatcgaggcagtcttgaagatagtcattctcctgtggatggaaaggcacacgtgagcgtgggggacgctgtccaggttccgcccatgtcccctcaagtgagtgtctgggcatccccatcgggcctccacctgtggctttggatgacggcctctgggctattgaagtgccccggccctccagcagccagactgcccgggagctcgcatctctgcgggtgactcacccaagcccgaggatgccaaggcccagctcccttgcctctgggtggatggcttggacttgctccgtggggcctgcaggaccaggcagaagctgttctctgcgggactttgctggaaaccactcccttgccgggcctttcccgtctcataccgggttctcccagcccctcatcacagcacacacacacctgtcccaggcctgcttctggggccctgcccagagaatcctggaaccagggctgtcttagaagcaggtcctcagggcaagcttgtggacggaggctgcccctggcaggacccacccttactggtgtgtgatgggcaggcaggactacttccttcaggcagcaggaccacttcccaggacgcaggggtcgggggagggcgtgggtggggtggagggggtgctggccgctcagcgctggcatggtgtggggaaagcatcattatggtgaccgtgaacttggatggtgacgttggtcactaccaacgcgtgagcaaatgacagacccagatgagccaagtcacagtgaaaagtgcagggagtcgcaggcctcgggtggcattaaaagggcccccacctcctgcagctgaggccagaggatgcccacttgtgaggaccacagaacctcagatccataggaagtcacccacgtcacagccaaggccctgggagggagggagctgggctctgaaggtcggaggggacgtgtgagtgggtacacaccagaacgctcaaccctatctagacatacaaaacgtacagcaaaacccagtgttaccatcttacgggaccacccccccatgcgattggccagtgacggaagcatcgttatgcaatgcgtgacaacagtctgcgttcacccgagacggacaacagcatgctttcacggccccagccagggctaaggggactcttccctgtcacagtgtcgtctgtgcctcgaacacctggacactcttgcctgctatccatggatcctatttttggtctcgctctgtcacccagactagagtgcagtggcgtgatcttggctcactgccaactccgcctcccaggttcaagtgattctgctgcctcagcctcccaagtagctgggattacaggtgcccaccaccatacccagctaatttttgtagagacggggtttcaccatgttggccacgccagtcttgaactcctgacctcaggtgctccgcctgcttcggcctcccaaagtgctgagattacaggcgtgagccaccatgcctggccctgtggatcctattaatgctgattgccaagtggcaagtactctggacaccctgtaaacccacgaacagagtgtgggagatgcagaaggctgttctccgatgaacggttcagggatttgctgacgtgcgtcacactcggacgtgcccgccaagataaaggacaagcggtctcaccttgcgcctcttcccacgaggaaggaagcatagggctcaacacatttcttgggtttggggagcagctcacgttccccaccccgaggcagtgccctccgtgtctctcctggatctgtggtggtgtgagggtttcaccctggcagcgggaatgtggactctctcttcctagccctgagtggggactgtcccgcccgctcctcctggtggtgtcaccctggtcctgggcattccccacacgtacacggtgtgagcggccagcaccttgccaaggactcgagaagaagccggcagactcccacgctctctgcgggcagccctctcctctccatgtggctctctccctccaggctttgccctgtcactgtggcctcccctaaaggagtcacgatcctggcaggggacctgtccttagtcatcaagaagaggacaggctgggtgatctgctgtgtctcagcactctctggtctaaccctgatatagacagacaagtctgcaaactcgggccggcctgagaaggtgacggtgacctaaggctcagactactcaggaatgagggtccgactgagccgctgggatcctgcgattcacagcgacacaaggtgggaggggctggggtgggcgccagtgatgcagaacatgagcgcccgtcgtggccctgtgtgcagcccagtggcaggggctgttggtcatcctgcaacgtccacagccatgttttcctaggcagagaggccaccagaagcctgaggagctgctccagaaccatctggaaggggtggctctgagcagcgcccaagccgggctgtgtcacctagatgtgtgaccacgacccctttccacagggactcccttcccaaggtgtgtgtagcgccgccagcagtaccccatggcagggtctgtgcctggcctggatctgccctgctcttcctctgacagcccctgcctcctccttgggtggctggaaccctttgccagcacacacacagtcagaaggccacagaggggcccttcgcccatgactgactggtgtgggtgtttgagagcccagctccctcagggcagggacctcttgaaccgcaagtgacgctccaggtcccctgaagtccgaagccactccccacaggatttccagatttctgcttgaaagccaagctctgctggcatctcccatcccgagaagggcgggggtctctcctggatgcactttctgagtaactggaccaggaatccccatctcagggcacctgtggcaccttcacacatgctgagacacagcctcggaccccagatgtcacccacagcgaggaggggcctgggaaatggagcaggcttcagtccctagcaccgccacaaacctgcttggcagctcagatgcaactgtcagacccctcagcattcagtggaaatgccagggacccagaacagtcaaataatgtccaaaaagaacaaaactgggggattcacagatcctgatttgaaagcttgctacaaagctacagttatcaagatggtgcagtcccggcgcagggcagacgtctggaccaatgggataaaacggcaagtcaaaaaacaaggtatgatgtcaaaagcaattcaatggggaaagaatcctctcttcagcaaatggtgctaggacagtcagatatccaccgatgagagaatgaagctggaccctcacctgacattgttcataaaaattaacccaaaatgaatcacacagctaaacgcaagagctgaaactatacaagacttagaagaaagtgtgggagtaaatccctgtggcctcagctgaggtgatggatccttagacaaagcagagcagccaaggaggaaacagccacatcggacaacgtcaaggtccaagacttccctgctgcaaatgatgccctcaagaaagagaaaagatagcccatggaacaggaggaaatacctgccaatctcctgtctgaccacacacctgcgttcaggaaataaaagacatgactccgacgaagaaacacagagacgagcaaggacttctggcttctgctctgcggtaaacaacgtggaaggcctcactcccatccctgcgacaggaaaaatgctgaactaatgaaaatcaatgacttttcctggacctatcagagagctgaggtcaaagcgctgcggcgacccccaagtctggagagacaggtgagcaaagtcacagctgagacctgctggcctggagcagaactgatggtgtgtgggaacacctcctgggcagctctggggagcggccggggccgtgtgcagaactcctgcggctgcggtcttatgaggcccccaacgttttgtgggtttcccctccaggaaccctgccaggtcttaatgaagccaaggatgatcccttcctggctctggcatgggatggggacagtcaccactgtgaaatacacccagagcattctccacagcaaatggaatttgctctccaaaggaaaggcttatctcacttgggggaggactgtttttcagcctgtaccccgctttagcctgtctcacctaaggggaggggaaaagcagatcaacaactgtgaaggggcacaggcccccaagactgagatttggtcacagactgtggaacagttccctccccaccatcttcccaacacacccacagggcctccgcagtgtgacagggattccagcagagagggccacaagacgcagactctctctgaggaggaggatttaggcaagcccaagggcaacccgggaaatgaaaacaaatgtgaagcctctggtgcccacagctacagcagactttaaaccctgccccaaacctggccagattacataaacctcacactaaaggcccatctacttcagctcttattaccagatacatcacgtccagctttcaacaaacattacaaggcagactacaaggtcttaaggaaaaaaatagagtgtgaagagacaatgcacacattagaacagatccagatatggcacccatgttggaattatcaaacaggaaatttgaaataactgtgattaatatggcaagggctccaggggaaaagcaggcaagaacagatggggaacagaagggcaatgtaagtagagagatggaaactccaaggagggatcaaaaggaaatgctggaagtagaaaacactgtaacagaaatgaggatgcctttgatggttcctcagtagactggatccagatgaggaaggatctatgagcttgaagaaatgtcaacagaaacttctcgaactgaaatgcaaagagaaaaaaaaaagagtgaaaaaaatgaacagaatatccaagagctgtgggacaatttcaaacggcaccacacacgcataattggatttccagcaggagaagagaaagagaacagaatatttgaaataataatgactgggaattttctgaaattaatgacagacaccaaaccacaggatctaagaagctcagagaacaccaagcagaatgaatattaaaaaaaaatctgtacctaggcatatcattattcaaattgcagaaaaccaaagacagagaaaatcttgaaatgagctgggggtggggggtggcgaggaattctacttacagaaaaagaattagagcagactgcctgttagaaatcacataagcaagaagagagcggagtgaaatatttaaagtgttgaaagtaaaaaacctaccaatctagaattctatatccagtgaaattattatttaaaggtgaaagtaaagacttttttggacaaacaaaaagggaaggaattcatctctgttggacctgtcctataagacatgttaaacgaagttcctcaggggaaaggaaaatgatttaggtcagcaacttgggtctgcataaagaaaggaagcactttagaggaggaatgaatagaggtaaaatgaaatttttaatttttcttaattgatccaaaagataactgtttaaaataacagtagtaacaatgtaatgagcaattatagcatacagataaatgaaatgaatgacagcaatgtcatcaggaacaggaggattgcacgagaggtgccgtcacaaggcatcccactgcacatgagggggcagagtgtcaggtgaaggtagactgtatggtaaaggtatactgcaatgtccaggccaaccactaaaaatatttcaaaaagaagtataattaacaggccaggagaggagataaactagaataatataaaatgcttaattaaaaccagaaaaggcagaaaaatagggaaaaaggaagaacaataaatagactacagttacaaataaggtagatatcatattgaactatataaatgaccacttatttatttacaagacagcgtgtctctctgttacccagactggagtgcaggggcatgatcatagcttactgcagccttgaactcctgggctcaagcaatcctactgcctcagcctcctgcgtagctggtatcacaggtgtatcccaccacacccagataatttttttttgtagagacagggtctcgccatgttgcccagcctggtctcaaactcctggactcaagcaatcctctcacgtcactggaactacaggcatgcactgttatgcctgcctaatttttttgtcttttatagagctggtgataaggtttggctgtctccccaccccaatctcagcttgaattgtgactcccacaattcccgtgtgtcatgggaggaacccagtgggaggtgattgaattatgggggcgggtctttcctgtgctgttgtcatgatagtgaatgagtctcatgagatctgatggttttaaaaacaaaagtttccctgcacaagctctctctgccatccatgtaagatgtgacttgctcctccttgccttccgccatgattgtgaggcctccccagccatgtggaactgtaagtccattaaacctttttcctgtataaatttcccagtctcggatatgtctttattagcagcgtgagaacagactaatacagtaaattggtaccagtaaagtagggcgctgctgaaatgatacctgaaaatgtggaagcaactttttagaactgggtaataggcagaggctggaaccatctggagggctcagaagaagacaggaaaatgtgggaaagtttggaacttcctagagacttgttgaatggctttgaccaaaatgctgataatgatatggacaatgaagtccaggctgagctggtctcagatggagatgaggaacttgttgggaactacagcaaaggtggctcttgttatgctttaagcaaagagactggcagcattttgcccctgccctagagatttgtggaactctgaatttgagagatgatttagggtatgtggcagaagaaatttctaagcagcaaagcattcaagaggtgacttgggtgctgttaaaggcattccattttaaaaaggaaacagcataaaagttcaaaaaatttgcaacctgacaatgcaatagaaaagaaactcctggctgggcacggtggctcacgcctgtaatcctagcactttgggaggttaaggcaggcagatcacctgaggtcaggagttcaagaccagcctggccaacatggtgaaacccttctctactaaaaatacaaaaattagctgggtgtggtggtgcgtgcctgtaatcccagctacttgggaggctgagacaggagaatcacttgaacttaggaagcggaggttgcagtggcaatgagccgccattgcaccactgcactccagcctgggtgacagagcaagactgtctcaaaaaaaaaaaaaaagagagaaaaaaaagaaaaccccattttctgaggagaaatttgcataagcaacaaggaactgaatattaatcaccaagacaatggggaaaatgtctccagggcatgccacagacctttgcggcagcccctaccatcacagactcagaggcctaggaggaaaaaatggtttcatgggcgaggtccagggtccctctgctgtgtgcagtctagggacttgctgcactgcatcccagctgctccagccatgactgaaaggggccaaggtacagctcaggctgtggcttcagagggtacaagccccaagctgtggcagcttccatgtggtgttgagcccgcaggtgcacagaagtcaagaattgaggtttgggagcctctgcctgcatttcagaggatgtatggaaacacctggatgtccaggcagaagtttgttgcaggggtggggccctcatggagaacctctgctagggcaatgcagaagggaaatgtggggttggtgcccctatacaaagtccccactggggcacactgcctagtggagctctgagaagagggccaccatcctctacaccccagaatggtatatccaccaacagcttgcaccatgcacctggaaaagccacagacactcaatgccagcccacgaaagcagccgggaggaaggctgtactctgcagagccacaagggcagagctgcctaagaccatgggaacccaactcttgcatcagcatgacctggatgtgagagatagagtcaaagatgttcattttgaagctttaagatttgacaggcctgctggatttcagacttgcatggggcctgtagcccctttgttttggccaatttctcccatttggaatggctgaatttacccagtgcctgtacccctattgtatctaggaagtcacttgcttttgattttacagactcataggcagaagggacttaccttgtctcagatgagacattggactgtggacttttgagttaatgccaaaataagactatgggggactgttgggaaggcatgattggttctgaaatgtgaggacatgagattttggaggggctggggcagaatgatatggtttggctctgtccccatcccaatctcagcttgaattgtgactcccacaattcccacatgttgtgggaggaacctggtgggaggtgattgaattatgggggcgggtctttcctgtgctgttgtcatgatagtgaatgagtctcatgagatccgatggttttaaaaacaaaagtttccctgaacaagctctctctttgcctgccgccatccatgtaagatgtgactttctcctccttgccttccacgactgtgaggcctccccagccatgtggaactgtaaatccattaaacctttttcctgtataaattacccagactcaggtatgcctttattagcagtgtgaaaatagactaatacagatgggtctcaccttgttgcccaggctggtctcaaactcctggactcaagcagtcctcttgcctcagcctccctggtcgctttaaatgtgaatggtctaaaatacaccaattaggtcaggcacagtggctcacatctgtaatcccagcattttgggaggctgaggtgggaggactccaagagtttgagaccaacctggacaacatagtgagaccctgtctctacaacaaaatttttttcaaatgagccaggtgtggtggtgcacacccacagttccagccattctggcagctggggcagggaggatcacttgagcccaggaagtcaaggctgaagtgagccttcattgcaccactgcactccagttttggtaataaagcaagaccctgtctctaaaaaaaaataaagtaaaataaatatgccaattaaaatatattgtcagagtagactaaaaaaaagacaataaaaattttaaaacatttggatagacatttctctagacacaatgcctgataaaacacctcaaaagatgttcaatatcatcagagaaatgcaaaccataaccacacaatcactgcacactaagataactatgattttttaaaaaataaaccagacaataacaggacttggtaaatatatggagaaattagaaccctcacacactgctggtaggggcataaaatggcacacctgctgtagaaaagggtaggtgtttcctccaaacatgaagcacagagtcacatatgacccagcgggttcatgcctaggtatgtgccccccaaaaataaaagtacatatccacacaaagacttgtatgtgaatgttcacagcagcattattcatgataatgaaaaatgttaacaagtggaaagaacaaatactcatcaactgatgactggataaaggaaaggtgatacatatgtggaatattactcagccatcaacaggaatgaagcactgacaggctacaacgtggacgggcctcaaaagcatcctgcgaagtgaaagaagccagctgcaaagaccacatagtgtgtaactccacttccatgaaacgcccacaacaggcaaccctacagagacggaaagtagcttcgtggctgccaggggaggggagaagaggggaatggggcatgactgctaataggtggggtctttctcttacattacatgaaaaggttctaaaatcagattgtggtggagaatgcacagccctgtgactatattaaaaaccatggaattatatgctttacatggatgcactgtatattgcatggaatgtgaattatatcaaaataaagctgtttccaaaaacctctctcagcctcaaggttaacagtgggactttttttttggagtgatgctttcctttcagaacacctcctaccctcaagccaaaacatctccacacaaccaacccaagacaaagccgagctcctcccgctcacaggtgcctggccttacctgttcccagccagagcctcctgggaactcagcatggccagctgggctctgcacactgtccatccctgagtctcccatgagggttcctaactcatcctgggcctgtttctacaccccagagccctggctctggacatgctctggtagggaaaacttaaacatccaatgggggcaatgccaaagaacccccaaccccgagaaccttccaaccatcctgtggctctcagcagtgcctcacagtggccacctggcagacagcagctctccaccagcaattctgcctgaggacacccagggctgccggcagccgtcctggaggaggggcgaggatgggagcctgacccactggggggccgtgttccccccaaaatcagggcacccagggcatgaccccacccctgccccccacatcatggtgaggaggggactgacacccgtcttctgcccaggagcaacacagggcccaccaggtctgaggaggctgcacgggggctgaggcacaagagtttcccaggacatccaccacaggctcaggcagactcaggggcaaggggaccaccgagggacccagggtcatcaccgtcaccctgacatcaacacacaaccatagctactccttggtgaatatcagccacatcctggtggtatgggccaaactgtgtccccaaaaatgacacactcaaattctaatcctgggtacctgtgaatgtgacctcatttggaagtgaggtctttgcagatatcatcaagataagatggggccatactggatcagggtgggccctaaatccaatgcctggtgtccttatgagaagaggggaggagatggagacgcacacacaggccgaccccacgcggcagcgaagcaggggctggggggatgcgtctaggccaaggcagcctctaccggagggtagaggggcaaggactggttttcctccccggagagccttcagagggggcacggctttgctgacatcttaactttggactcaggcctccaagccatgagacaacacatttctttttaaatctgctgattaaaagggagcctgttgatgctctattgtgaatatcacattcacatggaacacgaaccacgtccacattgggaacaccacgtcctcacatagcagaggatcaaagactcaaaagaggactaaagtcacccttctacaacagcattaaccccatccatgctggaagaacctacgtggccccatcagcccccaaaagtcccatctctaccaccatcacaataggaagcaaattccaacacgagttttaagggaaacatttcaaccacagcacctgtcaaatccctgatgagaccacgacctcagacaatattagctcacactctggggagacccagaagcaggaaacagagctgcacctgacaaggccacgacctcaatgttagctcacattctggtgagaccccgaagcagggaacagagctgcaccatgcctggacttccgatttacagaaactgagatcatcacataactgcccaaggggttcaccttacccgctgcctagacagccaattatcaagacaggggagctgcaggagacagagtagttcacgcacagccggctgtgaaggagaccatttcattacgactcagatccatctcagagagacgcattgctgttcttcaaccacctgattcgtggtcacctgtcctggcagccccagaataccagcatgcctgagtgagcatgagggcttcacgtggccgtccccgcacacacaaccaaagccggcacacctgggcgagtgtgagggcttcacgtggctgtcccggcacacacacctgatgctgacgcacctgggctagtctgagggcttcacgtggccatccccacacacacaactgatgctgacgcacctgggcgagtgtgagggcttcacatggccgtccccacacacacaactgatgctgacgcacctgggcgagtgtgagggcttcacatggccgtccctgcacacacaaccaaagccagcacacctgggctagtctgagggcttcacgtggccatccctgcacacactcacaactgacatcaacgcacctgggtgagtgtgagggcttcacgtggccatccctgcacacacaactaatatcaacgcacctgggcaagtgtgagggcttcacgtggccatccccgcacacacaactgacaccgatacacctgggtgagtgtgagggcttcagatggccgtccccccacacacaactgatgtcgacacacctgggtgagtgtgagggcttcacatggccgtccccacacacacaactgatgctgacgcacctgggcgagtgtgagggcttcacatggccgtccctgcacacacaaccaaagccagcacacctgggcgagtctgagggcttcatgtggccatccctgcacacactcacaactgacatcaacgcacctgggtgagtgtgagggcttcacgtggccatccctgcacacacaactaatatcaacgcacctgggcaagtgtgagggcttcacgtggccatccccacacacacaactgacaccgacacacctgggctagtctgagggcttcacatggctgtccctgcacacacaactgacatcaacgcacctgggtgagtgtgagggcttcacatggccatccctgcacacacaacatcaacgcacctgggcgagtgtgagggcttcacatggccgtccccacacacacacctgatgctgacgcacctgggcgagtgtgagggcttcatgtggccatccctgcacacacaaccaaagccagcacacctgggcgagtgtgagggcttcacatggccgtccccacacacacaactgatgccgacgcacctgggtgagtgtgagggcttcacatggctgtcccggcacacatacctgatgctgacgcacctgggcgagtgtgagggcttcacatagccgtccccgcacacacaaccaacaccagcacacctgggcaagcacgaaggcttcacatggccatccccgtgcactcataaccccagccctggttgtccctgcccacctgcttcataaggagcgaggtgggggctgggaaaggcagaagggaggtctctggccttctcaggacttcaggaaacggtctgctggacttccgagacgtgtgcgctgccaggggtccccacacgccttgctcggtggtagagaggagccccaagcccagcccgccgccgcgccctgagcctgccctggcactcacggactgggagctgtccctgctgttgtcccgggacttgttcttggccagacgcttcttcttcttgtgcaggggcctggactccaggatcatctcctccagctcaaaggtggggtcgcagtgcagacggcctttctacagagggatgggtgctgagccccggcccgtggaggacgccacatccatccccagggccccccacctgagccgcccacaggcttacgttgggcacgaagcccggctccaccctcttctcgctcaggtggtcccacagcacgccggccagcgccggggctgcctgcacgtcctggaggctggagagccggtgctcggggttcacagtgaggagctgcaaccaggcatgagtcagagggtccagggcccacagcccaccagcacggaatagcccgccacccccaggccagggcaccttgaggagggtcccaccaagcctgaggttcagaattcaggaacctcagggccacgcgaggaagggtggtgccgacggccgacatcaggcaaagcaccgtggctggctcagcatgtggcccaagggacgcctgttctcagtgctgctacctaaacccctggcgccagaggacagcagagggatctgcagggaaggctctgctgggatttgccaggaggtggcagccgaggcccggctagcggctaacactcggcacatggctggcctcacagtaactatcccagagccacttccttcaccgaatcatgggacctccacaggccagatgagcccggggcagccatgcatggcctgggaagcaacatcccagcgctggcacctcccgcctttccagggaaaatgccgcagacccagaccccgtgcgaggtttcccagacctgggcttgggcgtgtgggtcatccccagtccccacgcaggccctctctagcccagtgccaccttgtgagccacctgggcaggtgtgactgagcttcgtggggctacagcagagttaagagactctcggggctggggagaggccccggcaggcaaggcctccccaaggatttaggctgcttggctacaattccagggcaggaggccccacctgcctgagacacgggggccgggaggcagccgggcccgtgtggcacactcactcccctccctgtcctgcctgggcctggctctgactccgaaccccctatggtgttaatgcgaggctcggaacagggagctgtgcagcccagtcaaggcacagccccagcctagcaccagatcacaaatgggaggcactactgatggccacacccctgcccgtgtccctgccaggctgatgtcccctgagaggtgtttgcagtgggcagtggctgcccaccttccccaggaggcactggggcaaagggtcccggagatagcatgggcttgaacccacccacccgacaccctccttccaatacgtgggacaaggggacgtggctcagggctcctctgtggtgaccggcagggcgggcgcacaagcctgctgtgagggtgcctggagacgcagctcaggggatcaccaggacaccagtgacctggtagggctcgccatgagagggccacagagcctgccaccagctcgcttcctggggcttggggctgccatctgcggaggcccccacaggttgcagtgaagggatctgtgcctgccaggaagcggcactaactgtgcactggagggggtgtcccgagccgcaggtaagtgagggagggaggtgggtgctcggagggtgaggaggctcagggatgggggctcaccttccgcagcaaggccaccatctccttggaccacgtggggacatactggacgctcacggtgctgaacagctgcaccagggactccacggcgttgctggagtggatgtcatagggcctctggagacagggaggcagtgctgggcaggtcctcctggcccccaggacacccagaacaatgccagacacaggtgccatcgccctgagaggaccccctccccccaccccaagtgcaggcacagctctgagcacagcctggcctccacctgccgcggaggagcctgggtgagataaagcttacgcctgggtcctgcgccctggctgctgcgcccatctggctgggatcccagggggcctgggtccaggtagatcagccccagagggccaggagggagctggcttcctcagaggtggggtcctgtgcagggctgaggggtacggtccacaagaggacccccagcctcccggtctccaggactggcctcgccgtggccacaagggtaagagcacagggccccaaaagaaactttttgtggaaagttccgaggcagcacccctgctggccagttctcagccttgtccacccccacagaggctggcctgcaggcaccagcagcggccccgggaaaccacagtgagtctgtccttcctcctcctgctcaggcattccatcaccaactacacacttcgataaaagcgtgactcctcagacacagtggagacatccctgcgcacctggacactggggcagccaccccctccccagcactggtgggggcagagagcaggggcctggcagccaagcccaggggctgcagggggtccatacccatcctcgcagcagctcataggccatcacccccaccgaccaccagtccacctcgaaggagtagccggtcccgccgttgacaaaagagtggaagatctccggagctttccgacagaaagaaggaaaaacagctgccacggggtcacagcccggacccgtgggcacagggccggcaccttgaggccacatcccgagaccaggctgcctccagggtgggacagagaagccaccgaggtcttgtccttcccacctggaggaagccagctcccatctggaaccccagctcgggctcacccatgtacggcttggtgcctgctaatgccgtcgcccgctccccgtccttgatgatggtggcaatgttgaagtcggtcaggtgtgcatgtcctgtgcagagaggggtcaggtgtggctgtcccaggaccagagatgcatccttgcgtgcaggatcctcctcccctgacaggcccatccctgccaccacccacctgggctgcccacacccaaccccacacacctctctcatccaggagaatgttgtcaggcttgacatctctagaaagagcagaaagtgggaaggtgagttgggaatctgccctgtttctgccctggaatctctgtcacaatccctggagtccccaggacatcccaccaacccactcgaggcagaggcctgggagcttgacttggtccttggatgatgctaggacctcacacccctgcgtgggggcagaggcgatgaagtcagccacttcgttccctgtggcatctgggcagcagcacacacctggcaccagatgctgggagggggcctggagccccagaggacgagagcaattgctggcagggtctgccctccccctccaagactcggcctctaggagaccaagccacctcggctcttgctttgtcccaacttttccaggtacacagccagtgctcagtgactggtgcctaggtcataatcagacatccgagtccccaagagcagaaatgcaaacaccagtccattcgactttaaaatatacctcacagatattttcattttgttccattgctgcggaatttcagcctaatttctgcttcccaatttcacttccttcataatctgcttcctattttctttttttaaattttattttcagagccatcacaccagctctgcttcctaatttcatctgctttaagctaatgttaaaattagtttggattccctgggatgtggtggatgggcaaacaggagccttcagttaaatggaccaggtgaaggccacctgctgtgacccagcctggtggtctgtccaccagggctaacagcccactgtgcccagtctcagctggggctgctgggacgaggtccccccagatggacaccaggcacacagctatggggctgacctggtcggcacaggtgccacagctgggggcaggcactcaggcaagggtggggcagaggagctagacccgctctgagggagtacggccgccgtgccggcagcctgacctaaggctgcttcagccccgcccacctcagcaggtacctgcgccgtctgccacgcacacacctgtggatgatgtgctggccgcgcaggtagtccagagccagtgccatctcgcagatgtacagcctcaccgtgtcctcggagaactgcacgttctgctgcaggtggtagcgcaggtccccgcccagtagcaggtccacgaccatgaacatgtcctcctcgtcctggaaggagtacctgtgggcaccgatggaaggcctgttgtgcgcacagctggggagccagtcatggctgctcccacagctgacacactccccctaaggaccacagccccaccccagcatcagccaccaggcattcccaggaggaggggcctgcccaaggcactgattgcaccccagcccagagcagctctgagcccagatcctgaggaaagacacaccaccctgtgctggaggtggcccagctggggccagaggcacctgggagtggcaaatgcagagcagagctacagtgccagctccgggtgcttcaggctgcccggcctcctcttcggtaaaatggggatacagacatttgcctcggagggttgttacagaaaatgaggccgtgtaggtaccactcttgacagtgttgggcaaagagctggcatttaacaaccagcatccatggtgttgacgatggcagtgatggtggtggtggtgacggtgatggtgaggatgacggtagtgaggactgagggtggtggtgatggtgataacagtgattgtggtcgtggtggtggtggtaatggtggtgacaatagtgattgtgttgattatagtgatgacggtgatgagagtgatgatggttgcagtggtgatggtggtggtgatggcgatgatggtggtgatggtgatggtgatgacagtggtgagtttttcagtccctaaactctctccctctctgactagtgccagagactccatgggagcacatctccattgtagggaagccctggtcttccggcaggctcagaagagacactgcattaaccaaccccagcatgtcatggccacctgggccactgccaggcctggggcacaggaagggggatagatgaggagggctagagagggcctgtgggtggcagaggcatctccgaggcacgagggccaaggagcaccaagggcaggagaggatagccagtgccttcccggcttcaggacggtaagtctttctgcagcgaggccatggcaggctcaccagaggttcaccaggaagacgtgctcgatctcctgcaggatctccagctcccggaagacgttgcggacctcgtcgcgctcgatgcactgctgcttgttcatgtacttcatggcgtacatcttctccgtgtcccgcttctgcacaatgcacacctggagggcacagggctgttcggcaggacgcctgaggacgcctggggacacgtggggacacctggaaatgcatggggatgcctggggacgcatcgtcaggacacaaggggacacctggggacgcgccgcagcccctctgcctcctagacgcggcaggtgcattcctctctgccacatatggtaacatatttgctctggggattaagatgtgggtgttttggaggccgtgattctgccccccagaggttcctgtactggttagtgtgtggccctggcggcacctgtctcagtgacatcctggctccatggctgttagtgaagacccctccctgagactcagtcctgcgtttcaagtctgcagcaggacacatctgtcaacaggcgctatctgcaaacagacagggtccagcctaacagcatccaggcgtgagttggagccaagcagtggctggttgtgcggggagcgcccctcaccagccacgacctgggcatggagttttgccttcctaaaccccaacatccttttccagggcttggagcagcaagcagcccggaggggtactggggaatgaatgcgaaaacccactgagcacagagccctgcgctcaggaagcctcatcaaccatggctgcagcttcaccctggacgcacatcactccacactccagagaccgactcccgtctcaacaccgtgaggccaaggcccctcaccctgtcctgcaaggagacacacagagtgagcgtggggcttgggggccaccgctgccaccacagtgggaccccctccggggcgccagtccccacatagctcttcaggcctgtaccctctgagcatggatcatcggtgtcaacactgatgccgcaaacacacggctaattgcttagcagtgaggatgagagtgaggtgacgggtgagaagcatcaatgagcaggggggtcccttgtggccaaggatgtcaatcagaattgaggatgaagatccccaaagggaagccaggaattaaggcacaaaattgtgagcagcagagctaacccctgtctgacactcaggttgggagagaccttcccaggacaggtaatccagacccgtttccaaggccttccacaacctctgctctctggtcctcaaggagttggagcccagcagggggcctggaggaaatggatgattctggatctcaaggtgggccacagatggccctgggctcctggctgcatgcccggaaagcgtggtggcacacacccgtagtcccagctactcaggagactgagaagggaggattgcttgagcctgagaggttgaggctgcagtgagccacgactgtaccactgaactcagcctgggtgacagggcgagaccctgtctctaaaaaaattaagtcagatgattaacaaccttaattcaatctgcaatcttcattcctctctgccacgaatggtaacatgtttgttctgggatttggatgtgggtgttttggaggccatgattctgcccccagaggttcctgtactggttagtgtgtggccctggaggcacctgtctcagtcacatcctggctccggggcccttactggagacccctccctgagactcagtccttttgtgaagcaaagcggtgaccctccctcccgcaaggggccactgggagtcacactgtgcacagagcaccgggctggcccaaactaagaaagcatgtctgatggtgccaagcggtggcctgggtggatccggctgcagcactgtggtgcgggagacagtggcttggcctggcaccatgggctctaagtatggcctctccaggaagctgacaacaggcgtggcctcagcacctccctgcccggtgggaggggaaagctgagcctgaagggacaggaagagccttgtgttgggggctgcccagaggcgcgtgtgctgatgggggctcctgaacacgcggccacacctgctgaggagcgggggcagctgcaggcagcccgagaacagacggagactaagcttgaacgaggccgccttgggagggcggggcggggcgggatttctcctgaacttcctgcatttcctatgaccattttttaaattgttattttgaaagccagttgagggtttcagaatgacagtgagcgtaagctgcagcagcccctggctgcccctggcaggaccccctcctgccgcttcccactgccaacggggcagagtcgcgtggctcggcagcacggccttcctcccatgcacacggccgcaggaggccgaggagtcccgtgcccgggatggaagccccagcctcactctgcacaggcgcagaagcaacggtgctttcctgcgccagccccagcacccgcggcctcctgcagacggtcactgcaggctcaaggcggccactgcaggtctggaaactgctccagaaaggctgtttgttgccctggggctgggaccagacaggctgtgagacaaatatggtggaaaatccggccctcaccctctgcccctcaggagcctggcttggggccactggctggggccagggctcttgctgctgggggggaagctggcgggggggggggggctgcagagcccacctctgcctggagcggcgccagcacccgcagcccaaggccgtcttcagccggtcccaagcctcaggctttctgtcgcttgtgcaccaccccagaaagctgcctgcccaggcgacccaaccctctccaggctccctctgcccctcctgctcacgatgcagctcagctcttacgggggaatctctggaagaacacgccttcccttggggtgctcaacccccacagcccactcaccaggggacagggcacctgggcttcccgtgccctctgggccctgtcacatgtgcggcggacacagaccgggtgtctactccagacaggacctcaccctcctgccagacaggctcacccaggaccacccgctttcccaagcatgtggcctgggctccatctgggaccagccccttggccctgtgacccaagcctgctctccccgtcacacgcatcccatcacccacagccagggagcagggacagaagagccacctcgagacagggcctggcctcgcacacccacggctctgctgtccaccagaacaaagcagcagatccacttgcctccagcctgttaccccacctgggaaacaaactgcctggatggtggagccatcagccacagtccaagcccctggcctggccctgtgggaggagctgccctgaggagcaaggggaggcagggttacactcaggtctcccgagtctttgggctctgtgtcctggaacattctcagctcaactgcagttcaagaaaagcttgcaagtcttcctatatgccagccccatgcaaggtactggcagtgcagggtgagtggccatggtgcctccctggagaccctggtggaaacgcctcgatccctcacagcaggcccgagtgcgtccccaaaagacacagccaccaggagcctcggaatgtggccttattcggaataaaggtctctgaagatgtaattaagttgaggatctggaggtcctgaattgggatgggccctaaagccaatgatagacaccctgataaaagacagaaaagagaagatgacgcaggcatgggggcgagggagtgtgaaggtggagcagaggcagtgatgtgaagatgccagcctgggaatggagtgacatggcggcaagctgaggacaccacgagtggccagcagccaccagacgccgggagaaggcacagcgggtcctcccacggagccgcccagagggcccaccctgccaggtctcaggcttcccatctccaggactacaagagaaacttctgttgtttgcagacactgagctacggaacttggttgtggcgggaaactcgctttctccacgcctcctgtgtctctgcatccctgataacaccctgcagactctgagcacctgcggccacgcctgcaggcagcagcctcacctgcgctcacgctgcgccctcaccggagcacctgccaacccagcagcccacttcccctaatctccttcaccattttctgacccaggccagcaggtggggagcctgtcctgccccttatcactaggacccgccctctgaggcctggactgtcaggcacgttgaaggtggtttggggtggtgtggggttttccgttgaaatggatttgattaagtcaatcacatcaaagtgctcttaggtgaagacaacagagaagagggcgggtccggcaggctccctcgggcccctgatgcaggaggctccaacgagcggtggcgtaaagccctgggtttggtgcagtctctgtctggagggacctcagcacccgagatcacgcagagcagtgtttacaaaaaagactggaaaccggcggccttttatgaccaggcctggggggctgagggcaggcaggtccgactcaaacgcttcctccaggaaactggtccctgctttcccagccgcttcctccaatcaccaacttaagcccaaagagaaaatggagtttgaggtctcaccacaaagaggaacaagccaaccccgggctccggagccctgggcttttcctatgaaacgccactgatggggaggccacaacgccacccggagccctgggcttttcctatgaaacgccactgacggggaggccacagcgccacccggagccctgggcttttcctatgaaacgccactgacggggaggccacagcgccacccggaacaggctggtgcctgcagccatgtgactgccaattcaaccaaatgctgtttatgcatttggcagatttaagtgattcacccaagctctttctctttccaagtaatttttgttccccagaagcaaatgcctgaccacaagtacctaaggcctctaaacggtataatgaaaccacctcctaatccttcctgggggagcttctggtgtcccaaggagaagtagagcctggggacgtggggacagcagggcgggacagggcaaggcaggctccctcccagggttcagtgctgggtaccacaaaaacgggagggtcagtgcccaggacggggctggagaaggtgtctgcagcggctgaagaaggtgcagcccagtatggggcctctggggagggcactggaggcagaggggtcccccaggcagaaccgggctcccgtgcactccagaggcagttccatctctcactctcctcctgcccctcctgagacccccctgaagctgttctcttgacgtccctgagaagctgtgtcccataggccacttgtcccaggtccctctccctggatgagctcaggattctaacgcggtgagtgggaatccgttttggggtttcagttttcccccgatgcctagtggctgcttcctaggccatggctggtgaagttaagacgcctcacgaggccacaaacctctcaagaagaggtggaccctggcaagctcaccaaggggcctgggtggcggctgtagtggccatgctgcgatggcaccacctggcactgaggctcttgttccatccactgcagatggcagaggggggtctttgtcccaagaggctgggaaccccccatgccctatggctgtcaggtgttggtggccaggcaggggcactcagcccaccggcttcccaggggacggagctacctcccaggcccacacgcgctcccgcctaaagcccttgtttagtcagaacattgccgtggggctaaggcacacagttgctgcgactgcaggatggccccttcggcaacagctgcctcccctcagctgcttcatgctggctggagccttactgggcttggaagagcagatgggctggggcgccgtctgagtcctcgccactgtggaactactatggacatactgttttctggtgcttgcatgcaagcgatcgttccgatgaggtctgggattcttggctatcttcaaacagagcttggagatgctgctcctgagtggctgagaacctgtggcctcgtggactctcccacttggggataaccaaggctcttaacaccttgcctggctactcccagctctcctcgccctgggatcgaggacctgtgtgcaggatgtgcataatccgtgatccatcttgagggccaccctccatgctgcccgagcttgacagccgcttccaagggagctctgccgctgtttctcccttgtgtcctcctgacacttcccgatgcatccccgagttctgggaggcacctccacgtcccttcctcttctgccacattcccatgccttgccacggtcccctctgaaacagcgggggttcctccagcaggtttgcccacttcgctttttctgccttgccctgctgctaggtgaggtctctatgaattcttggggggactctgggtgctccttcactcagagagctttctctcacctgtttccacacagctctgagcccaaagggtttcaccctccacaccctgcatcctgtgctctgtatggccccttctgagcttccggccccttcatgccagggctctccccctcctgcttggggagtggtgggatgccggggcaggtgtggctgccatccgttcctgtcagtcagggaccacctcttcttgcatctctggctgcctcgagcctgtggctctcatgagctgctgggggggccttgggggttggaggtcaggtaaagacaggaagtctgtgttgttcaaagccttgcacatgggctaatttgttacagcagccattggacacttgtgcagtatgcccaccggggcaggtgggaagcttgtgtggcacgcccaccagggcaagtgatgtggctgtgaagggacctagggcagggatacacattgtacagggggcaccagacacacggttggggaagaaagcaaggtgaagctgtgactggtgtgagcggtgtgagcagtgtgaactgtgagtggtatgaactgtctgagtggtgtgagctgtgtgactggtatgaactgtgtgagtggtgtgagctgtgtgactggtatgaaccgtgtgagtggtgtgagtggtgtgagctgtatgagtggtgtgccacccttgatggcagaagcagattaaacagatatgttaaaagaaatcaggccaggcgctgtggctcacacctgtaatctcaatactttgagaggcggaggcgggcagatcacgaggtcaggagttcaagaccatcctggacaacatggtaaaaccccgtctctactaaaatacaaaaaattagctgggtgtggtggcgtgtgcctgtaatcccagcttctcgggaggctgaggcaggggaatctcttgaacctgggaggcggaggttgcagtgagccgagattgcaccattgcactccagcctggcaacagagcaagactcagccttaaaaaaaaaaaaaaaaaaaaggaaagaaatcaatcaatcaatggaaatatgaactaaaatcttttttacaagggatatttctagaaggaaggagaaggcaggaggaagggacagtgtcggggcctccaggtgacgtgggcagcagaagcagacaggatgctcaggacacagagccatctgggccctcagcaagtaaacagcaaggacagggcccacagagtgaccggcggtcacggacccacctcactgcacagactcatccagatcctgattgagagaaaccatcagaagacattcacagacactgggagaacacaagcctggcgcagtgtgatgggatcgtaaagaccgttgtttcaggtgtggaaaaataccgtggcggtggctacgaagagagtcctcatctttaaagataacacactaaactatcagtggataaaatgacacactctctggaattcatgtcggataccgagggcacagcgggaggtggcgaaggttgtggctgtaacaggattggtgtcgcgtcggtccctgatgaggccggacccgggtgcttgtggggggtcacagtgttcctcctctataccatgtgagttgcatcttctaaaaactagaaaaagagaagagttgaggcaatgcttccgtggccccaaagcccacacatgggcctcagtcaggagcacagaaaggacccctggccccttccccaggtggcagagcctgcgcacggcctggtcagcgaagggacgtggtcaatgctgggacctgggctctgggcccacgcggaggcccgactgccccggaaatggccaacaatgtccccgcggtcctggatgccacaacctgtcatgaggttcgcagaagggggtgacccgatggggtggccaggggctcccggtccagatgaggaagctgaggctgggtggcaggtggcagccccaccgtgcacgggccccacacacactgggcagctgtgtctgccacgtgtgggcccagcgcagtggcgaggaagcttccttctcactcgcgggctcgctgcaggacagccaggaaggcagcccaggagggggtgcctatgacatatttgagactgacctgaggcagcatgacaagtttaactttccacaccagaacggctcagtcaccctcaacatggtttccagtactatcccccacccaccccagtggctccagccggcagccagagatagaaacttagaggcgtgtctcccacctaacagaggcttcctttcccggccattcagacatgtgcctgccagcttacatgtccatcacggtgtgaccctcgacctggtgcctggggttcacccaccaagcagacctcctgtggacccgacaaacgtgttggccccagggtccctgcactccctgcttgtgcccccgacctccaagtgcttgtgggcaccaggcctgccacgcgcccgccaaggtctgtaagtactagaagatcttcagcttccacactgtggttgtatcacggaaaccctgtctgccccagttccacccctaacgacgaggccggccctcagggacccacacgggtggatggatcccttggtctctggccacagcctcccgactgttgagaccggagctgccagctgggtgggcggtttcattttaaatgcccactcctgcccctgggctcccactccctgactgtgctccctggactgtgctccctggactgtgctccctgggctcacaggctgggcccctctgccctccactggcgtttgctcctcccaagccaggtgacctgaccagaggccagtagggccacctctctggcctcagcttccttgcagctctaaggcaaaggcaaggaccatgcacacgcctgtcgagggaagaaaatgagaaaatggatatgaaagttctcctcctcctcctgaatcagtcatgagggaaacagctattttaaggcataaaggtgcagcctgggtgacccagagagacgggcccggcaaattcccaccgccttttggcccatttaggagcacgtggtaaccactccttcctaagcagactctgcgccgaggtccccacgcagggtttctttgctcctgcagtggtggcggaggtgaacccaaagcagagggcgaggcacagaggaacctgagtgtgccggcggggctggccccggtgcagctccatccctctgcccccaagtgcagcttcacccctcttcccccaagtgtgtgccggcggggctggcccggtgtggcttcacccctctgcccctagagcctggaggagaaccagccctggaagaatcagcttccccacagcagggagagcaggatccccctttcccgaccatttaggaacctccagctgccttgtacacagggctcctccgggttctctaatcagtgctgccatccccctcccaacgctggcctggtgggaggtgatctgtttaatcctcagcatctctgcctccctccaaagccactgtggtcagacccagcacagcctggagcccccgagactctccagccctgaccctcccagagaaaaggcagctgctaagctgggcccctcagtgtggcaggcaagtggacgaggcctggggaactgccagcagtgctggcgggggaacttcctcccaccatctggccagggcacggggcagcctccttgggaccgaggcagcttctactgaggactgtggtgcagcagctgctctcggaggcccccacgggaagctacacagcaggtccaagagatccacatgattcaggagatgccccttgctttaaaatgtaggttttattatcacacaggtgggtgagatcaggagatgcctgccattgatgagaccgttcgttatagttaccaacaggaggaggggcatgccacaccgtggggccacacagcaaagaccagggtctcggaggcagacgacgtgaaggggaaacacgggcagagccttagtggaggcttcctcgggaaaagcagggaaaggcggggaaagccaggtgagcaggtttgagactggcctgtgggaatacaggcctgccctggttgtctggggtcaggtcctgaggtgattcatgcaggggatgtgggctcaagcctgggaaagcatagagcagacggctgggggtgagctgggggttgcatttgaaaggcaaccaaaggcaagtgtttctgatctctaggaagtggctggcccaggaggggcagtctctccagggtcagcaaggccctgacattaaagcgttggaaatacacagttcatacatgtgcaatgcatgcacacacacacacataccacatacacacatgcacacacagaggcatgcacacacacgcaacacacagacatgcaggcacacacacgttcatgtacacaggtatgcacacacagaggagcgggcacgctgggtggacacttgggcggagaccaggctgcagtgccggggtgactgtccagccctgtcgggtcctcagtgctcctgaaaccctcgccctgggccaggctggacatgcagggccaagcactccccatcagaggtccaagggaggaagatcacactgcacttaaccatttaaaccccaaagccagacagggtctgcagtggccagtactgcactccacaatcctgagagccacaggctggaaccctcaggatgctggtgggtattttatagatggtgtgagggctcaggacaagagcactgtgtgcactgagcctccccacagcctgtcctggggccctcggtccagccggcagattcctttggtccccacaggagagcaggtcagctcaacccagtaaacattctctggacccggcaccagcaaacggtcctccccaagctgggggagcccatctcacacacacaatcacagaatcacagcaaagtcagcaaaaacccaaacaaagcctgtatcaaaccatcttagtcccaactaatggagtccagaaacgccattgctccaaagtccccaggggcaccgcacactccctgccagatgggggtcgctccatgccacgcacttggccgccgcagagggctcctgctgccctgagcggggtggccaggcagtgggctggtgaggaaaccagagcctgtgctgctggaaagtgggggccatctgggagaaacccaggcccagccgcccgcagtgactgcagcagcccctgccccgggagcccggcagcaggccagcagacgctgctggacatcgtcaacttttagcggccactgatggctccctttcagccaggcttcccggacactagggggctgtcatgtgaggggtcactcacggcacataggcccgggttccccaggtcccaagcccaggatccaggcctggacatctcaggagcagggtctggacagtgaggacagggacgcatcactcgccatgggaacacacgtcacagataagcaacccccagcacacccagcttccaatcgacgtcagcgtccgctggctgtgaacatgaggaagaaacggagctgcctgtcaggctgagttcacccaggctgccttccggtggagctgccatcctggtggcctggagagcacgaggccccccccaaagaagacccccagggaagcccccccagggcagagcctgggctacaggcagtgctgactcaagccgcctgggtggtggcctgaaacccatgaccccaagctggcaactgagtttcatcccagaacccggacacctgcaagctcttctcagccagtgctgctcgccacctgcagcgagtccccccgatggatgaggaaccctcagaaccagctcctcccggcgtggactcagaggccacaggctcagccacggtgtcacagtcacacatggcagggtggtcctacagcagccgctggcgggttgccatagcgaccacaggcactgtcttctcgctgagacggcacagggggcccaggtaaggtggaatccagaggccacgtacacaggccctgcacgggggcatggagctggggagcccggccaggcagaccttcttcacccacaaacatgctcatcctcttcttgcctctctgttgggtccatctgagatgtggggtcactgcaaggacaggcggttcctcggggtgggtgggggctgtggtgaaggccttttgacctgttttcttagttatttccccacagcctgggaaatgcggacgccgtgcgcctgtgcttctctctctctccctcggacagggggatggcctggggtgaggggtgcgcagggcagggcgaggagcccagccagccaggggggttagagaggagagggcagagacccacttagggtcaaggggcggggctgcacccaactgtgcccactgcccaacagccagccgtgccaccgagaaatccatctgggcaaggggctctcgaacccccaaaggggcaccacacccctagagacacgcctctgcctcctgatagctgtgcccatcagacaccgtcaagctggcgtcctggtgctccctgcagcattctggccgagtggaaatccggcctctgcccctacagaagtcaacgggaacacacgatctcccagcacttagcactcacaccccaaacactcctagttaagtgagggcctggctgttattcccaggagcaccagccacagcttggcaaagccaaacccgaccctccacccacacctgctgcccaggctgggtgcaagagccacacgcccagcccacccaactcctccagccagaagcacagccgtggctccaaagaggcatccaaagaggacgccgactgcccctttgacagctgcgggaaggcagggctcagggccaggcagtggctcaacgacaaggtcgacaatttaacactgggaaaagttagaaaataaagtctgttagtcacggcagcaaaaagttccacgtaacaacatgacatagaataaccataggaacgacgtatcatcaacggaacaaaatgtgaagaatcaagatgaaaaagcagacgcctatttgggtaaaagacactagacccctagatgggtaagatctcaactttgctctcaattaatctgaaaacgtaactcctatccaaatcccagcggggttactttcgaccttgacaagacgtattcagaagtccgtgtggaaaaataaacacgaaggaagagccggcatttttggcagagtgtagaagaggctccagaacactgcggactcactggtcagcgaacccttcattcaggggacagagcgggaagcccagagagaggcctgcaccctcgacgggctgtccacaagcagctccagacctcaagcccgccaacttaaaagtgctgaattccagccacgagcagcggctcacagctgtaatcccaggactttgggaggctgaggtgggcagatctcttgaggtcacgagtttgagaccagcctggagaacatagcgaaaccctgtctctactaaaaatacaaaaaaaattagctgagcatggtggcacacgcctgtagtcccagctactcaggaggctgaggaatgagaatcacttgaacctgggaggtggatgtcgcagtgagccgagatcacgccactgcactttagcctgggtgacacagtgagaccctgactgaaaaaatgctgaattccagatggactccattctccccagaacagaacgtttcttgccctgatcgtgaatgaggcagtgctgggtgcagacggccttcaagcatgtatgggggccaggggctggtgtcctctgagaggggccatgagctgggagctgctgggaggagggcggctgaaggcacccaggacacgggacgagtggggggagtgcagcaggaggacggaagggcacgggtggtgaaggggctccgacggcaccagtaaactctgcgttgttgactgtttggagcagaaaccactggaaaacagcacctgaggttgggggggctctctccaaactcccctcatctgcctaaagacagacactccaagaggaactgccagcacagcccccctgcagttccagcggcccaggaagagggaccctcccccgggagaggggccaggatccacccccgcctcaggctcagtcacaaaccatcacagcccccgctgcttctccgagggccctgtagtctccccaaaagctgtgtgccccccatgcggccccccgcgcccccttctcccagcctgcacatcagcccttggggcccaccactgttttgggtgttttctttttcccccacgatgccctgcacacgtaacactaataataaattcgtatgcttttcctcctgcccctgtgcctactgtcagcacgtttcacagacctggctctcagcctcagaaggcagccagaggggcggctcctccatggcacgtttggtttgggaaacctgggcccaaagaacaggaaaacgctgtacccccacccaggggaaccacagaccggaaaggtcaatggcttttaagagatgcgtgtccagagatggggcccaccttacaggccagaggggccggggctcggcatgggcttggggttcatgcccagcccaacctgcactggtctgcaccccccagccaagcctggtcccagagagaccctggggcagcgacctcccctcatccctggggcagctgcatccaagccacccacccaccagctcacaggaggatgcaggaatggggctgcccccatctgtggctcctgggatcatggccctcagcctgagatatccacagcccaaggctggaatgcgatgtcctggattctgaacaagcacaattaggcagcgctggggaggtggcgagcctctcagacaccgcagcctctggaaccccggctggacgctgaggaggcagcaggcttctaatcacactgagcagcctgggggcgaggcgggggtggagagtgggctggacggaagtctatgccgggtaagggggcaggcaggggcggagggcaggctggacgaatgtccatggcagggagaaacagattttctccaagtctagattcctccctgctaagtggttagtcctggaattaactaccgccaccactttcagccggacagaaccgggggcaccatgtacttcatgcctcaaagctgtcttcaaaacagtgaaaatggtaaatttgttatgtgtaattcactgtaattttttaaaaactgaaaacaaaaacaaaagccaagggccaggtctagataatccatttccgagagcggcggccccgagggtggagccatggccctggtggtagagcagctgcaccagggccatttggcaggacccgactctacccggtcagactctaaatgctgcgccgccctgaacgggtgggctccggtgctctgccaggggatcccacccctcaacccggagccattttcacaggtggctcaaacactggcagggcttgggcacagctgagcctgggcccaccaccacctgcagggaaacaggggtggctggggcccctgctgctgcagcccctctgaactgaggccacatgtgagcagacacagctacagcccaaccacacgcagaaccacccttctcagccctcatccttcctgccatggggtcattgccttggccagtgaaagagctggaaggacccctccaggtcagtgacaggcctcacctcaccctcccctcagtgccaggcacccatcaacaagcgccgcacagaacccctgcaggcctgatgaggaggcctaactgtgagccggaaggaaccctccaggtgcacgactaccccgcatctgaacacggcacccagcagctcgctcctgttccccgcattccacagccgcccatttctgggccagctggcgtttccgagcctcttaaggactggtccaaggagtagaaccctggcagtctacagatggtgggcagggctgaggctgcccacctgtgctcatgagaaggaggggaccatccccaggcaggagtgcagggccagcagaggcgggggcaacaggggcaatggggagatgctgggggccccaggaaacagcacctgcacccgccagcctcgctccccagggcaggtctctgcccctcagatgccctcggcctggccctctccagacatgctggccgggcccaggcttcccaacctccctccttgaacctgatttctggatgcctggtgactcccagggtccccctaagccacctctcctgaacctggtcacagctgccgtcctccgctgccagaggggagcagtcccccaaaactccatcctgcctgcccctcgtgcacccgctgtgggcctgggaaacagaacttaggctcagctgggaggacaggagggtctgagtcagtcccaacagccctgagcgtctctgacgaactccgccagcttcagcacctcacctcgatggtcaaccagcctcaccagcaacaaaacggtgcaggtccacgggcgcctcccaacatgcagggactcaaaagcactctcttcttggtgcacgggagctttctcaatgcactgcgcaaaggggctcatttgctctgacttttcatcatcccaggcctcaagtaacccagtggagccatcgtttgctatacaatgaaatggaggtaattaatcgcattcaaataccctacgtattatgctccggtagcatggcaatcgctttaaaaagggcttatggggcttaaatagacacagtgtccaggcagctgtacagccaggagcaggagggaggcagcacccatctgctaagcctcccgggacagctgaaaagaactgtccattcagaagtgattcatccacaacagagctgcgcgcagaagccggagggctaattccaaccttttccgagtgctcgttaagcctctttgagttataattacccccaatctctagatattacaaggcggcaatcaggaagttagatctggtcaagagaaaacaaaaggagagtaaaggaacgggctccgtccaggccggcaaacaggcctatctggaggacagcagcagggcactctggacggggctggagacagggataaggatgaggacaaggaccagctgaggatgcacgctcagcacccaccctccgtcctgtcccctgtaggtcctgaggagcagccgcaggcacagcctggcctctaggctccagttcagccaaagctgcgattttgtcctcctggtggctcctggacgctgcggagttggtgacaccatggggcccagtctgatggcggcacagccagctgcctccgtggcaggagtgcccacgtcctccctaaaagacctggagcctctgcccaggtaaggctgcttctcccaaggaggatgggagtaggtgggctcaggggacagcatgtccgactccacggttctgcccctgccccctcagcccagtccccaccccaggccctgccttaccttgccaaagctgcccttcccaatggcccgaaggatctggaagtggtcgaagttcactgcaggataaaacagagggacacctggtgaggtggcagcaaggccccaccccagagcagctcccccacctcaacatcccccaccccgacactgcccagggcccctcatcctagaagagggtcgccgtggggcgggccaaactctcgctcctgtgcgaggcaggagggggctgagccccggtcagtgaagacatgggccttgggtcttgcacgtcctactcccaggattgctatgggattaggcatgtgctcagccacagcatggatggggcaagaatgaaccacacacacctgagtcccagactcgactgggctgtcttcccaggcaccagccacccccactgaaagctgctccatccagtgaagacccccagacaggcaggcctggggttttgggggaagccatgcacacatgagcagctgttcctggttcccctccaccctgctccgcgtctccagaggacaggggtgtcagccctgctggcactcactgggcaagcctgggggagtctgcaaacggccccaagatgaacaacgagaggcggctcagggctgtggctatgtccaccatgacctgtgtagcctgggagagcctgcgcccagcatgagagccgttccgcaagcctgtgcgaagctgcagaaggcaccatttcccacacctgcaagtccctccgggagaaggacggctcccctaattgtcactcgtgagacctgtccgtgtgccctattcacaccaaggaaagggattctgatgggctttccagaccgtctgcacttgcctttcaaacccaggacattctccgtacacataagacgggggtcccacaatgtcaccccctggcctccaggacgagcccctccagatgactcccaggccagcagctgcctccacttgtgtccccaggcctgtgtccccaattctgcacccctaagtccgtgtccccaggtctgcacccctcagtgtgctgtatccatgaagggccagcactgtgccctgaagccaggtttaggacacccgctggttcatgacatttcacctatttacccacttttaccccagcctcatgttcacttattctctggggaattcgacagctggaacaaccccctacacacatggttattctaaaggcagggaagacacagccaaggccagaggcagacccggggagacagcagggtaggtactgacccctcctgggaggcacggcctagagtctcatctccactgctccctggcggtaccctgtgccgtctggtggggcaagtgctttaggcactcagtgtgtggaggaggagacagaacagtttctagacgaaaggtttctttgcattttcctctgaactggaaaatgcccactcccttcccagggcaccccaggatagccccaggtttcagcatagacgcagcaggcaaagtgtccatcctcatgggccctggggacagagtcacacacccagaattctttcagcctgagctacgggtgccgtgacaaggacccacggaggcttcagggctccgagcacagggcagagctggcctgaaggcgcagggtggcatcctggggagaggacgcctgtgctgggccctccaggacaagtaggcatcagctgggggaagggagggggtgcctaggtgaggggccagcctgggcacaggcaggaaaaggaccccaagggtatggacagacccacaagctggtcctgggtgaagtgggagggcagtcagcagagcacctgggggtgaggaaggggctgtgacctgtggccttggtctcctctgcacaagacggtagtggggcttgactcgcagaggtggggagagcggtttgatttaagcgccttagaaaggcactccccactgcaagtgaccagaggggcactgactggcacaggaggttgggaccaagttgacggagggggtggggcttcaaggggtgagagaagaggctgccaggcatcagagctgggcactgggcagaaaggccgcagaggacgggccgtgctgcacagacaagacccgtggccgacacccacaagctgacacagcctccacgagcccccgttccaggcggcagctgccccaccctgcatcctagcctccttcctcaagaaaacctatgcacgcccagagattatgtcatcgaggcagaggctgctccagcaccagcaaagccactccaaggcagcccgggccgcggccgcacaggcagggagcagctgccgccatgtggcgtcacccaacgtcaccagatgttaaaggaaagtcagctgtgaaccagcacgtgggacagatgggctgaactagtggagggaggagagtgagagggcagctgggccgtggcaggggagatggggacaccaatgccatccagcagcaaccccaacaggacagacctcggagtctgcggggcctgccctgcagtggggaggggacagggtgtcagggcgaggcccagggctgagctggccgcctacagcttggggagatgaactccgctgggcggctctgggtccaaggaccctctgtccacctaggctccacccaggcccaggttgccgctgcccagagacccctgtgctccttgcagcggccggtagaggcaaaagagccacagcgggcacaggagcccgtggtcggcacagccttggccattcccaacagagctgaggacgagggtggtggtccacgcccacgtgcatgcctaggacggccacatggcacctgctgtgccaggcccctgaccctggcacttggcacatgggtacctggagtccagtcctgcactgccctgggaaacgaagccagcatcttcctgtccatgggcacgtgctctggcggcctcccccaggaccccaagcagcccgcacagcacagagccctaagcctctggcccccgagctgtgaaccagcaagggagtccagccaccatcacctccactttagagaataagcacaagttcccaaggttagtccctcccggagaggaaaaggatgggaaacaaaatctattaaataacaagtcagaagcataagggagtcacggcaattgggtcacctgcgccctgcacacctgcaaagcctcccgactgtgcgacggaggcggcggctccggcagaggctcccagctgggaggcagcagcaaggcgcatgcgtgccggggcggggctgtggcgtcagggcgtgcagggggcggggcgtgcagggggcggggctatgggggtcagggcgtgtcaggggcggggccgtggggttgcgggagtgctgggagtggggctgagggtggggctgtggggttaggggcatgcggcccccactctgcagtgcctgtgatttgaacacaactgtccctgcttcctaagactgacaaggagggcagccacagggacaccaagggacaccaagtccaagacagccatgcagatgctgctcagggaaggtgcaggcagggcaggaatcctggatgtggctccaggatgccgtgcaagcagcagagtggacacctgtgggcctgggcagggctcaccgcaccagcgcccctgagaagccccgagccaagtggtccctgccggccatgtccacagggatccctgctcaaggacctgttggcccagaccccgcaaggtgagtcaggggcactggcagggggctgaccggcatcgtggctgtcctctggatgaccgtggctccaccctgatgcccagctcctgctgcccccaggtgcccacctggccttgccactgtgcacagcggccctcatgccctcccgaccccagccccaaaggctccaaaccagtggaactggagacccagtggctgtttcaggctcctgtccccagctcctgccatcagcaacccatgagggtctccgcactgccccaggctgggccaggacctcccatgaccaccggccctgccccacgcaagcccaggctcagccccattcctggctcccaaaggagaggtgagctctcattccagcactcagcggaggagataaggaaaaggaagtccaccagccggaatctgtcaaaacagcttcctgtgggctttgaggggagcaatatgtaatcagcctggtgtcccaagagtggtcctgcaaccaccacagtcaccaggagccggtgtctacggagtccatcaaactcctctcatgagagttcccagagctccctgcacgctggctccgcaccgggggagggaaggggctgaggccgcagagcccagggtggcactggcagaggggacagcaccctgaggacaggtgtgtgtgaggcgcccgggacaggtcactgcagagaggagccccaccccgagggcaggtgtgtgtgaggcgcacaggacaggtcactgcagagagagggcaggtgtgtgtgaggcgcacgggacaggtcactgcagagaggagagggcaggtgtgtgtgaggcgcacgggacaggtcactgcagagaggagagggcaggtgtgtgtgaggcgcacgggacaggtcactgcagagaggagagggcaggtgtgtgtgaggcgcacgggacaggtcactgcagagaggagagggcaggtgtgtgtgaggcgcacgggacaggtcactgcagagaggagagggcaggtgtgtgtgaggcgcacgggacaggtcactgcagagaggggctccgccccgaggcaggtgggtgtgaggtgcccgggacaggtcactgcagagaggggccccgccccgagtgcaggtgtgtgtgaggtgcccgggacaggtcattgcagagaggagacccgggcaagtgttcctgaaccttccacgtctccgcctggctttccatcggcagcacggaagtcggagaccgttctaggcaaaggtcaacgtctggtccccagagaggaggaaggttccaagctgggcaagaggccaacgctgcactcagagcccccaaaaccaatccctgcctcatggtgggctccatgcaggccacctccacgcccacctccttggggcctcagtttcctcctctgccagtgggagggtacagtggcggtctgcatagcagaggcctgggtggggcctatggagcattaggggagccagggatgtcccagcaggaccccaccatccctggggtcacccccaaggagccctgagccccaggccccacacatctgcctcctatctgccacaggaccggcctgggggtctaggagccaccatgtggtcacccaacagcaggggtgaccccagctactgggtccccaggccatgaatctgctcccaggccctacccagtttcgcctagtcccaagtccgctctcatgggggcccgtggagggggcagaggccaggcccctgcaatgggaggagagggagcagagggacgggtctgcgtggtggtgccatgggcagccctggtcaccgaggaagccggacaggctcccagaaggagtgggtgtgcaaagggttggggtcatgtcacttgatctgggcctcagaggggagtgggcatggtcccttccttatacacagagcctactgtgaacggccgaggagccctgtggccctgggaagggggggcataggagcccccacaccatctctttaccccacctcgccccacactcagcccctcaggacttgggtgagcaccccaagagggtggtgggtgcccacctcagatcgactctggcttctgggggttgagccctgaatgcaaaccctccactacccaccacaggcaggtcaacaccctatgcctcctggggcctccgaccctccactacccaccacaggcaggtcaacaccctacacctcctggggcctccgaccctccactacccaccacaggcaggtcaatgccctacgcctcctggggcctcagaccctccactacccaccacaggcaggtcaatgccctacgcctcctggggcctcagaccctccactactcaccacaggcaggtcgatgccctacgcctcctggggcctcagaccctccactacccaccacaggcaggtcaatgccctacgcctcctggggcctcagaccctccactactcaccacaggcaggtcaatgccctatgcctcctggggcctccgacccacgcctccccctcacatccccatctcatcctgctgggcccctcagggctggactttggcactgtctgatcagaagtctctggccaagaacccgctagggacatggcggcctgctaaccagccaaggtcagaggtcaccacatgaaccgctggccaggcccattccagacccaggaaggagggagacaacctcctggagtgaactcttcagtgtgggggaaacactcaacaagcccacagtgtggcaccaggtgccagggagggggctaaagcaggaaagggggagggggctgccatcctacaaggccgtcgggagacatttctgaaggggacatttggcaaagaagtgtgggcatgggtcgtgattacggggaccaagactggtctgtcacgctcctcggcgtgatttacgccgtgcagtgatgctgtcagcgcatccttcacccgtgctgtccacctctcaaattaagacgcaggtaaaaggagaagcagacgcagctccccacaatcccatctcacagctagggggctccttcccaggaaccaggacacatctgcctgaaggaagcacctctgtacttgtgtgcacccaacggcgggcgtgggatggacggagcggctcggagctccgggcccaccagcacctgccctcattgtgcagcttggccaaagggccacagacacagtcttcccagtacagcaaatgcattcgaatccagggtctttaaaatatttattcttcaaggaaggcttttatttttttggtgttggcaactgagagcaggtcctatgagagtcgccatctgaatcccgctaagtgacccgagcgtggggccgcctcctcccaggtcactctggattctgcatccacacaggtgggttgagaaaccaacaccagcccccacacctcccacggtgtccggcagcctctccaggtcctccccaagggctgctagctggggtctcagtccctgaaccaggccccacaatcagagataggttctcttgagacttgtcagcgctaagcccagcacccagacagcagggacgttcgtcctccctaacgcagcatttccctgttctcagagagttttgccaccatctccaggcttaccaggagcaacaaaataaccaaagaaaaggcaaggagcttttccggaaagcagcactccaacgcaattgtttctggtttctgggttgccagcacaggtggcccaaccacatgtctgcctggaaggtcctgccgggcctgggaactggaaccgggcaaaaggaagctggagggagcagagggagctggagggagccgagggagctggagagagtcaagggagcctggggagccgaggtagctggagggagtcgagggagctggagggagctggagggagtcgagggagctggagggagtcgagggaactggagggagctggagggagtcgagggagctggagggagtcgagggagctgagggagctgagggagccggagggagctggagggagtcgagggagctggagggagtcgagggagctggagggagctggagggagccgagggagctggagggagccgagggagctggagggagctgagggagctggagggagtcgagagagctagagggagtccagggagcctgcggagctgagggagctgagggagccgcccctccacagcacatctaaggccaaacaccggctcgaggcgagagatggccaagacgtcacctctggcatggctaccaccaagtccaaggcaaaagcgttaggtaacatttcaacacttttccccaagaataaaaaatgatctgccctcccgtgtgcctggctagaaccttcctcccgccctgcagggacccgcctctgcgtctagcactcggctgagtggctggcccacatgggcatagaaagagcacttccaataacaaaccatgttaggaaagcccaaagcctcagtggagtttcaggttaaaacctagtcttttcaggcagggcgcggtggctcatgcctgtaatcccagcacttagggaggccgaggcaggtggatcacgaggtcaggagatcgagaccatccttgccaacatggtgaaaccccgtctctactaaaaatacaaaaaattagccaggcatagtggcgggcgcctgtaatcccagctactcaggaggctgaggcaggagaacggcatgaacccgggaggcagaggttgcagtgagccaagatcgcgcctctgcactccagcctgggcaaaaagggcgaaactccatcaggggagaaaaaaacaacaaaaaaaaatagccttttcataagccagggcttgtatcaaaactggtaagaaaatactcccaatgaggacagcaaaagaagagaggagagtaaaataagcctgccgcagggcgccgggaatcagcactatgtcaccccggcacaatgcgtgcaccctccacgaaggctgcccccagacctgggagcccaggagagtaaaataagcctgccgcagggtgccgggagtcagcactatgtcaccccggcacaatgcgtgcaccctccacgaaggctgcccccagacctgggagcccaggagagtaaaataagcctgccgcagggcgccgggaatcagcactatgtcaccccggcacaatgcgtgcaccctccacgaaggctgcccccagacctgggagcccaggagagtaaaataagcctgccgcagggcgccgggaatcagcactatgtcaccccggcacaatgcgtgcaccccacgcgaaggctgtctcaagagctggagaatcagctctgctcctgacaccccaggtcccctcttgatgtctttggaggcccgggaagtgggtgctggacagtttcagagctgccacgtggtggatgagctgcccacagctgcaggcgtgtcccaggcctgggacgcttcccttcacagcccaccccacccactcatccggaagaggcccccacgtccaagtgtcctcaggcagaaccagcccgttcaccaatgggaggattgcacagcagaagtgggcactactgtgagagctgtcacaaagatcaaatgtcacacgtggttgaaacacacgcagaagttgattaaatgccgtctcgtctcctatgacctgggaagtgcttatgatgaggaaaatcatcccccaggactccgagacgcaggccccgcagagcttgtgcagcctctggggatgtctggcccacacggggctcctgacttaggaaataccgggccaggtggaagagttggaaccggcccgatagctcctcctggcaatgggtgccccccactcccactcctcaggtgccctggcccgctaggtcaacaggaaccacaggagtcaccagacatcacctcacagacccctcaccctcttgccatggcctgcgggaacaaagacccaccacgctgacgggcagggttgacgcagatggggacaagacaggtgggggctagagacaggcatgagagccgctgggcaggggtgaggaggctcccgagttacagcggagaacatagagcagaagcgtccagccacagcagcacccaggagaggagcagggggccctgcaggaagcaggtccctcaacccttgctgagccccacgcggtttcctgcaccactgaggatgtgttgaaaccccagggcaggaaggtcagagatcaggagaggggatgagggtgtgggtgccggcctctgaccctggactcctcagtccagagggggcctggagcctcgaggtcatgcctgggtgccagcaccatggcccagcattacgtgcgctgcccacgcatctccgagggcccagctggccaccttctccttctccaccgtcccctcacccaggggcagacccccatgaccagcagcctgcagcctctgcacaccctggagccctggtgtccagcttggactcgcccgggtggcttggcggcttcccggcatccctgggcagctccgggacagggctctgtcctcagctggcaccaccacccttccagcctcggggagccaactggggtcttactctgggaacataccctgtgccccaggctccatcttggcagcgatgccctcaccctgtcttttctgtgaaacagacacagccaggatgtggcagcagcccacagctgagtcctgtggggcccctgggctccgaaacaattgtggcttctcctgcccaggtacacacccagagcccggggtcctggtgcctacacctccagcaggaccctgttggcggcagcattcttgccatctccctcccccaccttaattgcagtgaaagcttccacccataaaacaggctcagtggcagcttcccaggccagcactgtggatcctggtcctgtctggtctgaaattgtctggaatcatgttccggtgtttaatatcgacatcctcagacaacacggggatctgccataaatgagtgattagggcaaccgcctgatcaatacagtatctccgggtggcagaggctcaggcctgagaccgcagtgcctgagaccgcaggagtcgcccacggcagcagggacctgggctcctccagctccccaaaccgctggagaggtgggcagcagcacctccccccaggctgcctagaggggtcctactgtccaaggcccggccccacccacccctgcctctcactgcgcagggcccagcaccccaggaccacccacaggggcagacctggaggactccaaggccgcctggccctgcagcagctgagaagcctgctcctggggctgcccgcccagaggcacagatgcttggggaccccggagctgcaatggagacagccctgactcggggtggggcttggggttcctcctgagtcctgaaccctgaggcaggtgtgcctagccagtgggggggacgctggccacagcagcagcagcactggatgagggggagcgagcccagtgggatcccagggctggggatcaaagcagaacagcccaggaaggagccctggccaggagcagatggatgggcagggccctgtgtcctggggtgtggctgcaccaagggccacactcagggctcgctgtgggaccagctgggggctgcccatgaggctgggtcctcaggggggtgaggcctgtggatacaggacatgccctgaaagaccccagaggtcagtgtgttcagaggccagcacgagatgggtaggtgtgtgggtgggtcaaggctggaaaaagccctgtccacgtgtctgtccttccatcctcccacctgcagcccctggggtcctgcacagccctcccacacccgtgccactgtctcccacagagggagacggaggggctcctaggaagaggtggctcctggcagccacaggcccctaggccagcgggctgtggtcattcagggtgcctgagagctcccagggagaggggcagagctggaggaggagtgactcagagcagggagggagcatcacaccccccagccaaagagatgggcggggcggagctgcgaaggagtgggtggcaggatgctgcctgttctggcacagaaagccacatcacccctgtccaccccatctggtgcccaccccctgctgccggccccctgccctgccctctctctgcctctgtccccaggggcgcccactgtgagccaatgatggcaatcccaggcctgacacccccacaatcctccccccaacccccaccctccaccaggcccctctgcagacactaggagggggccccagaaccaaacacccccaggggacccatcagctgccctgggctgggggctcctctacacctgcaggtgggactcagggctctcgagcctccactgtgcagcctgcctgaggcccaaaggaggccgcggcccagcaggcccctgaaagccacaggccctgacatgggctgcaaagaccagcaaggctctcctcagtgcacggactccacctgccccgggaaatcggtcaggacgaagggctccatgtcccaagtgccctcactgtccctgtccttgtcaccccatcacacacatgtgctgatgaatgccggctgagtggccccccaggacctccccgggagcaacagcaagtgtcccagccccaggacatcggccctgacctgacctagagaggggggcagctgcctctcctggatctgcagtggacaggcaagagggcccagctgccaaggctgggcaggtgtctgccgggcacagcgggagctttgctccaaggtggcatgagctccagtctgattttcacacacattagcacttggtagagtggaaagcacctttccccaaaccatcaacagcactcgaagagttcctcacagcctccttttcctaaaatggaaagcgtggccctggccgccccccatcaccccccacggggcccttccagggctctttgcaaaggacaggtggagcccgtgtcatcctcaggacgggtccagtgcgctctcctgggtgcctaggccagcgcgttctcctggaaggacaggtccaatgcgctctcccgggtggctgggccagcgcgcaggccttcctctggaattcctcccagcccaccgaacaggaacagggcggcgggctcacagccggtcctctgggcacctaacgccctgggtaccgactgctgtccacgctgacgctgtgagggccagcaggccctggaaaggagctgcttctggactcacacgtattcccactgcccctcctgagcgggcccaggccacacggtcgcacacctcagggccggatgaggatccccaaacaccacagtgccgaggaggggctgcgagggcctccagggcatggcctcttccacaacatgaaggtctccgcccgtgggcagacgggggttgaggatgaccagttcatcaggaaggaattttatcctagaaatgctaatggcaaatggtaggaaaatatcatctccaactaaaagcattcactcgacaacacatgaacagggctatagcttgggaggctgctgcaccgggtactgggggcacagctgggggcatggacagggctgtggcttgggaggctgctgcaccgggtactggggcacagctgggggcatgaacagggccatagccaaccattctcaccctcatgtgcaccttccccatcccagcctccaagccctggggcaggtgggaaaatgggccctgcaggaccctccttccatccagggtaagatgtaacttcctgacatggtttggctctgtgttcccacccaaatctcatgtaagatgtaactccctgatatggtttggctctatgtccccacccaaatctcatgctgaattgtcatccccagtgttggaggagggtcctggtgggaggtgactgggtcaacggggcggagatcccccttgctgttctcgtgatagtgagttctcacgagatcagtgttggaggagggtcctggtgggaggtgactggatcatggggtggagttcccccttgctgttctcgtgatagtgagttctcatgagatctgggcgtctgaaagtgtgtgtcacttcccctccactctcttctacctgctccagccatgagaacgtgctggcctccccttggccttccaccatgactgtaagtttcctgaggcctcccagccaggcttcctgtacagcctgcagaagtgagtccattaaacctcttttctttataaattattacccagtctcaggtagttctagcaatgcgaaaacggactaataaccaccatctcaggaaaccatggccggcattccggagcggcccctgcagtttccctgtgacactcgctacacactttctgggatgtgccctcacagggccggttgcctgaatgaaggaactgtgtgttttcaactggcctgaataagcccatcgggcttcgcagggcaggggttgttgccatggtttcctgttatgggtgagtgttctacatgggctccagaccaagggcagagcgcacgcatcacggaggccccatgcacacatgccacaaatgcacgctgtgtaaagtctggttcaggaaaaaaaaaaatccaagctaaaccctgatgatgttgagagagggtcacctggctcagggaccctggaatcaaagctgtccccagaaataactgttcaggttgaggagacactgacacgtcctcccagccacgttgtcagggacagcaatggcctcagcctccgcctggcccctggccctgctcagccactggggaatgtaccaaagcccacccccagagtccggcccggggtcctcgcaggtgtccggcttggagacaaggacacggcaccactgagagccaactgcacggaagaggcaggaggccaagccggagccagcgcgaaatccacccctgcggcccctctgcctccaccagctcctgtgtgccagggaatgggctccaccccaagccccagcgccctcccataccctcccaccggacacacaggccccggtcttgggatgctgggcaccgttgtcgggtcctgggtgttgcagggggctgcttcccagaccctcaccttcggactgtgtcattcaaggggactgctctgcttcctcggcccacctgcaagcaggggccagcagatacccatgaggcacaccccactattctgcacccagggccccgtgatcgagtctgtgccccatgcagtgctcatggatgccaccagtggccgggtgggcattgcttcaccacgtgcccatcaccacctggaggggcagggagaggggcgagacagggcccagttaaagcccacgcccaacaccacagtggcacctgggggcccctggacgtgccaaggcccagcaggagcacaggggacaggctgcgaggtcagcgctgccagaccctccctcccagaaccccgtcaggacgctcatgcgggcccccagcaggcccctagcccacagagctctacctccgctcagtccagcccctggggctgggggaagctgtccgactggcatcccgacctcccacaggcctcagggactacgagcttaggccttggagacgatcactgcttcccatggggaggactcggggactacgagcttaggccttggagacgatcactgcttcccatgcggaggactcggggactacgagcttaggccttggagatgatcactgcttcccatggggaggctgtggagttgccaggtggctggagaatctccccggggaaggaatgaggcgcctggaactgacaaacgacctcagtaaagtttcaggatacagaaccaacatacaacaatccacagcatttttatacaccaataacattcaagctgagaaccaaatcaagaatacaatcccatttacaacagccaaaaaataaaatacaatacccaggaatacacctaaccaaggagatgaaagagctctacaaggggaactacaaaatactgcggatagaaatcaggggccgggcacggtggctcacacctataatcccagcactttgggaggccaaggcaggtggatcacctgaggtcaggagtttgagaccagcctggacaacacggtaaaaccctgtctctattaaaatacagaaaattagtcaggcatggtggtgcacacctgtaatcccagctagtcaggaggctgaggcacaagaattgcttgagcccggcaggcagaggttgcagtgagccaagattgcaccactgcactccagcctgggcaacggagagacagtctgtctcaaaaaaataaaataaaaaagaagtcagagatgacacaaaccagtggaaatgcatcccatgctaacagattggcagaatcaatattgttaaaatggccatactgcccaaagtaatctactgattcaatgctcctcctatcaaactacaaagtcatttttcacagaaacaggaaaaactatgctaaaattcacatgcaaccaaaaatgagctcaaatagccaaagcgatcctaagaaaaaagaacaaagctgggggcatcacattactggacttcaaactctactacagggccaaagtaaccaaaacagcatggcactggtacaaaaacagacacatagaccaatggagcagaatagaaaaccccaaattaaggctgcacacctacaaccatctgatcttcgacaaagctgacaaaatcaagcaatggggaaaggactccccattcaataaatggtgctgggagagccggcgagccacatgaggaagaatgaagctggacttctgcttttcaccatatacaaaaattaactcaagacaaagactgaaatgtaagacctcaaactataaaagttctaggagaaaagcagaaaacacccttcttgacaccagccttggaaagaatttatgactaagtcctcaaaagcaatttccataaaaacgaaatgtgacaagtggaacctaattaagctaaagagcttctgcacggcaagagaaaccatcaacagaagaaacagaaaacctacaaacagggagaaaatattcacaaactacgcatctgacaaagttctaataaccagaatctacaaggaacttaaacaactgaacaagcaacaaacaaataaacctattaaaaaacgggtaagatacagctgggcacagtggctcacgcctgtaatcccagcactttgggaggctgaggtgtgtggatcacgaggtcaggagatcacaccactgtactccggcctggtgacaagagtgagactccatctcaaaaaaaaaaaaaaaaaaaacaggtaaaatacatgaacagacacttttcaacagcagatccaaatggccaacaagcatatgaaaaacatgccccacatcactaatcatcagagaaatgcaagtcaaagccacaatgagacaccatctcacaccagtcaggacgactgttattaaaaagtcataaaacaacagatgctggcaagactgcagagaaaagagaacaaacgcttatacactattagtgggaatctaaattagttcagccactgtggaaagcagtttgaagatttctcaaaaaatatagaactaccatttgatccagcaatcccattatgggtacgtatccaaaagaaaacaaatcgttctaccaaaaagacacgcgcattcgtgtgttcattgtggtgctaatcacaacagcaatgacgtgaatcaacccaggtgcccatccacggtggactggataaagaaaacgcagtacctatacaccatggcatatcacacaatcgtaaaaaagagcaagattatggcctctgtggcaacatggatgcagctggaggccataatcctaagcgacttaatgcaggaacagaaaactcaataccacatgtcctcatgtgtaggtgggagctaaccactgggcacacgtggacataaagacaggaacaatggacaccgggactgcgaggcaggggagaagaggaggagtcaagggttgaaaaaccagccactgggtactatgctcagtgcttgggtgacaggatcaattgaaccccaaacctcagcatcacgcaatatacccaggcaacgaacctgcaccctcaaatctaaaataaaaattgagattatgtaatcccagcattttgggaggcagaggcaggtggatctcctgaggtcaggagttcgagacccacctagccaacatggtgaaaccccatctctacaaaaaatacaaaaaaaaaaaagatagctgggcatggtggtggacgcctgtaatcccagctactcgggaggctgaggcataagaactgcttgaacctgggaggcagaggctgccgtgagctgagattgtgccactgcactccagcctggatgacagaacgagactccatctcaaaaaaaaaaaaaaaaaaagttgggattataaaaaaagaaaaagcatggcgcagtgacacatggtccaagctggaaggaccctgacagaaacatagcgccaggtgaaggcagccagagacaagagttcatgcatcatgtgactccgtccctgtgaaatacccagtgccacgacccagggacagaaggcagtgtggtggctgccaggagctggggcaggcggtggcgacggatgtaatcagtaggcatggagtctcccttagggctggtgaggcgcctgcagttagatagaggtggtgtgaagagtatgttctcaacattgtcaatgcactaaacaccacggaactcttcactctaaagtggttaattttgtgtgctatgaatttcacttcaattaacaagataattatttaagtggcccacaatcagttggctgtaggctgcagccccctggagggacacctggtcatcaggtggccccatgtggatgccatcacatggtggggaaggtggtcagggcagaactgagccgcagggacccctcgagctgggagtaggcgttaggtgggcgggacgcacagggagctggggaccttgaggaagaaagggacagagctttgtgctgcaccccagcactgctggcacatcctgctggacagaggggatggtgaaagaacggcctcagggagaggagggacccgggccaggacccctccaggaccctctcccaccagggagctgaggggccagatgccatcctgaggggtttgagctgatggggggcatggatgcagggagggaggaggactccccaaaccagcacctagtggggctcgcatggggcacacccccacagggcctgtcaccccaaagccagcgaggtgggacctagcagacagcacagtcttctttttcaagacgagtttcctcggtgggaggtgggggcgggacagtcgctcatggcagttttccttgatggaagacgtaaaaaatcatgtgaataaatagggcgcttcattctgactttcactttaggaaagacgttaaactatgttaaattcacaaaagttcaagcctcatccatcatacccgtattttatttatactccgcctgatgtcagaggattcaggacagccacacatcttcctgacctgctgcaacatgagaacagtagaaggtgcgagcagcagacatggccgcaagggcggtgaggtgggctctgggggtgcctcaagggcggtgaggtgggctctgggggtgccgcaagggcagtgaggtgggctctgggggagctgccagggcggcgaggtggctctgggggagccgcaagggcagtgaggtgggctctgggggagctgccagggcagcgaggtggctctgggggtgccgcaagggcggcgaggtgggctctgcagccacccgggggacactctgctgggcactggctcttctccttcgatgacagcccctgctcctccctgccacactcagcccaggcctggcccatcacagcgagggtgtccaggaagagccagtcctgggcttctggaactagggcagaagcgaccaccagagctgcaagggcaacacacagcctggaggagcctgtggggtcctcactgcactctggggccctgcctgggtgtgaggagaggacacggtgcagagagacggagggcaggcccatcagccccgcacagccctgggaggcctctcgctttcatggctcgggacaatgtctttccttcctgctgaaggctctgggtcaggattcagccgcaggcagccagggcacacacaaggcagtaataaatggcaagcagcacattaaagatgggcaagaggcccaggcagatgcttcacagacgagaagctcccgaaggccaatgagcacaggagagaggctgtccttagtcgccacggaaacacaaggaaaacccaacgcgggccccctccatccccccggacagccagggagagggacagcagcgaggcctggcaaggacaccgggcaccttgacccacatgctaggggttagggggtgccgtgcacggccgcttgggaaactcaggcagcatcttagttaaacatacacttgctgtgccacccggcaattccattcctagctatttacacaaaaggaatgaaacagacgtctacccaagaatgtgctttgctgccttacaacagtcaaatactggaaataacccaaacgtccatcaagaggataatgaataaagaaattatgttatatccatacgatggaataccactaggggacttcttttaaaggaacaaactcccgatccatagccacgtggatgaatctcaaaggtgttacattgagggaaagaagccaggtttacaagagcgcgtcgtgcgattctgtttgtgtgagttcaagaacaggctggacggatccacagtgagaagcacaggtttgtctctgggggtaggaaggggatgcttggaaaagagcccagagaactttccagaaggaggacaacgttctctgtctccatggggggtcttggttacacaggtgtgcccatctgtcaaaacatcaatctgcatactcacatctgtgcccttgactgtaattatacctcaatacaaataaatagatcatctagatcagggacattctgtagtggaagcgttttaggcatcttatctgaatttcaggaaatgggtgtttacctttggcagcaggaaactgaggctcactgaggttacatggcctgcccacgccaaggagccctcaatttgtctccaggacaaccccgagccctgggggaggaacgagccagggctggaggggaggaaggaacgcgggcgtgggtgggggaggcgctgggcaagggaggctagctccatggggtggaaggagtggatcacaaatgctctcggggaggagggcactggagggggctccaccggtggggcggggggactccaaggagagcatcacacaagcaggacctgggggcagctcgaggtcagaacaacaggacttctcagccagccttgaggcatggagtgacaatggacactgggggtggggagggctgcgcggacgaggccgcagaggaactgcagctccaaccccaacaaccaccgtgagtgttgggagctcggccgtcactgagcgggcagcccccgcccaccccgctgcagtggggagacccaaagctgggtcagaagccggagcagccccttccagcctgtcctcaggcttccccggccctgctccccgcatggtttctctgacctgtgacacgtgggccctgggctcagtccaggcagtgagccagctgcagtagcagcccctttagaagcagcaagcccagtgtggggtgcaggtctccttttggggtcccttgaaacctggccaaaatgcgagaagtctgcacagcccagcattcacttgtattctggaggcctggaatacacctcagatcacacctatgtgtgcgtgtgcctgtgggtgtagctctgcacatgtgaatgtgcatgtgtgtctgtatgcatgtgcatgtatgtttctggggctacagttctgtgcatgtgtgtcagtgcgtgtgcatgcatgtgtatgtgggttcagctctatgcctgtctgtgtgcatgcatgtcccacatcgtgtgtgtgtcagtgtgtgtgcatgcatgttcagctctatgcctgtgtgcatgcaagtcccacatcgtgtgtgtgtcagtgcatgtgcatgcatgtgtatgcatgttcagctctatgcctgtctgtgtgcatgcatgtcccacatcatgtgtgtgtgtgtcggtgtgtgtgcatgcatgtgcatgcaggttcagctctatgtctatgtgcatgcatgtcccacatcgtgtgtgtgtgtgtcggtgcgtgtgcatgcatgtgcatgcaggttcagctctatgcctgtgtgcatgcatgtcccacatcgtgtgtgtgtgtgtcagtgcgtgtgcatgcatgtgtatgcaggttcagctctatgcctgtctgtgtgcatgcatgtcccacatcgtgtgtgtgtgtgtcagtgcgtgtgcatgcatatgcatgcaggttcagctctatgcctgtctgtgtgcatgcatgtcccacatcgtgtgtgtgtgtgtgtgtcggtgtgtgtgcatgcatgtgtatgcatgttcggctctatgcctgtctgtgtgcccacatgtcccacgtcgtgtgtgtgtgtgtcggtgtgtgtgcatgcctgtgtatgcaggtgcagctgtgcctgcgtgcatgcgtcacattgtgtgtgtgtgtgtcggtgtgtgtgcatgcatgtgtatgcaggttcagctctatgcctgtgtgcatgcatgtcccacatcgtgtgtgtgtgtgtgtgtcggtgtgtgtgcatgcatgtgtatgcaggttcagctctatgcctgtgtgcatgcatgtctctcacattgtgtatgtgtgtcggtgtgtgtgcatgcatgtgtatgcgggttcagctctatgcctgtctgtgtgcatgcatgtcccacatcgtgtgtgtgtcagtgtgtgtgcatgcatgtgtatgcaggtgcagctctatgcctgtgtgcatgcatgtcccacatcgtgtgtgtgtgtcggtgtgtgtgcatgcctgtgtatgcaggtgcagctgtgcctgtgtgcatgcgtcacattgtgtgtgtgtgtgtgtgtgtgcctgcgtgtgtacatgcatgtgtatgcaggttcagctctatgcctgtgtgcatgcatgtcccacattgtgtgtgtgtgtgtcggtgtgtgtgcatgcatgtgtatgcaggttcagctctatgcctgtctgtgcgcatgcatgtctcacatcgtgtgtgtgtgtgtcagtgtgtgtgcatgcctgtgtatgcaggttcagctctatgcctgtctgtgtgcatccatgtcccacatcgtgtgtgtgtgtgtcggtgtgtgtgcatgcatgtgtatgcaggtgcagctctatgcctgtgtgcatgcatgtcccacatcgtgtgtatgtgtgtcggtgtgtgtgcatgcatgtgcatgcaggttcagctctatgcctgtgtgcatgcatgtctcacatcgtgtgtgtgtgtgtgtcggtgtgtgtgcatgcctgtgtatgcaggttcagctctatgcctgtgtgcacgcatgtcccacatcgtgtgtgtgtgtcggtgtgtgcatgcatgtgtatgcaggtgcagctgtgcctgcgtgcgtcacatcgtgtgtgtgtgtgcctgcgtgtgtacatgcacgtgtctgttggttcacgttgcatcgtgtgtgcatgtgtcacatcgtgtgtgtgtctgtgtgtgcatgcatgtgcctgtgggtgcagctctgtgcatgtgtctgtgtctccgtgcatgtgtgtgcacacggtggtatgcacagggtgctgcacagggtctcttcaagtgagctgattacgtgcctggcctcatctgaccgacacatggtgcctggagcctggaaaatctgctgctgagctgcaggactgagatgcagcctggattccactggccgcaccggatcttcccctgagctcagggctgcctcccagccctgctggctgctgcaggaggacctggggaaagtgtgtggcagcaagctgcagcctcacagccatttatcaccatcactgctctgctaagagccagcgcctctgggctggctgctgatggattgattttccccaagggcaggaaggctgctcggggctaacagctagtggatggtcttattttccaaacctgagcttatgagacagaccccaggctgtcgcccaaccacatccacctgggagcattccagacccttgcctcgccttgcaaaaggtggaggtgggccctggggtccccttcagccctggcctcccccgaatgcctgtgggagcgctgactccagcggcacagtgggggcagttctcccaagcctgagaggttggtgttgggaggaggcgttcagtgagagtccctagcctgccacggccataatagctgacacccacccaatggtggcctcccagccacgtgggccccggatgcctgagccaggccccctgtcctccacgcctgacgacctgagccctcccctgactgctttcatggtctcttgagaaccctgcagagtttacaagctgatgcctggtactgctgtaggccttgggacagcgtcccctcaacctgtggcaggggactgagggcagcaggggaccaagggcagcacccacgtgaggaggaggccgagagagcccaccccaccccacacagcctgtgggtggctgaacaatggctccagggatgtccaggccccagtccccggacctgtgattcaccttatgtggcaaaaaggatttggcagatgtgactgagtgaacaatcttgagagggtgggactcctgaattatccaggtgggccctaactgctcacagccatccttgcagggagacactgctaccagggaaggtgataccacaagtgaagcacgggcccacgccgctggccttgcagatgcaggggtcatgagccatggctgcaggggagtgacctctggaagctggaattggcgagagcaaaccctccacggcacttctggagggcaggtggccctgccagcctctggaactgagagtgaatgtgcactgtgggaaccgcagggtatggccgtgagttacggcaaccccaggacccagcatggcctcttcccttggagtcccacgcctgctccccggcctgccggatatgaacccatggccttatttgctagtgctgccttgcagaatggcctgggggtaccaaccagacacccctccctccctctgcgtctgtaaccagcagagaacccacaggcagcccaaagagaaccacagcgagccctgcacatcaccctggactcagagctccatcctggccacggtgaggctgcggagtggcccagggcttcttcccatcctggaagcatccatcaacacacctggtgaggacccacctgtggcccagggcagaagcaggaccagaaggatgcagcccccctccagagcaacagccaataagggtagggcaatggggtggggcctcacctcccaccaatcagagggggtgatctgtcctaagggaggagccaggggtgagaccaagggggttctgaaccacagtcagatggggtgcaaggagggtggcacccccaaagtgactcaaagacgcaaatgactagggctccattatcagatagaaatacagggggtgaggagtgtcctaaccggggccttccattcagcagccggcacccctgacccatggctggggactgtggcatccagaagagtgtccctgggctcaggcacttccagccagcttcggcctccacgtggcagtggcccatacaccccatctgtaaagcaggcagccctacagcaacggttcccaggcccctggcactcaggaaaaaaccagcacacctggcaagagacccaggcagagagctgcaagaatagcatggagggtcagaacagaggccacgttcccagagcccccagctccttgtcccaacagtgtgggcccgtgctgtgcccacgccctgcctcactgggcacctgaggctggccccacacctggcctcacacagaaagatgttgtcccgtccattgtggccaaatctgaccccacacacagcactcagggtgggaagaaggtggccgtggcgtcagcatgacacggtcatgtccggctgggagagctggtaagacctgcaaccacggatccagcccccaccactgaaaaaccacggtggtgtttccctaaggtggccaaagcacacatcggagtgacctgggatcacccgttcctgaccccagactcgcgccctccccgacaccccacacctacagaacaaaatttccaggtgtgggtggggatctggagtctgagttttccagagactcctgcggcctcctgggcacactgtgctcagagccacggccctgccccttcccaggcagcactggggctgcctcagtgacaacaccactgctcagtgcccggacgcccggacctcctcatgtttgtgtgtgtgctggcggggcaaggcccctaccctgaatgcatgtctagcttctctccagctcagctgaaatggggaaaggacagaccaggtgtgcctgcaagccccggcagggtaggtgtgtcgtgggctgtgctgtgcccccgaagtcctaagctgaggccctgacccctcgtgcctccgagcgtggctgtgtgtggagatgagatcttcaaagagttggttaaggtgaagcaaggtcacgtgggtgggcccaatcccactggaccgtgtcctcacagaaaagatcaggacggagacacccacagaggaatggccacgtgaggacgctgcccacgagccaaggagccaggcctcagaggcagccaaccctgccggcgcgtggtctcggacttccagcctccggatctgtgagagtgcaagcggctgttgtttacgccacccacgaacaacccgagcaaatgaatacaatgtctgaaacccacaacccaaatctaacgtgccctcaacccagctccctagctcacactgccacagccccagttaccaacagctcatccggatgctcggcctgaagccttggcatgggctcgactcctctctgtctcacaccccagcccgtctgtcgggaaatcctgcaggctcttccttcaagcgttcccagactccgaccgcatcttgcccctcctctgcttctggccaccgtccactcccgcctggattcctgcaacagcctggtctccccgcctccaccctcgccctagaatctattctcaacaaagctgcaggcgtcgtccttttgaaacaaacatgtcaagccccgctctgctcaaaggctccacactcccatttctctcaagtaatagcccatgtccttccggctgccagcaagccgtccaggacccagccccagacccctctggcctcggctcctccaccctccctgtgcctgactctgctgcgctctctgaagcagcccagtgagcccaccatgcggcctgtgcaccaacagctccctctgcccggagccctcttccccagagccgcacgctttgcaccctgggctcaccatatccctatttagtgtgtcgttttcaccaagatttcaccccaatgaagactgcaattgcccacatcatttttttccttgctgcccccctcaacagtatttgtttgttaacatcctatacatttacttagcttcacacaaatcagttccaatccactcagcctttccactgctttgaataggctgacggggcatctgatagagctttctgtgctcactaagcgaccccaccaagagggcagcccccagtcaagaaaggaagctgctcagccctaaaggtcctgtgaacgggctctaagtccctgcagctctagggtggggcaactgcaggtgtctgtggggctcagggagatatcactgcagtacctcctccagatctgttctcaacaaagccctgttgagtgaatgaatgagtgaatgaatcagtagatgagtgaatgaaaacacagtgagtgaatggtgagtgagtgaacgaatgcacggttaatgataatgagttagtgaatggggagttagcaaatgagtaaatgagatgaatgagcgaatgaacacatggtgagtgaatgaatacatggttactgaatgagtgaaggagttactgaatgagtggagttactgaatgagtgaaggagttaacaaatgagtggagttagcaaatgagtaaatgagatgaatgagtaaatgaacgagtagatgagaatgaacacacggtgagtgaatgaatgcacagtgaatgaatgcagtgagtgaatgaacacatggtaagtgaatgaatgcatggtgagtgaatgaggtgagcaaatgagagatgagtgaatgagtgaatgaacgcacagtgagtgaatgaatgagagtggatctaagtgaaagatcataagagcccactatgcgtgtgctgaccccagccccatactgactgggcctgggctgccaactgcgcttctgacttctcagctgattcctggtgtgaccctgggctctgctctctttttccataagatccgcaagttgtgggaggtgcacatcgacttaaacatttgcgaggtgaagcaagctgaggtgcaggggttggggctggaaatgcaacctacaaggagaatgcatcagtctgcagatgcctgcggggtcattgctcaggacgggaccagacagcaagcaccatccacgctgggtgtggccacactgggactcagcggagaggctggctcctcctgtcctagggcctggggagcagccaacagctgcgcccggattcaggactcacacgagggtaatgtggcgtctgaatcaaatgcccatcccacaccaaatgtgggtcaacagaagcaacacaccattgctagggaaaggcggctgttttaaatcctatctcatggtaagtgcacggttttattttggacacttcttcacagagaaattttcgtatgtgtttgatgggaggtcaatatatgaagattgacaactgttcacagttgttttgcaggaaatgtgcagtgacaaaacctcgtaccaggctgtggaggctgcaccgcccgctgacattcacctgaggcttgggaatctaacagggcctggccgcagagcctcccctgccctcagcccaccaggagccacggacgccggatcctcaggctgcactggtccctcaggcgtgggcctgtctgcagaataaacccggctgagcgcaaacctcaaaatccacgggaaccaggcctcggagggccccgagatgtccccgagtccaaagcctcctcggcagtcggccacctccacccccaagtcacctgtcgctccgccgcacaggcagccagcaggcgcctcctcacccagggacgtggcaaggctgagtcactcccaggactccttcagtgagagccttaaatccaccctgttcttccactccctggagggtgccccagctccagagaggggacaacatggaaggtgacagccgggacagggaccgagaaccctgtgccagccccagcttctgagggcccagcaccatggcacagcaggcccagtgtgtggttcacggtgtcccccagggccgaggaaccaagttcctcctggaagcacccagggggcccaggcagcaggtactgtccctggtgctgccatctggcccatcagcccgtctggcctcagccctgacagcagccatgggaggtccggcatccccgtacccgtgcccaccatgtctctgggcagtgctgccccaccaggccccatggctactcacagacagccccacagggccgctggtgggggtgggtgctgggacccccggggaagatggtgagtcagcaacagtagcaaggctggcaggtgcaagaggccgagggaaggtccaggggtctgggatgaatctgccccacctgcccttggaggcagccatcctggccttggaaacatctagatgtcgtgccatggacgtaggatgagaatcaggtccctttcctggaatccaagcaataagagagcccaggacatcctaggattttgctccagaatcacctccgagtctcagtgcccgctcttccttctggccactccgccgacgtgtcactgcaatgcagggtcacagcacagccaggccacggggccagtggccaggggccagcgcagtgcagagccacccaccgtcactgacgcatcatgccgcagggatgaggacctgggcccatgggcttcccacaccaccttctctcaggctccagggtctgccttcctgggaaatcccttcaaacgtccccttccattagagaaactacagccttcagcggaaacctcctcagcagctccatgttcttcctgcccctcttttctccccacctcctggcatctctgagaagcagacacccaggcctgtgtcgggcaggagactgtacaggaaaaccccctctgcctaggaaacctcagccccccaccccgcaagtggtggctgccttccaccctggcatgcggaacggtcacagtgaaggcccgcgaggatggaagacccccaagccgccacaccaccaggctgccacccggtgacgccagacccacatgcgaggcttccctcatcatgagatgagcctggaggtaattctggggcccagcttttggaccagcttttcggtcagcaattttcgagtccacacaaatcagaaggtggacccacagcgaaacacagaaaacagcatgaccgcagcagaaaaaccattttcaagggaagatgcagaaaagtgagctttcagcagagtgatgagatgccaccacgccaagtctgggatcggctggcatcaggcgcgtgatcctacagacaccagccatcccacagacctcctggcactgggcactggaacagggtcagggtcagcacctgtgccagctacacggtgtctaaatgtggtcctgtgcacctgtgaatgccaagaaggacatcaccacaggcactcagagcatctgcatccacccgatacactcagagcacaaaaggggcgaggcacggcggctcacgcctgtcatcccagcactttgggaagccaaggcgggaggactgcttgtggccaggagtgtgagaccagcctggataacacagcaagacccccatctctgaaaaaaaaaaagtttttaattagctggacatgatggcacacacctatagtcccagctactcaggagactggggcgggaggattgcttgagcccaggagctcaaagcttcagtgagctatgattgtgccactgcagtccagcctggtgacagagcaagaccctgcctcaaaaaaaaaaaaacccaatgtatcttctcccaaggtttcctccgttaccccagcgtggcccacggtccccaagagtccaggtcagatgcaggctatggctccccagggctcgaggccgtggctgcgccccatctgggctcactgaacggcctctgttcctgtccctccccagcccagcctcccctcctccattcctccttccagctcaaaggattggattatcaccctgggaaagggatgtgcttatttttgaccaactgaattgaagtaaggaaaggcattatttctagacagagtgtaagactctgttctcttttatgtctccaaaaataagagtcagaagagccgagcagggccagcagtctgccttcccatggatgcacaagtttgtggattctgggctgcgtgtcttggccaggaccatcaaaaccaccgaagacgggccgaagggagtcagggccctccacgagagccgctggagagagagccagggaggacaccagcacctggacttcccaagttgcagcacagagacggccacaaaactgggctccagcccaccattcctgtgcggggaggtggccaggctgaggaggctgggaccacaccagggccctgaacatccagaaacatggcatgctgcccttcctatccactgaccagtttccttctcaggaacccagagagccagcctggcccccggctgcagttctgtgcccaccgccttgctggatggcagctggagctcactgagagctcagtggccaatcacctgcctgcccgtggccctgcagggaatcggcaaggagtccagagccttgctttgcaactgcctttgggacagcggcagcctttgggacagctgcaggcaacatcccaggcctgcaggggactttattcgaccttgacccaagctggtcggggcaaagcattgtggggagcagggtgtctcttctgagtcccttgcacagacaagtgcacacacacatgcacacatgctcctttccaaacctctgccttcaggctgcaggaacctggcttctcacccggggcccgacacaccctcccgacctctccttcattggctgtctcggtgcagggccagcctgcactctggctcacctgggagagggtctttcttcatctcccaaatcacgataaaatcacatgaacatcctgttgatggcagaaggcagcagtggcaaagcaaggcttcggagttcctccccagttccctccagggagaggtgggggtggtcttgagggggcagcttaggaatagactccttaccatgaagaccccctgggaacccattgctcacacccctctctgcagactctgccctctgacttggctctcagagcagctccaccatcactctgtggggtcaggaaagagacctggagacactagatccccacctcatgtccagtgacagaagaaactacaaacccagcaaagacccacacatgccatgccccgcacatgccatgcctccgtgagttctaaaaacaaaaattcaccagtgaatttctctgtaatcctgcagcaagagaggcctctccaaggaagacaaagactgcagaagctacagggaaagggctcttgaccaggaagatacacagaacgctacaaaaatgcaaagcttctgcatagataacaataaacacagtttttaaaaaatcaaaataccggccgggcgcggtggctcacgcctgtaatcccagcactttgagaggctgaggcgggtggatcacgaagtcaggagatcaagaccatcctggctaacacggtgaaaccccatctctactaaaaatagaaaaaattagccgggcgtggtggcaggcgcctgtactcccagctgctcaggaggctgggcgggagaatggcatgaacccgggaggcggagcttgcagtgagccgagatcgcgccactgcactccagcctgggcgacagagcgagactgtctcaaaaaaaaaaaaaaaaaaaaattcaaaatactacaaactgagaaaaagcatttgcaatacatatgacaaacaaggggctacttttcttacaaggaacttatacagattattgagaaaaccaacccaacaggagacggggcagaggccacgagggccactcatggtacaagagtgtgtcagacccgagactgccctgcctcagtccccatttaacaatccaagccaaaatagcaaggagatgccctttgtcttgaatacagccagtgccagttgcccatataccatgcagggggcgggggacggggcatataagtggcccagcccttctagaagcaattagcaacagtgatcaatagtccagctgcacccagtttaacacagtaatgattgcaactgtgaagttccacagtcagcaagcccacaaaaattcatcaagaccgatgtgcagtgactttcacgactgaagtgtaagaacaaaaagccctgggctacccgtgtccataacaggcgaggtgacatgaccatgttacggccataacacggactctcgtgcagacgttacaaactaggtggagcggcgtgctgataagaacatatcccaaagagacaacataaagcctttgcaggagtccagaacactctgcacacaacactcctcttcatgtaaatgacagactctacgtgacaagtacatgcatgtgtgtaaagacatacacatgtgaccaggtgcagtggctcacacctgtcatcccagcactttggggggctgtggcagggggatggccagagcacaggaggtcaaggctgcaatgagccatgatcatgcccacccgcactccatgttcacgcccctgcactctgtaatcatgccactccactccctgatcatgccactcctccatgatcaagccactgcactccgtgatcacgacactccactccgtgatcacgacactccactccctgatcacaccactgcactccgtgatcacaccactgcactccgtgatcacgcccctgtactcggtgatcacacccctgcattccatgatcactctgaggcctccactctgtgatcacgccactgcaccccatcatcacgcccctgcactctgtgatcacgccacctgtgctccatgaccatgcccctacactccgtgatcacgctgaggcctccacaccgtgaccacgcccctgcaccccgtgaccacgcccctgcaccccgtgaccacgcccctgcactctgtgaccacgcccctgcactccatgatcaggacactccactccctgatcacaccactgcactccatgatcatgcccctgcactcggtgatcacacccctgcattccgtgatcactctgaggcctccactctgtgatcacgcccctgcactctgtgatcacgcccctgcactccgtgaccacgccacctgcgctccatgaccatgtccctgcactctgtgatcacgctgaggcctccacaccgtgaccacgcccctgcaccccgtgaccacgcccctgcaccccgtgaccacgcccctgcactccatgatcatgccactgcactccctgactatgctgaggcctccactccgtgaccatgcccctgcactccgtgatcacgacactccaccccgtgatcacgcacctccaccccctgatcacaccactgcactccgtgatcacgccactgcaccccatgatcacgcccctgcactccgtgatcatgccacctgtgctccatgaccatgtccctgcactccgtgatcacgctgaggcctccacaccgtgaccacgcccctgcaccccgtgaccacgcccctgcaccctgtgatcacgccactccactctgtgaccacgcccctgcactccgtgatcacgacactccactccatgatcaccacactccactccgtgatcacgcacctccactccgtgatcatgaacctccactccctgatcacacccctgcactcggtgatcacacccttgcattccatgatcactgaggcctccactctgtgatcacgccactgcaccccgtgatcacaccacctgcgctccatgaccatgtccctgcactccgtgatcacactgaggcctccatgccgtgaccacgcccctgcactccgtgaccacgcccctgcatcctgtgaccatgcccctgcactccatgatcacgccactgcactccctgactacgctgaggcctccattccatgatcacgcccctgcactccgtgatcacgcccctgcactccgtgatcacgtccctgcactccgtgatcacacccctgcactctgtgatcatgcaactacattctgtgatcatggcactgcactccatgatcatgccactgcactccatcctggacaacagagcaagacctatctttaaacacacacacgtgatcctcgtggacacacacacacacacacacacacacacacacacaggtgcatagacagagtgaccttcaggccccatcttttgcttctctagactatgtccgtgtttgaaccttctacttgaactatttttgttggcaataggggttatctgggtgtgagattatgggttcttttctgtttccttctttgggcctctctgtttattaaaaaacaaaagcctgttaaatacaacataaaacagacagtgccccagctattcctaacgtaccttaccgggcccgctcctgctgggtaaaagaaagccattttgccagctcacgtcttagtgggcctggaccagtgtattccaagcttaatatgattgtctttttttaaaggaaaaaaacattctcacatagcccaaagagtatgttcatgaagcccagctcaagaaatactgtctttgaaaatcttctatcagaaatcttctatcagaaaagggctccggttggaaagcactgttgcggacagggagtatccccctgggccggtcgggtggtttgtgcaggtccccgggagacgaaaagacagattccctcccggcacctgcaggcccctctgctttggttccaggacccacagaaacctgctccaccttgggagaagcccgggtgggagatcagacatggtgctgaggccgcggggcaacttctctgacgatggctatttcagcccaaccaggatggtggggtctggggggaagagagctcctcagacgggagcctgttcacaggggccactctccccatgctgtccgctgccactctcagagcagcgtccctgctgagcgccgacattcagagggaggcgcctccctgatcccggcctggaggcagagccgccagctggccaggcagcagcccagccgctccgggggtgggggcgacaggtgctgggcggggaggcgctacattgtgtaacactcagcagccacgctacacttgggaagagcggatgtgctgaaaatgcccagtgcaggaccaaggtgcgccaaccagcccgcaccacgcccgagaggcttcgcagccgcccaccccggctctcacagcgcccatccctgccacacgccctgccagctgcgccagcttccccaggccgtccagagtcgctgctggaactggaataaagtcctctctgagacagctcctgggtggtttcctgcagttttctggtggctgatgaagagggcagtgccaggcgtcagctacccacctgtgcctgcgcccacctgtacctgcacccacctgtgcctgcgcccacctgtacctgcgcccacctgtgcctgcgcccacctgtgcctgcgcccacctgtgcctgtgcccacctgtacctgcgcctgtccttctgcagttcacttatttaacccacagccatggcttcaccaggggaagtgacatactaaacactacactgaaaccccaacttgaaacaagaaataacaacaaaataataataacaacgacgacgaagtcagcttgccattaaggaagccgacacaaagcatccgatcacccagctgtctgagtaggctggggccaccagttaaacatcttagccaccagcagccactcctctggggaaccggccagaagtgactgctgcaccctattagctgctggagcgaagggaagaagtaagtggtttctctggagaaaacacagcacaggctacagcaactctgctggtcaggaggcggtggggggtgttgtcatttcctgtcacagcccctctgaggctggggtcggggaggctggccctgctgcgttctcaggccgaggctgcaccaatcacattcccaggggtcctgaccacaaaaggtccaccaaggcggaccccactccatgcagccaacccgggggcagcagagaagaatccagtgaccagacagagcagggagaggcgtgtgcacctcagggccacgatggccaagacccagccgggaggccggccgaggccccaggccccagggactgcgccagtcctctatgctatctcagctctgtgagcgctactgaagacaccccagcaaaacgttttcagcacagagcaacacgctgatcagtggctttggggatgactgtaacacgggtaagttacaagaaaaaatggcacaacccgccctgtgaaatctgagcggagcaaacaggctgtgaaggcgttggcagaacgcagacgaggctgcgaaggtccagcggcagccacgcccccctcaccgtgcgaccagcggaggcagagtcctggatgcactcactgggaggagggtgtcatggggaccaggctcccagacagatgggcagtggggagggctccagcctctagaaaggcagattccctccaggccgcccatcttcctcggcacagaaggccagtgaagggggtggtttgtgacctgcaagttgcagcaggtctgggcccggttttggggaacacctgagggtccagcatctgcagagctgaagagaggaggagggagaggccgcgggctgtcatggagatgaccccagcactaagaggagggaacacgtggtgccatacacgtccgactccgctgcgcctgagactgagaaacacagctgctgcctcctcctccgcccccatggctggctgtggctccacttctccccacgctctgctgggaagagccaccccagactgcccaggaggcctccctgagtccagccccgccccatccaaagtccaggggaaccaaaggagaagacgggtgcagcccccacctgatggtcagaggcaagtacacagatggcacagaatcaaaacctgtctggccacggaatgtgcccttctctgtcacagactctccaaattccaggacttgctgctgaggcttttaagcgcatcccacagcctctgaccaaccatgagcagagctggccaactgaaagggcacgtggaccacaggaggatggtggtgaagagcagacgccgaccacaagccccgcatccacccgtgcctgaggtctgcagggtccgcagcggcttgccgggccccatgggaagccccgcaggaaacgggcagagtaggaggtggcatcaaggtggagaacaggggcaggtgaggttggggggggcaggtgaggttgggggggcaggtgaggttgggggggcaggtgaggttggggggaacaggtgaggttggggggggcaggtgaggttgggggggcaggtgaggttgcaggggcaggtgaggttgggggggcaggtgaggttgggagggcaggtgaggttgggagggcaggtgaggttgggagggcagcagattcaacccatgaggctccacagggactctgagcacccatgacacccacagagcccccagtagcatcgactgcatgggcctttcccctcagacgaacagagctgcagccctgggaaccacctgcccaaagaccaggcatgaacccagaacacattcccacatctgcccaaagaccaggcatgaacccagaacacattcccacatctgcccaaagaccaggcatgaacccagaacacattctcacacgtgcccaaagaccaggcatgaacccagaacacattcccacgtctgcccaaagaccaggcatgaacccagaacacattcccacgtctgcccaaagaccaggcatgaacccagaacacattcccacatctgcccaaagaccaggcatgaacccagaacacattcccacgtctgtccaaagaccaggcatgaacccagaacacattcccacgtctgcccaaagaccaggcatgaacccggaacacattcccacgtctgcccaaagaccaggcatgaacccggaacacattcccacgtctgtccaaagaccaggcatgaacccggaacacattcccacgtctgcccaaagaccaggcatgaacccggaacacattcccacgtctgcccaaagaccaggcatgaacccggaacacattcccacgtctgcccaaagaccaggcatgaacccagaacacattcccacacctgcccaaagaccaggcatgaacccagaacacattcccacacctgcctgtggagctccacaaagagctcaacgtccccaccctcaggagtctatattctcaccctgggagactgatgataaacaattaacagatggaaacacagagaaaattagcaacactgtagactcaaggaaaaccatatcaataatgacgctaacattccaattaaagagcagatattttcagactgtatttttaaaagcaagacaccactatatatttgtaaaagatgtacttcctatttaaagacacaggttaaaaaggaaaagggtggaaaatgatacatcatgaaaacactgatcatacagttaggtgactacatcaaagcacatttcaaacaagggatatttgaccaatgtgcagaggaacatttcctaaaaggtttaatcatcagaaagataccaaccctaaatgtgaatgcacccaacaacaacccaaaatatgtggagcaaaaatagacaaaatgaaaggaaggaacagactaaccaacagacatagcgatagattgcatcattcccctctattatagacaaggaacaaaacgcaaaacactaatgtgaggaataaaagggcggaatcactacagacattaaaaggaaaatattggccagtcgcggtggctcacgcgtgtaagcccagcactttgggaggccgaggcgggcagatcatgaggtcaggagatggagatgaccatcctggctaacacagtgaaatcccatctctactaaaaaagcacaaaaaatcagccaggcttggtggcgggcgcctgtcatcccagctactcgggaggctgaggcaggagaatggcgtgaacccgggaagtggagctcgcagtgagccgagactgagccactgcactccagcctgggtgacggagcgagactctgtctcaaaaaaaaaaaaaggaaaataatacaacttcatgcaacaaactcaacagcttagatgaaatggacaaaactcattccttgaaagacacaaattatcaaaactaacacaaaagagatggaagatctgaataatcctttatctcctaaagaaattgagctcattattaaaatcttcacacaaagaaaactccagggtcaaacagcaccactggtgaatgttagaaaacatttaatggaaaaacaccaccaaccttacacaaacttttccagaaaattgagaagagaacaccgctcaactcattttgtgaggccagcacatgcctgatgtcaaaaccagacaaggacactgcaggaaagaaaacacaggccaatatccctaatgaacacagatgtaaaaattattaatgaaatattggaaaactgaattcaggaacacataaaaacaaatctagaaatgaaaggttggtataatattcaaaagtcaatgtaacttattacacaaacaaaataaaggaggaaaaatcatcacgtccacaaatacagaagaaaaagcatttgacaaaattcaacaactgttaataattaaaaatataaaaaactcagcaaactaagaggagaaggagatttcctctacctgataaaaagcacacatgacaaggctcagccaacattacagtaaataataaaatgttgactgcttccccctaagaccagaaaacagcaaggatgtctgctctcacttctactcattgtgctggagatcccagagagtgcaatgaggcagaaagttttaaaagaaagcagcgaaattgtctttattcgcaaatgatttgagaaaccctcaagaatctaaaaatatgataatggaagttctgagtgagtttaagcaaggctggagaatacaaagacaatataagcaatagatttcattttttaaaaaacataaaatatgtggggataaatttaacaaaatatctgcaacatttgcacactgaaagctaggaaacggtgctgagaaaaattaaagacgaccaaaataaaatgtcccaactgccacagattcatagatttaaaaaatcaatttttggccaggcacggtggctcacacctgtaatcccagcactttgggaggccaagggaggcggatcactaggtcaggagttcaagaccagcctggccaacatggtgaaaccccgtctctactaaaaatacaaaaattagctgagcgtggtggtgtgagtctgtaatcccacctacttgggaggctgaggcaagagaatcacttgaacccgggagtggaggctacagtgagccgagatcgtgccactgtactctccagcctgggcgacagagcgagactcagtcaaaacaggctagagtgcagtggcgtgatctcggctcactgcaacctccacctcccgggttcaagtgattcttctgcctcagcctcccaagtagctgggatgacagacgtgcaccaccatgtccggctaatttttgtgatttttagtagagacggggtttcaccatgttggccaggctggtctcaaactcctgacctcaggtgatccacctgcctcagcctcccaaagtactgggattacaggcatgagccactgcgcctggccaaaaatcctcaatttttaagagatccattctccctgaattgatctatagtttcagtgcaatcccaatgagtctctcctccagaagagtacaaataatactaatgagtagcagaaatttacaagctgggataaaagagcaaataatctgagtagccaaaataattttgagaaagaacaaaactggggttttgcttccaagacttataaagctacagtaataaatagtgttgaactggggtaaagacggccatacaggtcaacagaaaagaataatgttcaggaataaacccacaattataagctcttcccccagcccaaaaaaaaaggtgtcaaggtaatacaatgaggaaagggtagtcatttcagcaaatagtgctggaccataaaaacatccagattataaaaaggagaagagtgagggagggaagaagaggggaaaaaaatcctcaaccctcaccgcatgtgaaacacaaaaattaacagctataaaacttctagaagaaaacacaggaaaaaatccttgtgatcaagcgctggtcgaagatttcttagaaagaacacaaaaagaacaaaccataaaggaagaaattgatgatatactgaacttcatcaacatttaaaacttctttctccaaaaccaccattaagaactaaagaggaatgagacaaagatgcagaattggctcctgtgagccagtgtagccaactccagcccagagctggacttcctgtaaagggtcaagggcgagctttctgaggtgacagacatattctacatctttattgcagtagtggttaggtgactgtatgcctttgtcaaaactcattaaatctcaaccttaaaatgtgtgaattttatgtaaattagacttcaataaaactgatattaaaaattaaacatattcctatgcaccagcaataaaaatttttaaatacaactaaaataatgccagttacagtagcataaaacaaaaattacttggggataaatttaacagatgtacaagacttgtatactgaaaatggcaacccatgctgagagaaattaaagaagacctcaataaatggagagatgtaccatgttcatggattgaaaaactaattattattaagatgtccagcctccctaaaactgagttatatttctaacacagtctgaatcaacatcttggcaggcttctgtacatataaattgacaagtttatattcaaaattcatatggaaatacagaggatccacaattgctgaaacaattttgggaaatgaactaagttggtggacataaaaatctcatttaaagatttactataaagctacaataatcaagacagtgtgttactggcaacaagaaagataaaaaaaaatagacccaaacatactggtttttgacaaaagcacgaaggtaatccaatggggaaagctaagtctcttcaatgaatgatgctggagtaaatggatatccacatggaaaaatgaacctctacccccatttcacactgtgcacaaaaattaattttaaatgtatcttagacctaaacttgactttaggatagacaacgatttcttagaggagacacagactactcatcaaaagagaccgctgagaaaatgaatggttgagccataaactggaagaaaacacagtgcatctgtccaccaaaggacttgaatacagaatcgttaaactcctacaacttaataaaacacacacataaatgggctaaagaattgcacagacacttcacaaagtaagccacacaaatgactgtctcagtcagttcaggctactataacagattgccatagacctgattcctcaaacaacagagatttatttcttacagctgtaaaggctgggaagtgtaagatcaaagcaccggaagactcagtgtctggtgagggcccacttctcggctcctaaacagctgtcttctctccatgttctcacagggtagaaaggtggtgacagagccctctggggtcccttgttataaaggcattaatccccttcaaaagggttccacccttatcacctaagtacctcccaaaggccctaggtcctaatactgtcactctggagggtggatctcaacatatgtatgtgggtggggacacaaacattcggtccactccaatgttcaataagcacatgaaagagtcgtgaatatcatcagtcatcaggaaaatgcaaatgttcctaatatcaaaacttatcacatcacgtttggaaatgcccattatttgccaacctcagatgcataattttcttgaaaaccgtatggtcatccaacagcaatccgatttggccacacctgccaaagagattctgctgtgtctccaagataccagccggccaccctatggccagcagatgcctccaccatagaccccaagaagaaccccgggacccagccagaaaggagagcagggctgggccatgcctccccgctggacaccgcagtacactccctaagggagacacagctttgtgcaacactcatggtcaaaacgcccaacctccatgtgcccagctcccttccacattgactcattcactttctctttctacccagttaagttaaatctaagcatttattgagcacttacatgtgcaagaccatatggagtccagagcgaacataacccggcccctgcccacatggctttctcagcaacagacagaaacgtgttcttgcagcaggtagcacctagagaggatgcgattactgtgcacatgtgtgtatgcatgcacgctcataggagagtgacatctccaaactcaaagccagatcctcttggccagatcatctgactgttctgacgtttatgaggatggattccaagagacccctaagaagctaaggtccccaggactacccaggaagatgccaagaccaagccagtgtccagcatgctgtgtcctgaggcatccccctgaccacagccctggggcgctggacattgctgccctgagggcccaaggctctactgctgttcacagggccaccacatccagggccatcatacccaaggccaccacatccagggccatcatgcccagggctaccatgctcgagggcacccaaccagggccaccacacccagacccaccaagcccagggccaccatgtccagggatacccatccagacccaccacacccagggccacatccagggcaacccaagggaaacacggcaggagaggcacagccagtcttccaccggcttccgctgccttggctctcccctgcctcccttccggctctctcctgcattcgataacagccctcatggctgtgggacctcactgtttgtatgttgaaaacacaaaatcaacacagccactgcacatagaagagaagaaaccaccggagggcaaatgtaattaatggaaattttctgaaccttccaattagctcggcggtggctgagctggcttgcgctctctggagcattgccgtttcttaattaaaggaatgtgagttcattttggcacaggtttcctgcgatccactgcactgggcccctggacaggccacacaggtccacaggaaggacaggctccactggctgtgggtgaccctgtccccttggatgttctcgatctgagatgtatgtcatccttgtgaggatgaggctctgctttctgaggacccaggagccctgtggacacctcctcgtggccttggaagaaagaagtccatggtcaagctgtgccaaagaaagcctagaggcacggtcacctgcagagcccaggccacctagtgggaagaagggctgtgcccacgagatgccagcccgcccaatggagttgggcctggagccttccagagtgcccctctgcaagtctgagtttagaatcacaccaggtaccatccttcacgcatccagactcctgtatgaacgctgaggctgagctatgccaggcttcaagcagagccatggggctcatgaaacaggcctcgagagagaaccttcaggtcccagagaccccatcccccccaccctagctctgacctgcctgccgtcctgcactgaagaccctcaggctgcagagctgaaggacacagaccacatggcctccatgtccacctgtgtgcacaagatggccattcctaacctcctgccctggcaagcctgatgctgacagcgagaggtggtgtgtctcccctctcagacaccagtggggagcggggaagaagagcattgcagtgaggtccacatacggcccagccttcacttcccaccgttgcactgacctctctagacctggaggcttcccctgcaggggcccaaggctcctacagggactgagcacctcccaggactggcctcagaccccagtcagcactgggcctcaacacttcagctactctctaaagtcaagaagagcaaggacattggaggcagactgccaccctggacatccagtgccaacataagcacctccacgaggagtagacagccagtgcagcacactctgagcccaggagcccaagcccagccctcacaagcacccccaggaccatgcgtcagccagacagggtcccctcactgccaccaagggcctgggtatcggcctcggcctctccatccgggcactcaatgctcacacactcaccacatgcatattgatacccacactctctcacccagtcacacactcatccacactcagtctgacggattcatccacacactcatacacacgtaaacaattcatgcatgcacacacattcacacatgctcaggcacacataaacacatgcatacatgcacacgcatgcacacactcacatgctcatgcacacacattcatatattcatgcttgcacacatgcttccatattcatgcactcccatgcttgtgctcatacccatacaggctaatccacagattcccggtgccagcccaggtgctctgaggggcacccaacgcaagacccccacccaaagcaggccctggaattatcgaaaaaaagacaccagaccctgggaagccactctcagaggcctggctgacaccatcccctggagctcttctataagaaaggtgtgagggagggcatcagattgccaacctctcaccctctggagatggcacccaagccccgcgacgacccgctgccggtccctccctggtccctcccccctcccttccccatgcagacgtcctcctcctgactcggtgggtgctcacctgctccagtgctgcaagtcactcaggacacaagactgagccaaggagatgaaacctgccccacgcaacgtgcagggcaagaggctgacccagaggtgagcagcgaacggcaaacatcagcaagcggggagcacggcacgtgcggggcggtcagtgcagcgcgtgcatgcgtgcggggagggcagcgctggggaagagccaagagaggcctggggccagggggctggggcaggacttagagtgggcctggctgagaggaggatggagtggccatcgctactctcacggtccctccacccaggcctggcgcctggcgggctcccctcctggctctgagatggcccagggccaagcgactgtcctggccagcaagctgtgagccactctcaggccagggaaggcaattcttcgccagcaaaagacatctcagaacactccttctcccactccagcccctggtggctgcaccttcacacaggccagtgtgacagtgagccaagccctcccttggactcatggggacacagggcaggcggcagaatgaaggccctgtcatccttagccactggcttggggtgggcgttactgcagagcgtctgccacccagactgggccaggggagcaaggcagccggccaggcacacggagggtgccgtgggcagagctcttttaagaagcagcagtcaggccggctacagcagagggaacgcagggcaggcagggccagagtgggggtggggagatcacacagccaggcacgtggtgagcctcggcctgaagaacagagccaggagcccagcaggtgggaggtccagcagactgggccacaccagccactgcctggggaatgggggtggggacagccccgaggaagccctaccagagctggggcagagcctgctccggggacgcagaaggagccagggcacagggggcccttcagagggtagagccaagagaacacctgacggtcacaggcacgagggaaggggcccccgagggagctcagaggtgggcacaggcaggggccttcaggcggggccagcatgggggcatcaggactcgcatttgaacctgcggaactgagacactcgagtggcaatgtcgagtcggagggtggacggaaaagcctggaatgtgggaaacaggtcccagctggagacaggaattgggagtcgctgccatataggtggtatttgaaccatgagatcaccagcgtgtgggtggagcgggaggtgaaagagccccagcacggcagagtcagagtcagagacgaggaggatccgccaaggaggccatggagcaggcacggggaagggggttggggatcaggagtgtcagaccctgccataggtcgaggccaaggaaggctgggaacagagcacagccacagggaggggcccgccccaaggcatctttggggcaggtggggcagattccagctccagcgggttttgggagaactggaggggaggcctgcagacggcagggagtgagtgagtttgagttttgctgaaaatggagggctgagaaatagggctgtgggctgacactttcgtagcacaggaaataaagcatgttgcttattcactcaacagccacacaccaaacgccatctgatgcctggcgcccttctccactctcgggacacgaacatgcatggctcactcttagcccctcgggagctccagctagttgtgtacacagctatcagccattgacctcgcaccatctacagccaacagctcagcctctgatccaggcatgggtcagtgcaccagcccccgacccagggccagcaccatggacagctcttccccccagagccccgggttctgtattccagagccctgcagtgacttccgtccccttccccggaagtcctgaccacggagacaggccacaggtcctgcagctgccacgtgtggtggctttgtttcatcgtgatctgtcctgcctgtgtatgacacgggtaaatcatgtgtggtccacaagggaacactgaggcccggccagcagagccaggacagctccagatgtcagcggcctctgcccctctcggtgtggactgtgccacttcagtaaacccagagaaacagcctccaaaggaggcctgtcaattcacacgcccaccggcagtgcacagagcaggtgcacggaaaacacgttaagctgagcaaacaaagtgacaggaaaagctaagagtcttaagccggcagtgacaccatgggcttcgtactttaaaaagatcactgtccccccagagcaaggagcacaatgggacccagagctcagtgtctaacaccatcctcctaacaaagaaaccagggctccttggagaaatggccagttctagggctgggtaaggaaacacacggggtgagcctgcagcatcgtgcagtgcccgaatgtgagaaagtgatcagaaactcacaagagcaacaacgaaagcaccgaagaaggggtgttgaaggagccagggcaaaggacagctcccagtggccagactgggacggggtgaccaagaaattaaagcagtgacgaattacaaccagcgtgtaaaatcagcacccatgagtctacagtgatatcaatgacggggtaacagaattaacgcaaggaagagacaaatctacacagaagaattccaggccgggcgcagtggctcacgcttgtaatcccagcacttcggggggccgaggagggcggatcacgaggtcaggagtttgagaccagcatggccgacatggcgaaactctgtctcgactaaaaatacaaaaattagttgggtgtggtggcgcacgcctgtaatcccagctactcgggaggctgaggaaaaagaatcgcttgaacccagaggcggaggctgcagtgagccgaggttgtgccactgcactccagcccgggcgacggagcaagattccatcttaaaaaaaaaaagaattctgaatgacgtatatagataagcccccttgatgaggggaccataactacccccacacccggtgtgggctgcatatggtgccatcctgccagggaggacagtgtggaaaagggggaaaggggacgtcatggtggagacacctcaccagtgacagggccagcatcggcaggaaggtgtgtggacagcgtgtaatctcgtatgacatcatgagaatggcatttacctccgtggtcttcctcccaaaggcccataatcctgagagaaacatcaaatgaatcccagttaaaggacattttacaacacagctgaccagtgtccaaactgtcaaggtcataaaaagcaagtttgagaaacggtcacagcacggagtagactaaggcgccaggagactcatgtaacacgggatcttgggacagataagtgacaccggggaacaactgaggagatctgaacccagtgtggacttcagttcacaacgaggtatggatacgggtcctctagttacgacaaatgtacccggttaatgccagacggtgacgtaaggggaaactgcttctggggaacaagggaactctctgtatcagcttcacaacttttctataaatctaaactatcctgaaatttaaaaggccacatagattttgcatgttttccagtacgaactgggaggtcatgtgaaaaactacaaatggttgtttatcagtgctgacatgacacaagatgctggatttcttaatttttttctcgtcactttcattatataataaaaagctataaaggaagaaagagatcgtcctggcacagcatctggtggttagaccgggcaaccacacaattgatcatccaaaccaggccacttggagacagaaaggggccgctgtgaggaatggcaccgatcagcaggcaggaagcagatgtcccaggcgaccccggggcatggtggccacagaggcaggactcgcaggcccgcgccctctgggacgccgaaagcctctgcggctctggaaaggagtgtcagggccagtggggagaccacggcagggggtgcagggaaggagaggcagcccagagacagggaggcggacatcgccacagacagaggccaaggcctgggcacagctctgcccagtgtcctctcctgccactgactcaccacccctttcaccttttgtttccttgtggtgcccgagcaggtgcagcttctgggcgggtgacagtcacggcttaggccccttccttcctgcgcctctggctgctgtggctctggggaaggggcaccaggacccaatgacagaggactcccctcctgcttggctcccaccccacaccctctgcaggacatgccccagcccctcctccgtggccatccccagcgtgtccagggcagccagtcctcgctgccaccccaccggtgcctccgcccccgctgccagcagaccccgaagatccaccgaagggcctgctgtggctgtgcctggttagcccaccctgggttttccaattgccacctacaattcccagccccaccaggggccacgccagccccggtactagctgggccacgcactctggggctggggtcccagggtccaatgctttcttcagaacagattttttttcctccccttttcctttgtatctttcttcctatttcatctttttccctctttcagtcatgtgctaactttacagattatcttttctgcctttggagataaaacatcacttcagacacacaagatgactgatgtttacaagaaaaaggaaaaagaattgggggcaaaataaacaaagaccctggcagtcacaggtgcgtcctccaggggcagtgcaggaagccctgagccagagctccgagactccccggcgaagcccccgtagtcaggggcccgccccgcggccagcagcaggtgcacacccgcctggtctctggggctttattttccaaactcaggaagatgttgactccactccaacttcctgtttgtttgttctcaagtacaaacagccttccctccaagctctttcagtttcaaagctcagaagatgctttgtgtctcctggggtcttggtgctctgcggcagcaacccgggtacactggctggtgcttggccatttggctaaactggggttagaggtggctgagagagaacttgtgtgatgctggcaggtggcaggcagcagcaccactccctgaaggtcacgcttccaactcgtccctgctctcccggccccatgtccagctcttccaaacagcccggccgacccgcagcagccctagcccacccccagatgcggagacttcaccctgtgtggtccctcccctgaatctgagctgggcctgtgactggctccaaccagcagaaagcagtcaaagtgacacggtgccagcccaggcctaagcctcaagaaggcccggcatcttctactctgcgtctgtgggcgccctggggcctctcaggaattcctcctgccccaatgtggggcccagtggggcgaagaagccgagactctgaggacggctgtggtggtgtgagacaagtccacaggtcccacggcagccccttccgatgcggggtccagctcccctcccctgaggatgagctggacttgctcacttgctcctaacaggacatgctgggaggagcctgtggctgagatcctcgctgtggcttctcgctcctgctcagctcactggggagggagggaggggagcgccctgtgtggggtcaccggggagttgagcgccgtgtgtggggtcactgggggggagttgagcgccgtgtgtggggtcactgggagggagttgagcgcagtgtgtggagtcacccaggcagtgtgtggggaagctccctttgcaaggaacagaggcctccatccaggagccacatggggaagctggcctggaagtggtcgctccagtcccagtcaaaccttcaggtgacagcagccccagctgccatcttcaccgcagcctcatgagagacaccaagaggatgcaccggctaagccactcctgaatcaccgactcagaaacgataagatggagctcactgtgggccactaggctatgaggaaattcattaagcagcatggatagctaatctactagcagaactgagaccccagaacaagacccagcagcacagacagctaatccaccagccaagagtggaactgagaccccagcagcatggatagctgatccaccagccaacagtggactgagaccccagcagcatggatagctgatccaccagccaacagcgaactgagaccccaagacaagacccagcagcacagacagctagtccaccagcagaactgagaccccaggacaagacccagcagcacagacagctaatccaccagccaacagtggactgagaccccagcagcatggatagctgatccaccagccaacagcaaactgagaccccaagacaagacccagcagcacagacagctaatccaccagccaacagtggactgagaccccaggacaagacctagcagcatggacagctgatccaccagccaacagcgaactgagaccccaggacgagacccagcagcatggacagctgatccaccagccaacagcaaactaactgagacctcaggacaagacccctggggaggtttgcaccagcccgcagctctctgagccgctctggccgaggtgccgtgtacatggatgagggagccacggtggacattctggtcccacagacgtcatgcagagcagagacacccgtccccactaggccctgtccaaattcctagcccacagcatcgtgagaaaccacaaggaggctgataagtcactagtgtagggtagtttactagcagcaacagaaaagtggaacaatgtgtcccctgggcacgaacaggacccggtttgagaaacgcggtgccaggaccccgagccctgttattgggcacaagagccgccaggaacagctttcccacagcgaacagaggctctgaggtcagacgtcacaaagtgactgaggacgggacccagggcgctggcacagggagaggcagaggtgcatggagtaggcggcaccaaaacccccgcggactcctgctcacatcccagcatcgtggtcaaaacaagacaaatgtcatccttgccaaggccccagaatgcgtgcaacgcccgtgctagactcctgcagacattccaaacacagaggcgcctctctcctgctctatcacactttctgccttctgcgttcggaggacggagagtcatgatgtgaattcaaaagaggagaaacctttgcaaagtcaactttctaaatcactgtgagaaatggaatgtgctcggttcctatttttaataaattgggggcgacactgactcccacctacaccatctccttggcttcagaacttaaataacatcgagatgggtttccacaggattggcagggccggagcccagaaggaagcatggcagagaccatgggggctccctcctcacaggtggagaagtggggtgagaggaggctggatggaatctgggggggacaaagccaggccagggcaagcacctccgtctgcactcctgcccagccatgctgatctctgcagcagccttgatttttaaaacaatagatttcaaatcaatgaggaaactgttttctgatgaagcaggcataccatacaaataacaataattgtattgcttatagctttccccaaactgtctcaagttctgatctttatcatcaatcagcaggttggtctgcctgtatactgggagaggggaggggcctgcgtctctgcccacgcccagggcaggcaggagacctgtaaggaagcgctccaggcacagagataccaccccgggtggccactcgcccccattgacagccagagccgaacaaggcggcatcccactcaggagggtggctgagaagaccaaggtctcgccacgtgcccaagtattagtcagcagcagcaggagaaatggtggttcacagagctttatttttatctccagttatacacagacagcagagagggaggttcagagaaacacacagctcaacggagctttttaggtgaggaggaaaatctggctgggaagggaaatgacaccaagtagaaggcctggtcgtccactaacgtgagcccagattcagctctgagcttcccaacaccaagtagaaggcctggtcgtccactaacacgaggtccgattcaactccaagcttcctaacgcccagtagaaggcctggtcctccattaatatgagcccagaatcagctctgagcttcccaacaccaagtagaaggcctggtcccccactaacgtgaacccagattcagctccgagcttcccgacaccaagtagaaggcctggtcctccactaatgtgaacccagatgcagctccgagcttcccaaccaggaagagacagggtcagggccacagggcacaggcccttacttgatgtaagagccgaggggctcaagaggaagtctgggaagctgctctgagtggtcctgcagggcctggcctggaacccgggttcctccctaggagggtcctgcctgacacagctgggagcgcccgttaggtgtgggggtccccggggaagacaaggccccgcagtgggctcggggacacaggatgctccgcccaaaagcacggggccacactccccaggaacccgccagtggacacaccagactaccctgcctcagatccgggtcagaagacagatgccgcatcccagtgtaaaggaaacagtgcgggctactgggccgggtgaaaatgcaagatgtgaaccaggagctgcacgtcggccacgtgtggagaaggctgggccttcaagaggactgagaggaacagaaggaggaaaagcaaattaaaagtccacaccgcgaggcgccctctgatgactggcaaccccgtggtacagagggttagagatccccctccaggcccatcgggagcccgggccaagggaccagcaccccgtgggtttcctgccctcactcaccatgatgcaccggctatatactcactaaactctcacactcaaagtatgtccgcgggccagcagcgctggcaccgcctggggccggctggaaatgtgggctcctggccccaccccaggccggctgggtcagccgcattttcacaagtcctgggtgactgggggtccgggacaggcaggaaagctgctctgagtggtcccggctccgtgtggaagaaacacttgtctgtgactttgcctccctcagatcaccttggagtgtctctgggcttcacccgcagagaatcaatccctcaacaaaatcacctccaaggcatcctcgcattacttctccactggaaagctgggtggttcaagttctaaaagaaaagccggcttatttttagccttgtaaaatgcacaaccagatggatagacacgcagagctgacatttgttacataaaaagtatgacagtaggtcccgagtccattctagagcagcctcacagctgggaaggagaagaggcatcaagctgcacagctgccccaagggcccccaggacacccggtgctgggcccagaaccggggaagccaggagcaaacatgtgacggggtgcccggcaggaggccaggaccataggcctcctccccagtccacaccccagaccaggggcctctgcagccaccaggcttctgaccaccaagcgcctgcactgtgggggatgggtgtctgggccacacagagagcccccaccccttgcctcacagggtcaggaggcaaggaaagagcaccctccaaaatgcgagtccacacctgactggaaagttttcccacactagggctaagctgacgctctggaaggacaacccgtccataccaaccgtgcgggaggagctgtccccagccctcggcagcccctgggctcaggaccttctctcttctctgctccatgagctccggcaacaccataaggaaagaacgaggcaaaaccatcacggggccactagagtcactccaaggcaacgtgacagaccacccagaaagccaacaaaatgaacttcaaagctatagactaacgagaatttagccaagtgcagtcatgtgcaagaggcagcgaagtctcagccacacacaaggtgaaccttgtaaaagtggagcgttccttcacatcagcagcagccagcgtggaaacggtcccactccagtcccacaggccgggagcagcaagggcgcagcctgcctggggctctgcggtgaggggctgcgtgggaggcctcagatccctacagggggaaacatcctaactgcactcatcctgggaaagaggagaactaatgcgagaaggagagagctttctcactctccgtcaagcgatactccctacgggctgcaatttccaacgcaaaaagtgaaaccacagaagcgctagaagaaagtacagatgcaggtttatgaattaaattattattaactgtgctgggaaggactgctgtcacataaaggcaaggccggacgcagccacaaaggcagatgatgaatctgaccacacacaaattaaacacatccatagagaaaaaagctaagtagcaacattaaaagataaatgaggaacgtgggagggaagctgctgaaggctcagcctgtgtaccaggaagggcgagaggaacctgcggctgccatcccacaggacacatgccgctaacaagcgcgggcaggcaattcaaaaagtgtggaaacacgtgaaatgtgtttagagctgaatgctctaaacatttaaggtaaaaagatgatgaacctcattgataatcaaagaaactcaaagcatgagtgccatcttttaatctcttagactggcaaagaatagaaacattgctgatacccaaagctggagaggattcaggggaaaaggcgatcaaaccctcccgctcctggagcaagtgaaaatgggttttcccttcccgccagctccgctggcagcaggtggtctggttctctcccctgcaggtgcctcccgccacccactgcactcgctcctgcctccctgtcttgtcagtctctctgcttcccctctgcccggttaccccacgacagcatggcccataaacaatgctcagagagggaccaattgagcggccacacgtgttaaggtatttcacacggacccctttgcctgagcaatgtcgttcctaaaaatgtatcctagggaaacaatgccaagtgcacaaagatctgcaacgatgttcatcaatacgtcgtttatgatatttataaaacagaaacacctcacagtcctgtgacaggaaactaagtaagcagagaaagtcacagctgctcaggggagcactgcagagtcgggaatctcagcctcgactgctggtaaaactcaagaggggcttaaaaaaaaagcctgagcccctgagccccacccccaacccaccaaacccccccagttcacccacagttcacgggtgtggggcttgagcatctgcattttttaagagtgcccagtgaatgactcgggtccacagcctggggctgagaactgttgtaaattcagccaacaaatgatgcctcaggtctggaagaggctggcaacatatcgctgaatcaacaagcaccttacggcaaattggcatgcagagcaggatcccacttctgctaacaaagagagagtgtttctccacggctgtacctgggactgtatttccagaaaaaggctgggaggtgacaccgtgatcccaatgctgaagttacagataccgtggcataaagtatagaatgtttttaaatgcatacattttaatgctttcataattaggaaaaaacaaaggtgtttctaattttaagagatgacttgaggagtctggtggcccctggtcctgcctcactgcctgcccggcccggcgcccagggcgggccgtccacagcctgcaagggcctgtccactccagccttccccagatgaaggcaaagcccctcagggaggagctacttcctgctggcgggctaatgccacgtcaggctggagactcaatgctgtgaccccgagacgggcgagcgccccccaggttgcagagctgcttagcgggaaggtaccggagcctcctctcaggttcacttggtatcaccaggacaccaagacagagaggaatgaaggggctcgcccaacgccatgcagctctggtgcagagcagcagcagaaagaccccctaaccaagttcaaccccaaaaatgaatttttcaccgaagtcagagaagggatagaatgggagcatgtgaggggctgaggggaaggaaaactggagaccctcagttctggcatgacaaagacgtgcagagaattctgtacatgcaccaaatatctgccaaattaggaaaatggttctggagtccacaaggattaaaaggaacagaggacatttagtcttatatgtcgcaactatgcctatcagttgaaatttacctggcactttgttaaacagcactcttaatttcttttttccttttctctgcatactaaatttgatatattaattaggtgttttaatctaaaaaattcatcggaaggtctagcattgccatagcaaccgtgcagattcagtaaactcgagacaccaacacagcaccagggcctccttaagccagtgctgccacggggccacgaaagtaccaggcaaatgactgcaccaacctgaaaggggtgggactcaggggcaacagtcccttcctaaaagactctcctttctccttccaaactgaatcccttccaccaacacgagtccccggcatccacactcagaggtgcagaacattcttctgcaaaccctgtgctatgactcccaagttgtctgtgccctgccagtgacaggaagaagcggagggaagcggtcaccgcccagagatgtcctctgctattcgggccagggcctagtcttgccctcctgatttcaccacacaaagcccagctgagtcccggcgggtgctcagtttggggatgtggctgcataccaagccatacggagccagcagcatccgtgggacaccgtcagccgaatctctgccgtcctactacaggcaaatacggtgatgctggggatgtgaaagaattcccaagtcagaccgtgagccccacagacagactctgtgcttgctctttttgcctttctagtgatccttgaattctgtgacataacacactgtgaacacacagggaagtctaccctacaaagctgaaggcagcccagtgccacaccactgtctccactcccacccccggagagcacggtgccgagacccagaagagcagccagctcttggctgacaccagcaagtgctaaaccagatgcgtttctcagacgttctctcaacccgcagccagaaacgagaggcaaatctgcctcctgatcagctcctagttcactctgggctttctttactttgaatatttatgttaaaaacaaaaacatttctcaaacattcaccatcgtgagttctgctgtcccgaagttcaggacacagtgacgggccaccctggagcgtgtggggcctggtgtggctgggccttcagccctccttctaggcagcacaccatgaatccccggtgccgtctcccggaggaacggcggtgcacggccccacactcaccaacgccggcctgaggtcgtattactgtaatttcccataatgcttaaattatttatcgcaagtaaatagcctggctcctgagcgctgggctctaaaattttgaaggatccatcatacctctgcacgctatctataaatgaaaaatgcacatttcaagtattttaagaaaatgtcaaaaaacatgaaatgtgtcatcaatgtacgattttaaatgatttgcatgttacctgtagaaaagagctgtatgtctgcatgtgactgtattacagtgcccacaggcagacgcggcaccacatctccctgcaggtgataattcgggggtccccggggccccctggcaccccgggaggtgtccctgcaggcctgtcccatgtcacctcacctgccttctctgctttctatggcgcccacggctgcacggtcactcaggagacaccagtccccggggttggcggctttatctacaggactcagcagcgcactcgttcctggcagggcaggtctttgcacaacggcctggccctgcctccagcgcacatgggtgagcagaggatggacaccgcgcggtcaccaaggagactgagcctctgagcggccgggccccgccacctgtggggcaggagcctcactcgcactcgggcggcacaggtgagcgcctctctaactgcaaagtacaaacgagcccgcacgtgggcccgagcggatcacggaaagcggaaagcagggctgccacgggcggtgggcggaggcgcgcgcaagcccggagacgccacagccgcgggggaccctcgccccgagggcccgggcccagcctgctcctcctgcggcgccgccactagaaacggaggacgcgggcgggcgcccagaactcgcgtggggccgcagccacccggcgcgagcttctccggaagccggggcgccccgggaagccgtcccggacaccgggggaacccctgcgggaaaaagccgcccagccgcgcccgcccctgcaatagcgcgcggcccccacgtcgtccccgtgcccgcactcaccgtcctccttgtcgtcaaacaccggcctccgcgcggtggccgccgacatggacgagcccatcctcttcttccacttgctccactgaaacagggggcgcggctgcgagcggacatcgcccgagtcccgggcccggggctggccagcagcgggcggcggcagggccgagggcgcgtcggagccggcggggcgcgcgcggccggggggcggcgagcccggggacgccgcggcgctgctgcccctgcgctcggcgccactcctcatcgccgggtctgggtgcgcgcggcagccggaactcggggcatggccggccggcagggccgggagcggcagtggtagcgggagcgctcggggccggcagcgcccgccgtgcgctcttctgggcggtggaacccgccccgtagattgcgagcgctgggggcggggcaggggcggggcttctggaaggggcgggggcggggcggagctcctggaaggggtcgaggcggagctgagcgccggggcgtggcaggtgcggagcttcgggaagggtaggggcggggccgagccgggggcggggcaggggcggggctagtgcctggagtgtcgctagggagtgggtggccgccaccagtctagggatgggggctgtggttcgccgggacacggggaccacggctcagactagacggcgggtacgagagcgagggaggcagggagcgtccccacgggtatcctggggccccggaggtcggcgtccctggcacggggactgctgtgcccggcacggcggcgggaccttctcgcggtctccgggggcctccctcccctgccttcttcgtgaaaacagccggcgcgcgggcttccgccgcccagtgcggggagccctaaactccagccttctgctttgcgcagggtgaggccgggctgcaggcccgggatgcgggcggcgggaatctgccgggcagagcccggctcacggtcaggaggcggcaggctgagtccaagcgctgcgccagagggtggggtggggcagggcgggcctggctgcgcgcgcgcacacgcgggcgcctggggtgggcgctaagccctgagcacgtgcgcccgcgctctcgggcacccccgtgccatcctcgcgacccccgtccggcctgagaccgcgtgcccgagtcgcccagggtccccttgtccagatgcgacaggggcctcggcactcggcgtatttcggaggcctggggcgcggcttgacctccgggcacctctgcccctgcgcagggccaggcgcgaccttgcgcggaaagtgctgggcgccttggagtgccctggagaaggcgcggctctgcatggagcctcgccgcctgcccctggcgcttgtcactgaagaatcagtttttgctaccgggctgtttgactttaggaagcctttacctccttaagttctgccctgtaaccaggacacaaagacggggtctcttcctcctcggtgaaatcctagatgggatttcctgctgcccgcccggacgatgagcggatccccaacatggctccaaggccagtgtctcccgctcccgtccctcccaccgcacacaactgtctaccctgtcattcagccactgtgagccctgcctccccacggcctttgacattcagtgtggccgcccgccctaaccgcctgatgcatgaaatgtgagcacgggaagtctgtgtggcttctgggccaacaggagcccccatcccttggggactataaggaatggaaccatgcccatctacctaggacatgcacccgcctggacatgcacccgcctggacatgcacccgcctaggacatgcacccacctggacatgcacccgcttaggacacatggcatgcatttcactactgagatttagagggtatttttatggcagcataacctaggttacctgaccaaccagccaccgcagctctccctgcctggctagcacaaacgcatcggtctctaacttccagtgcacagagccgagttttcagcccttgcagctgcgaagctctgttccctgctctccctcaaagttgccattctccagcaggcacgcagaaggcagtgggttcagcacctgcctcagaggaagccctcggtgcccatcccagcaggagtggtgaaggagcgtttggaaggggaggtaccaaggcagggcagtgcctggaaccctgcgtacccggtgcacacatcagactccccagggctcctcccaaaacacgcagcctctgaacttacatcatcgcctctcctcctctccctctgacccctaaaagtggcagaaaaggaataaaagatataacgtccccaccaccacctaagagggaacaggagaagggaagacatgttaatagacttcagacagcaggtagaaagctgactctgaagattggagaggctgaggacctgcaggtaaccaggaccccaaaaggcgggagaatgtgaatacagccagagcccaggacgcctccccggcccgggcagttggggatggacagtcctctggtctgagggtccaaaggggctcttgacctagggataccaagtcctgcagaagacaagagtgcaggggggcagaggggttcatggggacatctgcacacttaactaggagaccctccaacctcacccttgctgtgagcctcaaacaccaagccaggcacctgcctctcagtcaggaaacaggaaggatctgtagggaaacagcagctcccaaaagaatgccgggtcctaagatttggccagtgcagatcagccctggaggggcctgtgggctcagggcacaactcttgtactgtccaggtgcaactcttgtactgtccagccacggctcagggtccaggcaaacacaagactgagcgttaagaggtgcacagtgtaggcatgagacaggaggggtcaggaactgctgtccccaagaggatgccaacccctggtgcctcatgggaggtagctctgaagttctagggggatgctgggagggactgaggctgggacagagtcagctgtggatgggaaggggcagtgaggccagtagagaattcctgagttcccctgtgtgcccatgctgcccgggaacgtcaacttcattagggcagcgatggtgtctgccccttccaatgacaggagaccaagtgacaatgtgacagataaatgcattcagtgcactgacgtctagcacgcaggagcacacaggaaggcacatggctgggcagcacgtgcatgatcgtgggaccactttagcttgggtagtccagcatgagtctctgagcaggtgaccttgatgctgaggccggagcatgaacgagtagcccaagggaggccaggtgtccgggttccaacagcaggagctggccctaaggtagaaaccggcttgtgcgggaggacaggagggtccatgctgcaggacagcaagtgagtggccgtggcatgtgctgaagggctgggggtggtttgggggacaaggtgcagtccctgacaccaggcttcatgtgcatttgttcataattcgtccataaagccacgcctcctgagggacatgccttggacatgggtcctccgttgccacataattggcacacagctcagtcacaccgagatgtgtgcttcatcttctgtcatcattatgaaattaacacatgctctgcccacgcctttgttaagagtccttttattaaatctcctcagatcacacgattcgtgtgtgctgtttcctgctggaaaacacatctcagaactgacccccaaaacaggaaatgggctcccatgggactccgatgctggtgtccacctatgtggagaatccacggacagcctccctcctgggaaatggaagacagatggccgtggcgccctcagattcagccctggcggggcctgggactgaggattcttggaaggccagggccttggagcccacgtgtggggacacttggttgctatggtgacagtattgattttaaaggtcatgtggccacctggtgactcaggaaggagcacagcgacggagaacatgcaggacgggctgcagccactaggaaggagccctcgcccccactgcagtgcgccggggccgagcatgagttcaccgctcagctctgcttaaggacccacaaccccagcccctgctgccaccatcatcacgttgccttttcatctgtctactccgcccttttcttcctctataaggacacttgtcattggacttagggcccaccctactccaggatgatatcatcttgagatccttaacttagttacatctgcaaagatcctctttccagataaggtcacattcacagggccggcacggacatgtcctttggtggcaaaaggccaccatttaacccaccacatccatgggcagcatggattcaccacaccctacagccccaaagtcccaaccattacagcagcaactctaagtccaaaatcccagctcaagattttttttgagacagagtctcactgtgttgcccagactggagtgcagtggtgctatcatggctcactgcagcctcgacctcccaggctcaagcgatcctcccatctcaggctcctgagtagctcggaccatagatccatgaccccacccctggctgattttttgtgcttttggtagagacaaggatttcacactgtggcctaggctgatctcaaactttggggctcaagaaatccaccccactcagcctcctaaagtgctgggattacaggtatgagccactgcacccagcctctcgtctaaatattttcagctcgaaagtctccaagactcattgtctaaatcatgcctgatttagacaatcagaaatgatgtccaagactcattatctaaatcaggcatgggtgagacctcagttcaatccattctgggcaaaattcccctttatctgtgtaactgtgaaactggaaaatatgcttccaaggtacagtgatgagataggcataagatatacattcccatttcaaaagggagaaataagaaggaataaaaagagtcatcggtcccaagtaagttcaaatccagcagggcaagttccatgaggtttcaaggcctggcaagaattcttggtggctcaatgctgcactacgtaaactaaaattaaaaccataagcccccaaccgatgggacagacccgctcttggccaaggaaactccagaaaaaccttaaaactgagttccaggccagatgcagtggctcatgcctgtagtcccaacactttgggaggccgaggtgggcggctcacttgaggtcaggagttcgagaccagcctggccaacatggcaaaactctacctctactaaaaatacaaaacttagccaggcgtggtggcacacgcctgtaataccagctactcaggaagctgaggcatgagaatcacccgaacctgtgaggtggagattgctgtgagccgagatcacgccactgcactccagcctgggcgacagagcgagactctgtctcaaaaaataaaataaaattaaattaaaaacctgagttcctggctatgatggtgggatgggaggtcagacgggtctcctgataccccctcccttttacggtttagacacaacaaccaaccagctttaatgttaagctggagaccataagacaaacggaatggctctttgtggcaataagataccaaattataaacaggacctaaggccatgccgagtgacggttaagtcacacactctacccttacagcagctaacaagcactggccttgagatgagcaacattaaacgccgtggctgtttaccatccacacagaggcagcctctaaggctaaaaaggacccttccacacgggccacacgacagacatttgccaagcacctgctccatgctaggcactgcagcagacactgctgacatagtgaatggtcagatggagcgtgcacccctctcagcgagggagacgggaacccagtggatagcaggcaaagaggggatgcacagagggctgcgagagcaggagtggatgccagtcctgacagagcatgagggacaccccctcgaggcagcccacagcagagctgacacctgacagatgggcagacgtcagccaaaggggagcaggagagcagccctccgggcagaacatgggtagcgtccaagaggtgagcaagaatgtgatgctttagaagaaaggaatgaatgaaaggccaggctggttaagctggagagattgaggcagggagtggcaagagacgaaggctaaggagatgacaaggaccaggtcaagaggcctcatgagctccgtggaaggtgctagctctggcttcctgaaaggctgctgaaatgggggttgtttaagacccatgcagtgaactttggccaatggaaaaccactgctgggaggataagccacctctccttcctctttcccacaagagttcgcaggcagagtctctctcctgcccatgtgaaggcatcctacctggccaagcagggcatccatggagcagcagcctctgtcagaactcagccagccataagccctcggccagcaccgcgatgcaccaccttacctgggccccgcccttctctgcccctctgcccttctgcatctatataaaggaggggcaaatcaatttcatgttgaaagacaattcatcgctcatagcagaactaataacactctgcctgatagcatgtgcagatgtaaaactgcacaacttacaaagggcaaagagatgatgacactgctgagcttttctgacattccctggaagtggtgttttacagctcaggtttgactgtgacagactgagggtggctatcgtgatccacagcaatgcctttaaaaagtggcccagctaacgagccaacagaggagatacaatgtaactaaaatcaccaggagaagatgaaaacaacccatgggacacaaggaaaataaagagcagagtggtagagttcatcattacagtaaacgtaaatggactacgcacttcaattagaagatagagaccatcagactggatacaaatgcaagaccctaatatgtatatgctgattctaaaagctgcatcttaaatataaagatgaattataacctaaacactaaaaaagaatttaaaagtaaaaagatggaaaaaagatataccatgcaaataataatcataagaaaggtgatgtagctatatttatatcagataacgtagacttcaagacaaagaatattattagagataaaaaggaacatttcaaatgataaaaggatcaattatttaagaatacctaacatgcagccataaaaaagattgagtttggccaggcgcagtggctcatgcctgtaatcccagcactttgggaggccgaggcaggcagatcctgagttcaggagttcaagaccagcctgaccaacacggagaaaccccatctctactaaaaatccaaaattagccaggcgtggtggcgcatgtctgtaatcccagctacttgggaggctgagacaggagaatcattcgaacctaagaggcggaagttgcggtgagcagagattgcaccattgcattccagcctgggcaacaagagcgaaattccatctcaaaaaaaaaagaataagttcatgtcctttgcagggacatggatgaagctggaatccatcattctcagcaaactaacacaggaacagaaaaccaaacaccacatgttctcattcataagtggaagctgaacaatgagaacacatggacacagggaggggaacatcacacactaaggcctgctgggggtttgggggcaaggggagggacagcattaggacaaatacctaatgcatgtggggcttaaaacctagatgatgggttgataggtgcagcaaaccagcatggcacatgtatagctatgtaacaaacctgcacattctacacatgtatcccagaacttaaaagtaaaataaataaatagatagcacaaaaaaagaatacctaacaatcccaaatatgtatgcgcctaataagaagacttcaaactatataaagcaaaacttgacaaccggagagaaaaatagacaaacgcacagtcatagtagtagagcttaacacttccatctcaggaattgctagaacaggtacacacatacgcaattactaaggatatagaagtttgggcaacactcttaagcaagttgacctgatcgacatctatagaacacaataaccaataactgcatattacacattattttcaagtgtgcaagaaatattaaataggatgtcatatcctgaaacaaaatgaaaattttcaataaatctcaaaggattgaaataatatataatgtgttatctgaacacaatgaaattaagcatcaattataaaagagagtccaacatttggaaattaaacaataatccattatcaaataatgaatcacaaggaaatttaaaaatattcaaatggaatgattataaaacccaaactaataaaatgtatgagatgcagctagttttaaatgcctgtatgagaaaaataagagatgttaaaaatcagttttctaagttctgtcttaagaagctaaaaaaaccattccacaatgtatacatattctgaaacatcttgttgcatgccataagtatatatcatttttatttgccaattaaaaagaaaataaattgtaaaaaaaaatttaaaaaataaattacataccttaaaaatcactactataagccaatgtagcaaagatgggaagttttgttcatgggagaagagagtaaagatgagctataaaaagttaaaaaaataaggccaggcacggtgactcatacttgtcacccgagcactttaggaggctgaggtgggaggattgcttgagcccagaagtctacgaccagcctaggcaacatagtgagacccagtctctacaaaaaataaggataaaaaaattagccaggcatggtggcatgcacctgtagtccctgctactcgggaggctaaggcgggaggatcccttgagactgggaggttgaggctacagtgaaccatggtcgtaccactgcactccagcttgggcaacagagtgagatcctgtctaaaagatcaggaaaatcagcaaagcaaatcagtgatcctttaaaaagtcattaaaatgtataaagccccaggattacagaataaggagaaagaggaattagaatattagaaatgaagaaaaggctatcattctagaatctaaagatacttaaaagagtccaggcgcggtggcttatgcctgtaatcccagcaatttgggaggcaaaggctggtggatcacaaggtcaagagattgagaccatcttggccaacatgatgaaaccccgactctaaaactacaaaaattaggagaatcacttgaacctgggctgggaggcagaggttgcagtgagtcaagatcatgccactgcactccagcctgggacagagtgagactccatctcaaaaaaaaaaaaaaaaaagatacttaaaagatgaagaaaggcatgttgtgaaaatgtagtaccagtacattatatttgtaactcagataaaatggagaaactatttgaaaaatataatttatctacaagagaaactgaatttgtaagttaaaactccttcccaaagaaaactgaaagtactgagacaattgaaaatttatatgagaacaataaacctagacccttacataaataactcaaactgaatcagaggcctaaatgtaggagctaacactataaaatttctagaagaaaacacaggggaaaatctctatgacctctagttaggccaagagttattacatgtgacaccaaaagcatgaatgaggcataaaattcattcattggtcttcactaaagttaaaaactttggcactcaaaaatacacaattaagaaaacagacaaggggaaaggttggaagtcatctttctggtgtaggacttgtacccagaacatataggacacttggccgggaagatttcttgaactcaagcgttcaagaccagcctggcaacataatgacatctctacaaaaatttttaaaaattcacatggtgtggtggcatgtgcctgtagtttgggaggctgaggttagaggatcgcctgagcccaggaggtcaaggctacagtgagtcaggattgcaccagtgcactccagtttggatgacagagtgagacactgtctaaaaaaataaaaatgaggccaaggcaggcagatcacaaggtcaagagatcaagaccatcctggccaacatggtaaaaccccgtctctgctaaaaatacaaaaattagccgggcatggtggtgtgtgcctgtaatcccagctactcggggggctgaggcaggagaatcgcttgaacccaggaggcaaaggttgcagtgaaccgagatcacaccaaggcactccagcctgtgagactctgtctcaaaaaaaaaaaaaaaaaaaagtctgggcacagtggctcacacctgtaatctcagcactttgggaggccaaggagggtggatcacaaggtcaggagttccagaccagcctggccaatatggtgaaacctggtctctacttaaaatacaaaaattagccgggagtggtggcaggcgcctgtagtcccagctacttgggatgctgaggcaggagaatcactttaacccgggaggtggaggttgcagtgagccaagatcgcgccactgcactccagcctgggcgacagaaggagactatgtctcaaaaaaaaagagagagagagagagaaagaaaacaatctaataaaaacgtaggtaaaagacttggaaaaccaggcacggtggctcacgcttgtaatcccagcaccttgggaggccgaggcgggcagatcacttgaggtcaggagttcgagaccagcccagccaacataggaaaacctgtctctactaaaaatacaaaaattagccaggcatggtggtgcgcacctgtaatcccagctacttaggaggctgaggcaggggaattacttgaacctgggaggcggaggttgcagtgagctgagattgcgccactgcactctagcctgggcaacagagtgagaccttgcctcaaaaaacaaaaaaaaaaaggaaaagaaaagaaaagaaaaaacatttcaccaaataagacatacaaatggctacatggctgatacacatgtaaaatgtgataaacattatgagtcactgggcaaataaaatttttaaaattgcttttagtttattttttcttcttcctgccaactgttgctacctctgaagaagcaagtaaaaatttaaacctccatgagatacaactacacacttactaggattgccataattaaaaaaaaaaaacagacaataccaagggttggatgtggcagaactggagtccatattttgttaaagtgatgcagctactttgttttttgttttgttttgagatggagtttctctcttgtcgcccaggctggagtgcagtggcgtgatcttggctcactgcaacctccacgtcctgggttaaagcaattctcctgcctcagcctcccaagtagctgggattacaggcgctcatcatcacactcggctagtttttgtatttttagtagaggtggggtttcaccatgttggccaggctggtctcgaaatcctgacttcaggtgatccgcccacctcggcctcccaaagtgctgggattacaggcgtgagccaccacgcccagtcatgatacagctacactggaaaacagttcatttattttaaatttaagcataatcttaccatatgacccagtaatttcactaccaggaatctagccaagaaaaataaaatatatgacttaaagataggtgcatgaatattcatagcagcatgatttcatagccccaaactgtagatagtccaaatgtccatcatctggtgaacagataaacaaatagtatatccattcaacagaatattattcagcaataaaaaggaatgaaatactgatgccttctactacacggatggacctcaaaatcattattctacataaaaccagatgaaaagacgacatactgtctgactccatttacctaaaatgtgcaccccattgtccaggcaaatgtgtagagtcagtgcttccctagggctggggtgagagcggaatggactgcagacagctgtgggaatgcaggggctgagggtactcatcctaaagtgggagtgtggggatggtataaatttactgtaaattgaataaaaattgtggtattgtgtcttcacaatggcttgtagccaagggtttttttttccccttccttttgtcatctctattgaggcataatttacataatataaaactcatctattgcaccttagatggatttttttttttttgagatggagtctcacactttctcccagggtggagtataatggcacgatctcggctcactgcaacctccgcctcccaggttcaagcaacaatgagaaaaagtcttagaaacagctgtttccagaaaaaaaaaaaagttacaggagacctcatacagtatggcacatttttatgaggtttataaagccaagaaaaactagatggcacattgcgcgtgtgaatgataaaattctaaaacaagagaaaaattcaggaacatcccacaatccaggctggggagggggcaggtaggggatggtggggggtgtgcaggatgggtgctatggctgaatgtgtcctccactttcatgctggttaaagataaacacagcccattgccagagtggtgagggcagactgtgattagtcataactgttgcaatggggaagagtctagcgtgacctgactcagcttgaatctgcacggcggtgactgtgggttttaaagggacagtgaggggtgggggtccgctggggctcaggagagctggggaagtgaaaacttaagagtgggaagagggtgggtccacaggagacccgtctataataggtttgttggccacggttatggaagtgaggtcccacccccgcagaggctggggcacggggccctgttctcgggttgctggagccaagaagagatcctttgggcagcttaagttttctcaggcaggcatttggggggctaggtcacccttgggatgcggcctggagttcttacaaatgatgctggcgtccgttcaatcctttgtgcgccacgttgaggcctggtggagcagagggcctggaggagcctggcttgtgtgaggtcaagggcagacttgatgttataacccccggctcctcagaatgtgactatatttggaaatagggctccctgtccccaggaaggccaaggcgttgccatcattgtgatttcctacagtcctggcgcatctgggtgtcctcaccctctgctggaatctgtaaattattggtccagcttatctgtccatcttataataaatgacatctccataccctgccatggccttggggtgggtgcagtgcacctcaccatcctgggactggcttgccgtgtggtttgtttggccaatggggtgtcaggtgggagggagcagagaggcccaactggagagtgggatggaacacggtgaggcctgactggtcaaagggatgttggggggatgccagcgaagtgggccctggatgtcctcccacagctaccgtcttgcacctttgcatgttcatgggaggcacatggtgacctgcttgtcacagaagaatgagacacccatagaatagatgcaagctgcatctgtggcccagagccaagactgaccaagcccagccaagcccagccaagcccagcccacctgcagagtaagaggtaaatgcttggcgttcatggtactaattttgggatggtttgttatgtggaattctgttgagactagccaactggagtcacgtcaccctccacatagcctgctgggacaatgtctaagatgacccaaggccagctccccagagggtccccaaactagtcccagagccacttcattcaccctctggtctgtaacctctttaaaatttccatctaagggccgggcatggtcgttcatgcctataatcccagcactttgggaggccaaggtgggtggatggctggagttcaggagttcgagaccagcctggccaacatagtgaaaccctgtctctactaaaaatacaaaaaattagccgggtgtggtggcaggcacctgtaatcccagctactgctgaggcaggagaatcgcttgaacctgggaggcggagggttggtcattcattttgaggctgtaagatgcttccttgtctggcttcagtgtgacgtatttgtgctttctcccgtcctggcctttccagtgcttttgcttaaatgcatgatcccgcggggcacattttggcacctgtgtcctggtgcacgcctccatctgcttctctactggagtccaaagggggaattgtggggctgttgcacttgagaattcaaccctgcacaggagtccccagatgctcccaagatattgacgaacaccctctcacagcagcgggttccgtgggcttcaccagctcaccaacacaaggcagctgctttgctggtgccagttgagtgagtgtaagactcactcatctgaaatacaatcttggatcaaattgcatttctctgacagctagtaaagtgaagcatcttttatatttttattggccatttatttctcctctactgtgagctattggtttatatctttttacctattactataaatgtatctctatcttttccctattgaatcataggaatgctgcatactatctttatcggattatagtctggatactaatcttcattggatgtaagagtcgccagtatcttctctcagtttttggctgacttaattttctttatggtatctttctgatgaacaggattatttctagtatagtgaatttaccaatatttatttttatggtgtttttatatcttgtttaaaaatcctttcttagcctaagaacaaagtaaaattcactgacattttctcctaaggatgtgtataaactcttgcactggcgcatagcatacctgtgggaaactacacaggtaatgggcatgcatctcaaccaaatttcacgccagtgtaactaccagcacaggaagtaaaatgttgccagcatcttagaagccctggaattactaagcccttcccaggaccataccacccagcagggggaggaggcaccctgatctgggaagccctcctgcctgacacccatttggggtcatctgcagtggccactctgtactttctccagtgtcctggggtggaggtcgtggttctctgctctctccacaaacatgtgcatgtctcagccccattctctctggcccagggaccagtttggttcgtgcgtccctctcctgaacacatttgatcgcttactcaatcccagagtgttcttacgaaaccaaaaagaacagatagctggttctgtgtctgtgaaatgcaggccctctaaaatgcaaagcccagggaaggaggatgtctcttccctggtctaagtgctgccctgcgtcggactcaccaccctttcattctgtgtactatgattatttcccttcctactgcttgtccttactgaaataatgacgttttcagttgcttagtttttgttgaacctcttgggaattcttcctgccccttacaataggcttaccatgtaattttccaccaaatcaatttctccttgcacagtgcattctgggtccaaaacctggctcaagtctggaaatgggccaggaatcatgattgttactgaggtgcttgcccttggcttcctggtcacccatccttgatatctcttaactgtatggactgaatagtgccatcactggctggcttaagactccatccctagcgttctcactggcctaggccaataccaatgttcacagactgttgcccaccctggcacctcgtcaatgtatttcctccaataaagacagttcctttccaagagatgtgctgatctaattgtggcagacagaataatggccctcagagacgtccatgtctgaatccccaaaacctgtgtctatgttaggtacatgaattcaggttaaagaatttaagatagaaggtggggtgcatggggattggaggctcacaggccatgagattggcttgggatggggtgatggatggagctaaaccattttgcacccaagtctcaaggccagtgtcttggtccattttctgttgctacaaagaatacctgaggctgggttatgatttatacaggaaagatgtttacttgactcagttttgaaggctgggaagcccaagagaacggcaacagtttctggtggtgcttttgtcctgcatcatgacacagaagcgaagtggaagggggagtgggacaaaacatgaggggtggcctcatgttataataacccaacctgtggcagttaatgctgtccggagagagcgggaagccactcactccctcaagaattagcccagtccctaaagagcagcattaatctcttaatggcctaaccacaccttaaaccccacctcccaacacacccacacctggaccaaatttccagcatatgaattccagggacccactccaatcacagcagctgggaaaatggaggccaagagctggggatgagtctgagtctccctgggtactgagacaagttcaccactttggctcatctgagaaattcattaacaattcattacacaccccctcttgatgggccacagaacacacccccagctttttcatggcagcctgaaggctgcagcttcttgtctttccacaccattccacatcttcctggcaaaatcccagtcctggggtgtgctctcagaagacctatatgaggaaacagaggtcatcttcactttgcagtctgaactcttttcaaggaagagcaatgtatttcagttgtcacattgtatgatgattggtttagcaggcacagcagagcagaaatggaatcagctgccaggggcattttgaacatcttccaaaaaacaattttaggccattttgaaatctgtaaacttacgtagaaatgtgtattgtccttacattcaactttctataaagtatattttacattttaaaaaaagactgcctttcttttgatgttgttgacaaaaagagtcaagctctgtcaaatacttaaagaggtttatttctgagctaaatatgagtgaccatggcccaaggcagtctcaagagatcctgagatgtgcccaaggtggttgggttgcaagatggttttatacattttaggggaacataagacatcaatcaatgcctgtgaggtatacattggtttggtctagaaaggaaggacaactgaaagtgggatggggagagatgcaggagagtgaccttacaggtcataggtggactcaaagattttctgattgacaattggttgaaagaattattatctaaagacctggaatcaatcaacaggaaggagtgtctgggttaagataaggggttgtagagatcaagttcttagtggtaaatgaagtctcattggtggctactgttagaaacaattgatggtaaattctgatgtttctgatgtggtttggctgtgtccccacccaaatcttatgttgaattcccacatgttgtgggagggacccggtgggaggtaactgaatcatggggacaagtctttcccatgttgttctcatgatagtgaataagtctcacgagatctgatggttttagaaagaggagttccccggccgggcgcggtggctcacacctgtaatcccagcactttgagaagccaagacgggtggatcacaaggtcaggagatcaagaccgtcctggctaacacagtgaaaccccatctctactaaaaaatacaaaaaattagccaggcgtggtggcgggtgcctgtagtcccagctactcgggaggctgaggcaggagaatggcgtgaacccaggaggcggagcttccagtgagccgagatcgcaccactgcactccagcctgggtgacagagcaagagtccgtcttaaaaaaaaaaaagggggagttccctgcacaagttcttgcctgctgccatccgggtaagacgcaacttgctcctccttgccttccgccatgattgtgaggcttccccagccaggtggaacttaagtccaatgaaacctctttcttttgtaaatcgcccagtctttggtatgtctttttttttttttttttaagacagtcttgctctgttgcccaggctggggtgcagtggcgcgatctcggctcactgcaagctccgcctcccgggttcatgccattctcctgactcagcctccagagtagctgggactatcggagtctgcaaccacgcccagctaattttttgtatttttagtagagacggggtttcaccgtgttagccaggatgttatcgatctcctgacctcgtgacctgcccgccttggcttcccaaagtgctgggattacaggcatgagccaccacgctggccggtatgtctttatcagcagcgtgaaaatggactaacatggtttcctatgtagaccttcaaagggtgctagactatcagttcatctcttcaggatcggggaggcctggaagggtaaagatccagttatgttagattcttcacagatacaaatctccgccccacaaaagacagctttgcagggccatttccagatatgaaaaataaacaaatttgggggtaattatcttgatttccttatctgccatgtgatattacgccagagtcagttggagttggtatcttattgctacagagtctgttctgtcagtcttaaaacctctattttatttttgagacaaagtttcaccctgccaccaggctggagtgcagtggtgtgatgtcggctcactacaacctccacctgctggattcgagtaattcttgtgcctcagactcccaggtggttggaattatgggtgcacgcctggctaatttttgtattattagtagtgatggggtttccccatgttggccagctagtctcgatctcttgacctcaagtgatctgcctgccttggcgtccccaagtgctgggattacaggcgtgagccacctcgcccagccaagatctctattttaatgttaatgctggtgagtctgtctaaccccaaaaggagaggagtatcatgaggcacgcccagttctccactgctggtcacggtctgaactaggaagcgcgcccagtcctccactgctggtcacagtctgaactaggaggtgcactcagtcctccactgctggtcatggtctgaactagtttcaggtttctttggaatccccttgacagagaagaggggtccattcagctggttgggggactcagacttttgtttttggtttacaatgtagaagaatattaattactggaaaaacatcacacataacttatggcagcttcacaataagggattacataaaaaaactaaagcagagtaaaactgttttatttcctgtactggaaaatattactttctctgggcaagatggtattgcaagttcaagcttagaggctgatacggtttggctgtgtctccactcaaatctcatcttcaattctcacgtgctgtgggagggacccggtgggaggtaactgaatcatgggggcaggtctttcccaggctgttcttgtgatagtgaatatgtctcatgaaatctgatgattttaaaaaggggagttcccctgcacaagctttctctccttttgcctgctgccctccacgtaagatgtgacttgctcctccttaccttccaccatgattgtgaggcctccccggccatgtggaactttaagtccattaaacctttttttcttcccagtcttgggtatgtccttatcagcagcatgaaaacaaactaatacagaggccctcccacaattctccccaaccatggctacaataggtaatttttatttaaaacaaatttttttttttttgagacagggtcttgctctgtcacccaggctggagtgcagtggcatgctctcggctcactgcaacctttgcttaccaggttcaagcaattctcctgccttagccacccgagtacctggaactacaggtatgcaccaccacgcctggataatttttgtatttttagtggagatgggggtttcgccatgttggtcaggctggtctcaaactcctgacctcaggtgatccgcccgcctcagcctcccaaagcgctgggattacaggtgtgagccaccatgcttggcctataataggtaatttttaaaacaaaaatttaaaaaccaccaacacttcatagaccaaaaatgaatcagaaacacatagcagctcacaggacccagactttgggcctgtgggggctctgggcccagaaagagggaaaggtgcttgggagggctgtccctgaagagtgagggggcagaaagtgcctgagagtagtggagaacagccaagagcatcgctgaaaaccagggctggaataagtctcttgcctctgtaactgccctatgggttcaccttgcctgctgcctagacagagcccatttaccaagacaggggaattgcaatggagaaagagtaattaacgcagagcgggctgtgcaggagaccggagttctactattattactcagtcagtctccctgcgcattctgggatcagagtttttaaagataattgggagggtggggctttgggacatgaggagtgctgattggtcaggttggagatggactcatagggggtcgaagtgaggtttccttgctgttttctgctcctgggtgggtgcccgaactgccggagcgagattacaggtctgggtggtgtcggctgatctgtggagtgcagggtttgcaaaatatctcaagctctgatcttgggttttacaatagtgatgttatacccaggagcaatttggggaggtttagactcttggagccagaggctgcaggacccctaacctgtaatgtctaatattgtacctaatttgttagtcctgcaaaggcagattggtccctgggcaagaagggggtattttcgggaaagggctattacccattttgtttcagagtcaaaccatgaactgaattccttcccaaggttagtttggcctatgcccaggaatgaacaaggacagcttaaaagttagaagcaagatggaatcggttaggtctgatctctttcactgtcataatttcctcagttataattttgcaaaggcggtttcacttccatgaaaggaatgtgaaaaaacatacaacttctgcagcgatatctggagatggagacgaggacagccttcggcccagcctcttgctggctccaggactggatctacagttcccaacggcaaggccaggcaagcacccaagcatgaccccaaaaggctggacggaggctcctgccagagcatgacacacagtgaatactcagggaaacagaacataagccccctctgcagaagcctgcaagcctagatttcaaaacacaggactccaagaagacagataacagtatcagccatcaactggtaaattccgcccaggggagatgaaaacaataaagcacagtttaaaataaatgtgtctaccccgggcagtggctcaggactggcagtggctcacgcctataatcccagcactttgggaggctgaggcaggtggatggcttgagctcaggagttcgagaccagcctgggcaacatggtaaaacccgtctctacaaaaaatacaaaaattagcccagtgtggtggcacatgcctgtagtctcagctacttgaggggttgaggtgggaggattgcttgaatctgggaggcaaaggctacagtgagccgagatcacaccgctgaactccagcctgggtgacagactgagaccctgtctcaaaaaataaataaaataaataaatagaggtgtttgggattctcatggtagataaagaaagaaaacagccgtgaacattaaaaacagattataaaacaaaaactggaagaaattagacacaaaaaagaaaattagaaatagagaccaatgcggttttatttaaaaactcaacagattaaacaaactaattggatggagacagaactagtaaactggaagatcgtaaactgagaacacagagaccaatactgggaagcgcagtttgagagatggagaagacactgaatgggtgcaagctactcccttttaggagatccagaacaagaattatgtcagggtgcagaggtgccacgggaggacagatggccgggaagggctgggaactgaaacttagctatctcaggtgagaagacacggccagcgccaggcaacacagccaaaccaacttatactcagaaataccacagcgaaatttcagaacaaagacatgaaaagagaagatagatttccttcatggaagtagcaatgccacgggcagcaaacttctcggcagggtagcagcagtcgctgcccggaggaaggtcctaaaatcaagacaggaaatgactcaacaaggaacgcggcaccagctccacagccactcaataatcagatcaacacgaacacttcattcgttcctacgttgggaggctcacccaagaatacttgccaaaaggctaccaatggatacaatctggctgggcaaaaactgagcacagtaaagggcaaaacatgctcgtacatacaattaactactgactacaaaaattaatgtagcatgaaaaatgtgaaacaaaaacctgaggcaacaataacaagcaagagggaatacgctcaaatggttagtaaatgttttatttgtgaaaagagatactggaatgctgaaacttgttagaaatagcatcgtgctgaaatcttccatccccttcgccactcacggcaacacccatgtcactcctcattctctccttgctctgcccgggtggctggcctccccacgctcctgagaaggtactggttgtgctttcagcttcctgattggtagatagttgggtatgtacgaaaactttttttttgagacagggtctcgctgtcaccgaagctgacattaagtggcacaatcataactcactgcagcctcaaaatcctaggttcaagcgatcctcttgcctcaccctcccacacagctggaactacaggtgtgtgccaccacacccagcatttttttttttttttttttttaatttttgtagagactgggttgcccaggctggtctccaactcctggcctcaagcgatcttcccaccctggcctcccaaagtgctagggttacaggcgtgagccatcgtgtccggcctaaaaaacatttcttactgtgatctcttcacaaaaataaaacgtaaatcccctcaaagtggatagtcgtttctccacataattatgtcgtttcctttaaaaagtggaatcaggccgggcacggtggctcatgcctgtaatcccagcactttgggaggccgaggggggcggatcatgaggtcaggagatcgagaccagcctggccaacatgatgaaaccccgtctctactaaaaatacaaaaattagctggacgtggtggcgcgcgcctgtagtcccagctactggggaggctgaggcaggagaattgcttgaacctgggaggcggaggtcgcagtgggccgagatcgcgctactgcactccagcctgggagacaaagcaagactccacctcaaaaaaaaaaaaaaaaaaaaaaaagtgaaatcatggcagactccagctaaactgtccgggtttccagagtgtttctgggtgggacagagggtgctacttttcattatcagttggatcctggaatgaaggtgcacgggactccagggttccacaggaccacgcgagcacctcccctcccgcccggtgtcatttcatcttcttccaaattctcaaaacccttcctcaggacactcactgcgtttcctcgcccccctcactcctccgtccagaggcagccttacttctccaaagaggacgctctgagtctgcgttcccctggcagcaagtcctgaggcaagatttggggacaagcagctcctgtgggaagtggctccaggaagccccaggagagacgcggggagtgagcccagcgggaaggacaggcagcgaggaccgctccaaaggtggtgcctcagcagcaattcttttctgctcggctgtcctcgagcagccccgcccgccccgggccctccggctccccagacggcacttagcatcccgctctcttccttcccctctgtgccaggccggtcgcccctccagaccctcgcggtctctacttgcccgtcgaccaccaccccttcaaggccgcgggcgcggaaaaacggatgctaccgttggccgcgtgcgtgcgcaggcgcaccaccccctgccacccccgcgcaggcgcaccacaacccccccaccgcaagcgcaaccccccgccccagcgcaggcgcaccacaccccgccccctcccgggcaggcgcaccacacccgaccccctgccgcgcaggggcacccacaccccgcccccgcacgcaggcacaaacccccacaacacgcacacccccgcgcgcaggcgcaccacacccctcgcgcaggcgcatcacagacacactcgcgctcagcgtggcgcctgcgggattccgtaccggcgtctccatggcgaccgcgttggctgggtggcctccattgtcgggctgctgctctcagcggcggggctcgccagcgcttcagtgggcggggacgcggcaggtgagacggggcgggtacggccagctcgctgagccctcgaggcgggcggcggcaggaaggtggtgcctcggcccgtcgtgccctgtcgcctagctccagccgcgatgctgaccgcaaaggctgcccttctgaggcctggaatgtgaggcccagagcgtcggacccaactcagcctcgcccggatggggaaatcgaggcagggagcgggggtgggcgtgcgtggggatcccttgaaggcagcctcggaaaccccacggagcctgcgctgcctgggccctgtgtgagtccaggctgttgtttcacttctggttttaagatactttccctgttctgaggtttgaagcctcccctcctctgttttaagttccgtgattcggagaaaacaagtgaactgaccgtgaaaaagcccgcgggcttccatggaatgcaggctgcctggggttgaaccctgctgggtcccggtgtcgcctctaccccccaattaactgcgcccctggaacagttccctaactgatctgcgcctcatatgccaatcattgggctgttgagtgacttgaattaggtgaactgatgcattccaacgttgattcttattgccgaataaattgtttggaaattgcaagtggaagtgtgcctcgctgaatgagattttggtgaacaatacttctgagtaaaagtgttgctggacaacgaaaattcgagattaatttaacaggtttttccccggtgcttaactgggtgtaagccagacttagttctggtcactgggtcaaaatggtaaacaaaagacaggcttcctggcctcaagaaactaaaaacatagttcaaatggcacagaaccacaccagaggtaagaaacagtgcaaatttccacccgcccctagtcatttcatggaagcgttgcagttgatttacaggctttgaaatgttccgatctgtttacatccctaaaatgatcattactattgtgcgcctttgcgttttccaggagttaaatcttggaactccattgtacaaagtgagagcagagaattttaatctgaacctctttgtattccttttttttttttttacatgtttaaaagtcaaatttttgctactgcttaggaaaaatgatagcttttaaagcaagttacattacagtagatctgccacacagctattctgttttgcctcggtataattagttgcttctacgtttccctttcccgtgtctccaggtgactccagaccaaggaggatgagctgctgtccctggaagagaacggatggagggaagcagctcctacgaagttccctctgtggctgctgctgatctggaggagggtgctggtcagactaggagcttgcctgccaccccctccaaagatgttcacaagggtgttggaggcatcatcttttcctcctcaccgattttagacttgagtgaaagtggtctgtgccgtttggaggaggtctttagaatccccagccttcaagtaagtggggctgctcctcaggctgtgtgcccacaggtcccctatagacagaaatgggaatgtacccctgggctttatttgtaggcttctttctctttggaattgatgaattctaaaattaaatagaggaaaggttaactcatagtttcatacgccaatcacaacaaaatgggaaattcatgatggggaccaaccaatggaaatagtacatctatttagatgaaggtgtctgttctcttccttgcagttcatctctcaaaacctgtggtagaaactactgccaaacacgcttggtctcttaattaaaacacaaaaccttaaagaa

SEQ ID NO: 592 - DNA, 249592 bp, Homo sapiens
  source 1..249592: mol_type = genomic DNA
cctcttccctaggcaagttgcccttcctcaactcttaaccattactggaaggtagctggaggaaatgagaagctgaggagaaaccagtgcctttttctgtgtttaggatatattaagcataagcacaattagtagttttatctgagaataaaagtatcctaaatagatcctggctgtgtgatttcaggcgctcgaggagtgccctcctggaacgtcagtttccttcctcaaagccccgagggcaggttcttaacactggctggaggtcaaatagggtactgactatatttccatttcaccagcgaactccaaggtcaaaaacaaggctacacctgacagaacatttaaaaaagaattacactgctgtgcaaatacaaagaagtgtccactgattttcaccaaccctgggtgcactgcctatgagttagcccagctcctcaaggaaatttacgattaaaaaataattcattgcctttccaccttccagcatagtacttcaagttgagatgctcaccggggcctcctaacccctctctttggatgcaacccctttcttcctaggtggtccatcctacaggactgttaaaccaatatttcttatttgccattttgaatcctcaaggattcactgagtgcctactctacaccttcgcttgaaaactttcagagatttcctgtattctgcttcatgcccagctccaccttcccatctaaacattgcccacttaccctaagccttccagtcttgccaacctccaaagcaccatgccatggggcctaaaatgccctcttctctcccctctgagcctgttcaaactcagctcagtctctcgtcctgggttttggtgtctctccagggtaaaggggtggggagggtgccttcattctgactggctcccagtgaggcagccccccttgaggaagaggctgagatgccaagtgacttgcctggagtcatttgccagcaggcgatggaatagggactacgagacaccctgcagcctctcctgggaggacaacgccccttctccctctccatgcactcttgaggcagcaaagaggaggcatctggacgcgtttacctcctccccacccccacagcttggccctcactaaactatcttgtgtccttcctcctgctatgattgattcgcccaggaaggtggggcttcatctttacctttcaaatataattctttagttctcctaattacaaggtggggggtggggggtgggggtggggtgaggcggggggtacaaaacaaaacaaaactccatgaagcaacttagaaagcacgaccgcaaaggccctccatcatccccacccagaggtgaggacaaggtctgggggtgctgggtggcttcagaccttccacgggtccaagctatctgcttcaagagggcatcgaaaggtaactcatagacttaccgcccccgccccccgacttttgcaggagggagcgctctcccctcctctgggaggctggagactcggggacagaagatgcgctggagggaagagaacggagcgtcggacaccagaaaaactttgggggattcggggtgagaaagaaggcgtgaagagagaagggaggctcagcaggggaggaggggcgggggcgggggcgggagcgggaggagtcactgcgccgcggccgcccctccccgccctccactcggcggccccgggtcttcctccccctcctcctccccctcctcctccccctcctcttcctccgcctcctggtgtggctggctgcggccagaatcggagccccaaccgcgctgccggtgagtgaccagccccaggggacagagacgggaggcctgggaccccccctctccagggtggggcctcccgccgtgtctgggaaagtttgcgggcgccccgggacgcgggcatctccagggccgctcggcgcctccccatctccccgcgcccgccctggccgcccccaggggcgccctggggcccgcagagggatggcctcccggcagggactcctcggctcccctctgttctgagactgctgctgggaccggggtccgactctaaagagaaaactcaaacagcaaaaaaaggaatatcgactcagttccgagggcgggggccggggctcgttctcacccgcgcgcggcccctcgacctctcggacccgggccaccagctctgcgcccctcacgcctccctcggggtctctgtgtctctctcccgctcccggactccctcctccttctgactgctgttatttgggctgttgtccctccccgctccctggtacctcagctcggaccttagcctgtgcctgcagcccggagtcccctcctgccctggaaggcaaggagccaggccacggggccacagccgcgggggccaccacactggcccaaatatttcctgcaggtatgaccattcactgggtattggggttgggtcccttggacccacaaactgaacctcgtgggtacagggaaaaattaaaatatattcctccttaggattgtactgcttctgttggtttggcatctttttatttttaacccttctaactgtgctttcttcgaataataatgatacttcatgtaattagcgtttctaatatctaaagacagaagaaggaagaaaataaacggaagagagagaatgcttgctaaaaatactcatttttgacttcagtccacactcgactgttttcctgggagatagaagttcagtgtagcttgttttcagactaaccgcaaacacgattacagcctcctccaggctagaagttttaatttgcctgacatgcagcacactgtttgttggtattcccagcctggcattcccgtctgcatagctctagtctccctcccaactcccccacccccactttctttctcataaaagggagctgtgaaaacaaggcaatgggagaggctcaaacgagctggaccacataataaaaacagccctacttattttaatcctgaggctatggactcccctggactctgattgggtggaagaattgtttagttcatttgtgtggtttttctgtcagtagttattatggttgaatcagtgtttccatgacagtcttgcttctgtgggcacgatggggagcctgttaattctcggatgggtctggacagatcaagtctggagtctggagagatttttcagggcttgacctgggctgatattgcaaacctctgcacactcactcagaaccagagcagccgggagcagcctgagctggggttttcttccacatgatctgggaagaaaaagctctaccaaggagcgaactgtgtgagcatggttgctgggggatgttgaatgttttacgtttttaggaagaacacacttctcaaaactttagccattcctgtttccatacaaacaataaatgtggttgtaacaaatgtagtagatcagattctgaacaaccccttaaaaaacaggtccaagtattgaaccatttggaaataaagattttattttatttgaattctactggaaataaaagagtttatgttaaaaaggatgtaattcacttctctccactgatgcagtttgacagttccccattggtatgaatcagttaggttttattgtggtctcaaaacatcattaaggcagggcacaacatcattaaggcagggcacggggttcatgcctataatcccagcattttgggaggccggggcgggcagatcacttgaggtcaggagttcgagaccagcctggccaacctgatgaaaccccgtctctattaaaaatacaaaagctagctgggccaggtggcgggaacctgtaattcccagctacttgggaggttgaggcggaagaatcgtttgaacctgggaggcggaggttgcagtgagccgagattacaccactgcactccatcctgggcgacacagcaagactctgtctaaataaataaataaataaataaataaataaataaataaataattgataggcaagtgttgtgactgtgacttccattcaaaaagtaagtccaaaaaaaaaaaaaaacaacaaaagtaagtccataaattctgagcttgtttggccctgttgcttagaaaaacaatgtactgtgctcagataaaaatcttcagtctcttcctcttcctgagaatttttaatagtgcatttaatatcctgtaagtcaaccttatactgtttacagaaaagttgcctttctgccttgtccagcttttgcactatctcatgaaatattgttagactggatggtttgccacgggtacaagagtctgcccagcagcccgaggagaggctggggttgtaatgaaggccacgggggcctggacctaaggagcaggtggtctggatggtgagatgaaggctacatccccagacagccacagaaagcagccactgatcacctggacaggtcagatgagttggaaatatcaatacatgaagtgtgggaccagtggagagcaaggaaggcagaggtggttaagaagcaaaatgatacaaataaataaaaaaggaaaaggccaggcacagtggctcatgcctgtgaagtgctaggtgtggtgattcatgcctgtaaccctagcactgtgggaagtggaggccagaggatcacttgaggctaggagttaagaccagactgggcaacaaagtgagaccccatctcttaaaaaaaaagatgggccgggcgcggtggcttccgcttgtaatcccagcacttggggaggccaaggcaggcagatcatgaagtcaggagttccagaccagcctggccaacatagtgaaaccccgtctctactaaaaacacaaaaattaggtgggcatggtggcgggcacctataatcccacctactcgggaggctgaggcaggagaatcacttgaacctgggaggcggaggttgcagtgagccgactgcaccactgcacttcagcctgggcgacagagcgagactccgtctcagaaaagaaaagaaaaaaaaagatgtaggccaggttcagtggctcatacctgtaatcccaacattttgggaggccacggcaggtggatcgcctgaggtcagaagttcgataccagcctggccaacatgatgaaaacctgtctctactaaaaatatagaaaattagctgggtgtggtggcaggcacctataatgtcagctactcgggaggctgaagcaggttgcagggagccaagattgtgccactgcactggagcctgggcaacaagagcaaaactccgtctcaaaaaaaaaaaaaaaaaaaagagataaaagatgtaaaataacccaaaggaatactctgtgaccttttaaaatcatgttgtataagaatgttgaattacacaggactttttttttttttttttttgagacaaagttttgctctcgttgcccaggctggagtgcaatggcgtgatctcagcttatcgcaacctccacctcctgggttcaagcgattctcctgcctcagccacccgagtacctgggattacaggcatgtgccaccatgcctggctaattttgtatttttagtagagatggggtttctccatgttggtcaggctggtttcgaactcctgatctcaggtgatccgccagcctcagcctcccaaagtgtcaggattataggtgtgagccactgtgcctggcctggggttaatttttgaaagcaagttataaaatggaaagcactataattttactctttgaaaatacatcgagaaaatactggaattatgtgcatcaaaatggatggtgagagtatagctgtttttaaattttctttgtacttgtatttctcaacttttatagtaataatagctaacatttactgagaactaagcacttacatatggtattttattcgaaaactctttgaggtaaatattactattattttcattatggagtttcagaaactagaaccagaagggtaactcatccatggtcacacagccactaagtgctggaatcaagtgttgaattcaggtcggtggctaaagtctatgcatctctgtcactactgtctaccatctccctgcacatgtattattattattttaattataaggaataagtagaaaaggaaagggaaaatgtttcatgctttagtaagaactgatgggcacagtggctcatgcctataatctcagcactttgggaggctgaggtggaaggatcacttgagcccaggggttgaagactaagtggcacaaattagtcaggcatggttgcacatgcctgagtcccaagtactcaggaggctgagctgggaggatcacctgagcctaggagatggaggcttcagtgagctatgtcacgctactgcactccagcctcggcaacagagcgagaccctgtctcctaagagggggtgaggagggagaaaaacaaaaacaaaaacacactgatacgtaaaatggaaaatgcctcccatctcttccagctccgccagtcacttctctttagaagtctttggtaactgctccagatttagaggtagctcaccccttccttgcaaaccagctccactcacaagaagaatcccgaattccatggaggcttcctggccagcctggaattccaggtaccttatgggattctggagcagtcctcagtacagggcaagatttttaaagtagatcaggcaaattatgtcttcagagctctgcagattacagggtgtcatcattctttgcagcgtcaggagagtgtgataggtagaaagacccagggaaagcaccgaggctcaaatgtacctgtgtgttacatggaatgccaggggaaataaagggtttaccatggaataagaaagagaaaaaaaaaacctcattgctggatgcttattactatgaacacacaacaataaattatctttcgaaagcttgcctatgtgggtgatcccatgcattggtgagtttgactgattgggtgaggtggaaatatttagtgtgagtgattctggggagagctctgggaaaaaatgcccacatcctgtactaccatgtcccctcacaggcaagcagctcctgggatcactcatccattctctttgtggaaggtaccttgagatccccagaaggatcagcattcttagagcccctggcccatcacataacaaacatgccttaagaagaaggctttcagctgggcgcagtggctcatgcctgtaatctcagcactttgggaggccgacgtggggggatcacctgaggtcaggacaagaagtctgatcacaaatgattgtcattttattataatctgccttctccctggtagcttttaaaattttctctaaaatgttccacaggtatgtctaggtatggatttagaaaattttatcctacccagcagtcagtgagcatttgtgattacacaaatttgtgtagctgggcacggtggttcatgcctgtaatcccagcactttgggaggctgaggcgggctgatcgcttgagctcaggagtttgagaacagcctgggcaacaaggatgagaccctgcctctacaaaaaatataaaaattagctgggcatggtggtgtgccctgtggtcccagctacttgggaggctgagatgggaggatcacttgagctggggaggcagaggttccaatgagctgagatcaggccactgcactccagcctgggtgacagagcgacactctgtctcaaaaaataaatcaaaaaacctaaaaaccaaatttgtgaggatttgtgattacccagtgagctgtgtgaccttgggcaagttgccaagttctctcagtctcctcatctatgaaatataaataatgatagtatctattacaaagatactgtgaagagatagtgcatgaaaatgtcagaatacgccaggtgtggtggctcacgcttgtaatcccagcactttgggaggccaaggtgggcagatcacctgaggttaaaagttcgagaccagcctggccaacatggtaaaaccccatctttactaaaaatacaaaaattagccgagtgtggtggtgggtgcctataatcccagctactcgggaggttgatgcaggagaatagcttgaacctgggaggcggaggttgcagtgagctgagatcgtgccattgcactccagcctgggtgacagagtgagatgccatcttaaaaaaaaaaaaaaaaaaaaaaaagttagaatagtacctgctatataaggaagaacgcaaaaattgttagctattattacttttttattttttcagaatttctgggccatcttggatttgaccaatttatataaacgttagtttgtctagttgcacacacacagaaaatcctgttgagattctctttgaaattgcattcaattaatactgacatctttacagtgctggcttttcctatcttctccttttattcaggtgaatgattactggtgatttcccctataaatgtcttctacaacttttgctgtatttatatcttatagatttggttgatattttaaacaatatcttttgtcctagtatattctctagtttacttgctggcccatagaaagaaacattgctgatttttgaattttgtttttttacccagcatcccagctgattctcttattagttctaatagtctgcatatagataattcttgaattttctatatagacaatcataaaacaacgataatttatcttttccatttctgtgactcctacatctttttcttaccatactgcattggggtagatggtccagtacagtgttcaatagaactgtgatgacaggcacccttgccttgtcttcttactgtctttaactttaactgctcttaaagtttctccattaagcgtgaagtttgcttaaggtttcagtagatagtctttattaaactaagaactttgctctattcttaatattttttaacaaggtaaaaattatatcatgacagtatatattttacttaatgctttaatgtctttttcataactatatgagatgatcattttttcttgatattacattgtgataagatgagcgtattaattgtgttgaaacatgtacataaatatacatatacaggtatattattctgtagggtatcggttgctagtattttactttggatttttgcaaatgttcataagtgaagttgttctagaattttctttttaaaatattggtctggctgggtgtggtggctcatgcctgtaattccagccctttgggaggccgaggcgagctgatcaactgaggtcaggagttcaagaccagcctggccaacatggcgaaaccctatctctactaaaaatgccaaaaattagctgggcgtggtgacatgcacctgtaatcccagctactcgggaggctgaggcacgaaaatcacttgaacccgggaggtggagattgcagtgtgctgagattgcaccactgccctccagactgggcgacagagcaagacttcatctcaaaaaaaaaaaaagaaaaaaaaaggaaaaaaaaaggaaattgttcttatattgtttggtatcaagcttgtattggccctataaagtaatcataagtatatgtctttctttatcttttttttttcgagacagagtcttcctgtttcccaggctagagtgcggtggcatgatcttggctcactgcaacctccgactcccgggttcaagcaattctcctgcctcagcctccttagtagctgggattacaggcacgcgccaccacgtgggcccagctaattttttgtatttttagtagagatggaatttcaccgtgttagccaggatggtcttgaactcctgctctcatgatatcccctcctcggcctcccaaagtgctgggattacaggcatgagccaccgtgcctggctggcatatatgtttttcttaactagtttgtaagagataaagattatctgtttcttaaaatttggtaaaactcattacgaaatcatctgaaccacttataaagggcatatgggtcaagtttttggtgattcagtttcataaatgattagtgatgaatttaggctttctattccttcttgattcagttttgataatttagtttagatgatccattcatgtgttcttgggcttcttagcatagttattcgtaattttctcttagggttttataaatattgcctctatcttttttgttttttaatttttttattacctttcctatggtgctgagaatctagcttatatttcttatttatttatttaagacagagtctcactctgttgcccaggctggagtgagtcatgcgatctcggctcactgcaacctctacttccagggttcaaacaattctgttgcctcagcctcccgagttgctgggattacaggtgtgcgccaccacacccagctattttttttttttttttttttttttttatattttctgtagagatgcagttttgccatgttggccaggctggtctcgaacttctggcctcaagtgatccgcctgccgcggcctcccaaaatacttggattatagggatgagccactgctctcggcctatttattgattttttagagatgggatcttgctgtgtcacccactgctggagtgcagcggcaccatcatagctcactgcagcctcaaactcctgggctcaagctatcctcttgcctcagcctccctagtagctgagactacaggtgcgcaccactatgcccagcaaagttttgtattttttgtagagatggggtcttgctatgttgaccagactggtctgaaactcctgtcctcaggtgatcctcttgcctcagtctttgaaagtgttgggattacaggcatgagccaccactccttgccctttttttattcttaatattgtttatttgtgccaactctctttttctttattaatatagatgtctactacttaatcttttcaaataaacagcttgttcttatctatatttttgtttttcattatttttacctttatctacatttcttctgtttctagctacttgaattcatgcctagcttactttttgtttttcagtaaatttatttaaatctataaatttacctctaaatactgctttagctacatcatgcaagttttaacccatgtgtggtgttatgatatatgttttcttttttgagatgggatggagtctcgctctgtcacccaggctggagtgcagtggtgtgatcttggctcactgcaacctctgcctcctgggttcaagcgatcttcctgcctcagcctcctcagtagctgggactacaggggcatgccagcacaccaggctaatttttgtatttttagtagaaactaaagttcctgggctcaaacgatcaatgggcctcagctttctaaagtgctgggattacaggcgtgagccactgtatacatttaaccttatttcttgcatgtactacacgcctgatttcaaattttataggccactcattttctactctttgcccaagcagatgacaaggtttctggctgttttctcaggttagtaaatgatgttcctctagacctatttcacatatggagcagctttttatgacctccagctttttgtaagtgcctcactaacagctcatggtgtaaggtgaccatctcctggaccccctcactgcatgtatggtcattaaagccccagctcgcaggtatttaggcctcttgctgcggtggatttctctatgagccccttggcctcagcttccatacattgacctaacttccacttccctctgtttctggtacctggagatttctactttatctaggttttagatgatatttttgttatcatatttttgttcagtgttttgaagtgtttggatgggaggatgtggtgttatgatatatactagtttttatccatggttcctggctcataacaccccacagcccttgttacagtttttgttgttataatactgggtgtgttaggcctcagaggcagccctctgaccttctgccctcctttcacttaccccaaggcaggactctaatgttccgcctgtgagagtgttgatgcacccaatgccctggaggaaggaatgctgacattgtgaagcttccataaaaacccaggaggaccgggttgatggagcttctgaatagctgaacacagggaggttcctggaggatggtgcacccaggcagagcatggaagggctgtgcccctttcctcatactgccctacacatccgcttatctgtatctttcgcagtattctttatagtaaaccagtaaacctaagtaactttccctgagttctgtgagctgctccagcaaattcgctgaacccaaagacggcgctcttgagcctcaacttgaagtgggtcagtcagaagttcctgaggctcagacttgtgactggcatgtggggaggggcagtcttgggaactagccctcagcctatgggatctgacactatctcagagtagatagttcattagaggacacccagctggtgtctgttgcttggtgtatttggaaaaagcccccacacatttggtcacaagaagtcttctgtgttggtgattattatggtgtgagagtggaggaaaaacatggttagagagtttttcctatacagagggatatttctacccaatccgtcatactgactgaggttcttaactcctaattaacttaattaaattaactcctaatttaaaagtttattttgggccgggcacagtggctcacgcctgtaatcccagaactttgggaggctgaggcgggcagatagcttgaggttggggagttcaagaccagcctggccaacatggtgaaaccctgtctctactaaaaatacaaaaattagctgggcatggtgttgtatgactataatcccagcactcaggaggctgaggcaggacagtcacttgaacctaagctggggcggaggttgaagtgagctgagatcctgctactgcatcccagcctgggagacagtgtgagactccatctcaaaaaaaaaaaattattttcttatatgtaaaatagaatacagcgaagtcggccgggtgcagtggctcacacctgtaatcccagcactctgggaggctgaggcaggcggatcacttgacatcaagagttcaaaaccagcctgaccaacatggtgaaaccccatctctactaaaaaaaaaaaaaaaaaaaaatacaaaattagtcgggcatggtggtgcacgcctgtagtcccagctacttgggaggctgaggcaggagaatcacttgaacctaggagatggaggttatagtgagccgagattgcaccattgcactccatcctgggtgacaagagtgaaacttcgtctcaaaaaaaaaaaaaaaaaaaaaaaaccacacaaaaaaacagaatacagcaaagtaaatacatgtacattggctcctgcatgtgaaatctcctgctactaagagaatgcgggagagaagaggtctgaataaataataccgtgtgccactgccaccatctggaaccctgcacgcttactgcggtgtctcactctcatctggccaatgttttcagtccagaaaagatctgaatttcccaaccatgctgctccagtccctaaatgctgtcctttagattctctatagtagatcaaaacctcatgctcaactagcatcttaactcacatctatgttgaaaagaaaaaacatgtggaaaagttcctgttgtccttggatatgaagacgatgttctgtttctgctgggcatgcatgtgtacgtgtgtctctaacagtgcagaggtttacagtgagcaattgattctttacttgtggctgattccatctctgggaatgttgatccatatcagtggagcctatttataatgctgaaagcagtctacacaaagatattttccccatagtcattggccttctcctctggcccttttaagagctttatcagtgtccttctatcagtgacaatgggaaagaaatgggctttggagtcaagcagatctgggtttgaatctaagctttgccactaattagatatgtggcctttggcaagttacttaacacctctgagtctaaattgtcttctttataaaacagtaataacaaaatccacctcaaaaggttgttctgaagatcaagtgagataactggaaataatataaccttattataagcattatgttaatgctcacaaatgttagtttcctcccattatctccactctcctattcttattctttcaaagtagaattgtgcttcaggaggtctaatcaggctaggcatggtggctcaagcctataattccagcactttgggaggccgaggtgggtggatcacttgaggccaggagctcaagaccagcctggccaacatggcaaaaccccatctctacaaaaatacaaaaattagccagacgtggtggcacatgcgtgtaatcccagctactcaggaggctgaggcacaaggattgcttgagccggggaggttgaggttgcagtgagccaatattgcaccaaggcactcccgcctggacaacagagtgagactctgtctcaaaaaaaaaagaaggtctaatcagagacacttttggggagtggccgtggttactcctaatatcttgactttttttttttttttttttttgagatagagtctcactttattgcccaggctggagtgcagtggcatgatctccactcactgtaacctctgcttcctgggtttaagcgattctcctgcttcagcctcctgagtagctgggattacaggcacctgctaccatgcccagctaatttttgtatttctagtagagatggggtttcaccatgttggccaggctgatctcaaactcctgacgtcaggtgatccgcctgcctcggcctcccaaagtgctgggattacatgtgtgaaccattgcacccggccatatcttgatatttttggtaatcaatttagatttattttgggcgaatttcctgaaactttttggacagccagtttattttgcttctgtaccagctgttatagccctcccagcctattgttggatctttctgtagagtagctatgttgttacttaagaaccatgtccctcttaaccagaaatatctctttgccttatttgttaatgctcctgccttttaggagataaaaactctttatttcatttttaaagataacttttttttttttttttttttgagctggagtcttgctctatcacccaggctggagtgcagtggtgggatctcggctcactgcaacctttgcctcctgggttcaagcaattttcctggctcagcctcccaagtagctgggactataggcatacaccaccatgcctagctaatgtttgtatttttagtagagatggggtttctccatgttgaccaggctggttttgaactcctagcctcaggtgatccgcctgcctcagcccctcaaagttttgggattacaggcgtgagccaccactcccgacaacgataacattttaaatgaaaagaccccagagagactatgtaacatgtaaatataagctagatccacttctgggactaggttttcccaggagggatcatgaagtccccaagtgattgaggagtaggtgggggtagggaatcaccaaaggggtggctggaggagatagaagaactgaaggtatttttttgagaattttacaagacctaaaatctgcctgtttcacaacagtcatttatctgggccctgtggaatctgtatttggctcagaacatgttgctttttgcaagtatctcatcagaaataataataatgatgatagctatgactattcttttttttcttctctggattttgtgtgtgtgtgtgtgtctgtctgtctagacctctgatcatgacttcttaaggagaggaaaagactatcatgaaaataaaacgtaattggaattatggatttgccttcatgtaaatatctgtggctcagagcacaaaaatagcttttccattgcagagctaagtcaggagtttcatgagaaattgagcattgatgatctaatttaaaacagctatggcccagaaattcagagaaagggctgacacattggcctctgtttatacctttgaatattttcttcctagcttatggtaactcatattcagggacagtttggagggatgataaggccataagtttttttggtttgttttcgttttttgttttgttttgtttttttgagacagagtcttgctctgttgcttaggctgcagtgaaatggcatgatcttggctcactgcaacctctgcctcccaggttcaagcgatcctcctgcttcagcctcccgagtagctgggattacaggcacccaccaccatgcctggctagtttttgtatttttcgtagaaacaggggtttcaccgtgctggccaggcttgtcttgaactcctgacctcaagtgatccacctgccttggcctcccaaagtgctgggattacaggcgtgagccactgagcccggccataaggtttgatgctacaaaccttgtttttgttggcattggtttaatgttaacacgaacgtagagaaaaattttaatctcaatcctttgcaaccaggaatccctcctagtgtagctccaggcctgttgctcatttgtggcttgaggcagagccttatacattttgtgaaactcccggtgactcttgttagtcttggtttcagcagagggtgcctaattgaggtcattctcagcagcacactggtggtcaggtgctcctgattttcagaaaaaattaccttgtttaaaaaaatgtgatcaggctttcctgggaattgtctgataggcttggacttgcctaggtcaacatttttattcggtaaggcaggaaattgttgttttaggcatctgacatcatctttatcaatcacctgactataaactccaagtgagaatggctttataacacatgtgatggggtttcgccagctttcaacagcccctgcttgtcggtattggcctcctctgcacccacatattcccatctctgccagatgttctgacttaactgctcacatgtgtgcaaccacacgggcgcgcacagaccccggccagacatgtgtccctgctacaaactcctgcccctagcggctggcttgctgtctgtctaaccagaggggccatctttccatgattctttcgagggctgcctcagtcactctctgcctttggagacggagacacagaatctcctcaccagacaggcgctggctcctttagtggtttcctcatctgcctgtgctcctcactctccatggctatgtatcacctagttcctttaaccttatccttcctggaacttttctgtttgtcttctgatttgttactttgcttggacttgacttctcagtccttcccagcactgacctcactttgtttaggacttctctacctccacccctttgtgatgtatgtggctcaggcattcagcccccacttaatgagcagctgctctgtttcaggtacctacatatcacaattggtcatgatgctaaggctgacattactttctggggccaccaagtcactgtggagaatgatgagggtgatgttgcagttctgcaaagctttggggaaatttccccatgctgtgggatatgtatatgaaaaacaattctttctctcctcttatatttcatacttaaaaaataaatgtgtaggggcagagttgtcaggtttcaaccctcatgtcttacctgagttcctgccatagcctcctatctgacattcttgccattggccttgccatcttccggtctgtccttcactctttctaaaattctgatttgaccctgtttattgtctcttttaagtcttttcactgcatcctcattttcttttggataaaatcaagctctatcgtgagacagaatggcttcttcgacctcacttgcctgtagttctctccctgtgtcacctgcattaactcctggctccagcttggctgtctccctgcagtcaggctctctcctgcctccctgtctttgcacacacactcagctctgtgcactctgttctgcctgagcatatcagccttcaagatttagctctgaagctcatgtttccatgaggtgtttggagttctccaggacctgcatctttgtccccccatcacagttatggacacttgccaccatcattcctgccaatcttgattaggcatctggctttgtgtcccacagaacactggatttgtctttgtcacatgaacaaagtacttcagaattgtctcctagacagaaaatgccctaagctaaaggactatgatgtgtttttacttgcagcagtgtatagcatagttttaagagttgtcagttattgctattgctgttgaatgaatgcatggaagaattattatttttagagatggggtgtcttgctatgttgcccagtctggtctcaaactcctggcctcaagcaatcttcctgctttggcctcccaaaatgtggggattacaggtatgagctgctgtgcctggctatacaagaatcaattcacacacacctttcaccacattgcatgaacacacaccaagacatagatcccaatgggcagcttacttcaaatcttactgagaatatttacaaagcacatagtaggtgcttagtgagtttctgttgagtcaaataaagaatgaatgcacatccacacaaactatggaaaatatactcagaagagaggcataatgtaaccttacttccttttaactacagaaagaatatggggctggaaaataagattagagctcatgtttatcttctcagctatgttactccaaatgaatcagttgatctctctggactcttatttcctcatctctcaaatgaaatgttagaaaagataatatttaatgcccattgaacagtctaacttcaatcattattaggcttaaagtcaaatgaccggtgctttacattaagtggcatgaatttgggactctgatttttaggcctcaccatggagtgtgttcatgacaggcccttagcactgggcagagctgcaaagatgagaccaagagatggaccagagttcgcctaaagtgaggcaggaggccacaacctagttgttaagcaaacatagagctacgaggcatggccaggatgagaagccctgaggcggggatagcagtcagtgtcccatggtcgtgcggggtcaaagctggcctgagatcaccaggaaacaagtgtggaagcaggctgggcagtgtgctttcagggatatgctgaaaatgtgccctgctctcagggaagacttccagaaatctctgtgaaagccatcaatgccagctgtttgtctcaagttatctgaagggtggtcaagtgaaaagtgtttagatttagttgatgtctcccggagcatagatagaagccgggaggaggttaatttgcggttaataggaaggagaaaagtttaatcttgtctacatgataatgagatgaactcacttatacagtaatgaggtctccttcattggaagagtttacgcagcacagggtaattcctcatcaggaacattgtattagggatttctgaattgtgagcattgggctagatgcgttttaaagtttttttctgcttctcatgtccttaccaaatcaagtctaggtaaacactttcagatcccatagcccttccttttgtgaaatgatctcagcatgccctgatgtcctggtgaccagcctttggtaactctttagtctttgaatgtcccccttaaagtggagctccttgaatgggacctcatgtgccaggatgtggcttggccagggcctttctagggacatgacacaatttttacaggtagtggacttcatttattatttcctcatctattttctcgctctgacctgagctgtaaaagcacatagcattgagccttggctgcttctgctacatgcttatgccacctcaggtgatgggagacttcctttccttccattccacttttgtctgctggggaccctggggtaaatgtaatctagacagtgactctgaggctctgtactgggaacttccatggcattccattcttgctttctcaagagcctcatactttatgccaaatgcttgctttctctgtcttttgtttcctttcttctttcatttttctttttttttttcttttttttcttgagacaggtctccctctgttgcccaggctggagtgcagtggcgtgatctcggctcactgaagcctccacctcccgagttcaagtgattctcaagccccagtctccagagtaactgggattacaggcgtgcaccagcatgcctgcctaatttttgcatttttagtagatgtgggggtttcaccatgttgcccaggctggtcttgaactactgacctcaggtgatctgcctgcctcaccctcccaaagtgctgggattacaggcgtgagccaccatgcccggcctcatttttcttttttatctcttccttctaaaccctccatgcccactgaatactacaacatttttactgcacagtgtttttcttttcaaactcttggccctcttggtatccgagtgaataggaatgtgggcggcttctaagctcctttgtgcacatgaagaaaaatgcccagagaagttagtgacttgcttaatttactggcagagtcaatgagcccggaacccacatttcttgatttccctcaccgcctctgtcttggagatcacagtgcatttgctaatagcactggagtcacaaagaacagcaagctgttttccctctgtgtggtcattgtaccaaaagaatttatccgggaaacaatcccaggcctccatagactcagtaagaccacactaaagtaaactaaaaagagtaacaagagcagaagaatttatcaagtgcttcctatttttcaaagaaactttcaagtccattgccttatatgatgctccctgaagcaccttaaggtagaagaacccgcaggagcctccttttgtaagtaaaggtcaaggatggagtccaggcctggggtgggtagaggaggttgctggtccacaaaccttccatggaactatgcttcagaaaaccagggaaagggaatgaatgagttgtttccatctggtatcaaagatgtgggtgccctgaggacagacctagggttctggtttgtcagtggttcaagaagcatcctaggccgggcgcggtggctcacgcctgtaatcccagcactttgggaggccaagaagggtggatcacctgaggtcaggagttcaataccagcctgaccaacatggtgaaaccccttctctactaaaaatacaaaaattacccgggtgtggtgatgggctcctgtaatcccagctacttgggaagctgaggcaggagaatggcttgaactcagggggacagaggttgcagcaagccaagattgtgtcactgcactccagcccggacgacagagtgactccatctcaaaaaaaaaaaaaaaaaaaaaaagagaaaagaaaaagcagcctaggtccaggtttggaggtaggaacctggctgggggtgggtggggtggtgggaccgactcttgtcctcaacatcaggccagctccagctgagcagtttgggagaatataagtccagacaggagggaagagtactggcttgggaaaccagttgttaagacatgggacagcagggcagtggccccctgggcagtgaggtgacttctgggatctagtagatgctctagttgaggattctgaagtgtggagcaagacttgctctcaccacatgggagtcttgtcagaatcttaggttattcagtcatttattcagcagctatcaacaagtactcagtgaatataaatatatcttaagcatatttatatactgggcgcggtggctcatgcttgtattcccagcactttgagaggctgaggggagtggatcacctgaggtcaggagtttgagaccagcctgatcaacatggtgaaaccctctctctgctaaatacaaaaaattagctgggcatggtggtgcgtgcctgtaatcccagctacttgggagcctgaggcaggagaattgcttgaacctaggaggcagaggttgtagtcagctgagattgcaccattgcactccagcctgggcaacaagagtgaaactctatctcaaaaaaaaaaaaagacaaaaaccccacatatttatagtgtttcttatgaggatatatatgtgtgtgtatatatatattatatatatatatgtatcttatatatttactctttttaatgcacataaccaaaccatgggaatatgtaatattattctctattttatgaattaggaaactgaggctcaaggatgataactggttagctcaaagtccaaagttcctgtcttctgaattctttcactgatgtttatagctgctttccacatgttaagcagttcctaaatttcaaggtgtatgcctggaagaaaatagaggaaaacaccttcagagttattgctcaaggcattactttatctttagggactggaaaacctaaacacataactgaaattcaacttgagtcctttttgttcaacctctaagtgagcaattgtatggttggcattcactctttttcttttctttttacttaaaaaaaattttttgtaactattttttctttcttttactggtttctgtatttattattattattattattttttcaacttttagatcattttagatctaggggggtacatttgcaggtttgttacctgggtggcattcactctaagccaatcaagaacaacttcttcttaaacctggaattaacatctatgctctggtgtgtcctgacttgtgtcaggcaccctagttatgtggccaagtggaacatcgcaacagggagaatgggttggactatagatgggtgtttcctgggtaaatttgttatgggtgagaggcttggggacatagtgcaacaaatctgagtcctcctgcagtgaaggaaggtcatgccccaatgcttccagggctggggtatgcaattgagctcatagttcaagttcccttccctactttccatggcctgtgccatgaccaagggccaagcccctctgaccctgcccctgcccctggccttgtcttgttggctcagcttgatgccctagataccttcctaaccttcagatggtaaagtctctgccagctgtggctacctgcctgattctggggacggggcgctttgatggagatcctgagctgtctggaagtgaatttttctctgacagaatgtccttttgctgcttcctctccctttctttcccagccagaagcagttagtctcccgcattttccttggcatggctcttgccttgcaaggagcatgtaaaaaactctgggatgagtcagaacctggctgaagtgtcaggtacatttaccaaacattgattggactccaggccctcagcctatgccagggcagagaacccaggcatgaataagatcctatcatcccctgtgctggagttgctcccagcctagagacctgaggagacacccagcccactgtgacaagtgatgttgggagctccaacccggattcctggtcagtcaccaacttcacctactctgagggttagttcctggtgtcctgtgttttgggtggactctccaggtcctgacatctgccgtgggaacccagctctgctttccatggctgcattgcctgctgctccagtgatctgttgctgcagagcagctactccaaaatgttgaggttttcatcagcagatgaatggataaacaaaatggggcatgtccatgcaatggaatattattcagccttaaaaaggaatgaaatattgatgtaagcttctgtatggatgggccttgaagacataatgctatgtgaaataagccagacacaagaggacacatactgtatgattccatttatatgaggtacttagagtagacaaattcatgaagacagaaggtagagtggtggttgcaggggctggagagaagatgaatgaggactaagtgttttatgggtgcagagttttagtttggaaagatgaaaaagttttagaggtggatagtggtgatggttacacaacaatgtgaatgtatttaatgccactaaagtgtacacttacaggccgggtgtggtggctcatgcctgtaatcccagcactttgggaggccgaggtgggcaggtctcctggggtcaggagttcgggaccagccttgccaacatggtgagagcccgtctctactaaaaatacaaaaaaaaaaatttagcagggtatggtggcaggcgcctgtaatcccagctactcaggatgccaaggcaggtgaatcgcttgaacccaggaggcagaggttgcagtgagctaagatggcaccactgcactccagcctgggcaacagagtgagactccatctcaaaaaacaaataataataataactaaataaaagtgtacacttacaaatggttaaaagggtagattttatgtatgttttatcacagaaaacatgtagaggttgaaaatcacaatttaatattttctcttctggttctatgggttgactgggctcagctgagtggttcttgcttgaggtttctcatgtagttgcagcctgatggcaaatggacatccaaggtggtgccttggagtggctgctccatgtggcttctctatccagcaaagtagctgggcttcttacatggcatctcagactctgacaagtcagaaacggaagcttctgggtcatttcaggggtatgactagaattgtcacaacatcatgtttgctacattgtatggtcagagcagtgacagcgcccaccagatccaagaggaggggaaacagagtcttcctcttgatggaagaggggcaagatgacatttcagaagagcagggtatgaaagatattgttgctgtgccttggaaaacctccggcctgaaggctcaagagtttagacagaaaggcagcttcagggggcaaatacctctctgtagacccttcccttcccttctcttcccttcccttcccttcccttcccatcccgtcccatcccctcccctccgctcttcctcctccctttctctctctctctcgtttgttttgttttgtttttttcctgtcctgtcctgtcctttcctctttcctttttttgaggtggagttttgctcttgtttcccaggccagagtgcaatggcatggtctcggctcactgcaacctctgcctcccgggttcaagcgattctcctgcctcagcctcccaagtagctgggattacaggcacatgccaccatgcctggctaatttttttatttttagtagagacacagttttatcatgttggccaggctggtcttgaactcctgatctcaagtgatgcacctgcctcggccttccaaagtgctgggattacaggcgtgagataccatgactggccttagaccccttcttaggagaattgatcctcgtagattgtttgagtttgaagggaccttggaaactgcttgatagcagtgacttgttcaaacttacaaaggcagagagaagcagagttagaagaaaacctaaatactggcttcatggttcccaggccaggcaaatagctgtggggacttcacccaaaggacttctgtgtgctgtgagcaggaatacaaagtctgttggagagatgggtgtggggagagagcagaaccctgggtggtgtccagtggagaccatccatcaccttagaggtggtgtgagctcctggttgtgctgggctgcatctgttgggagctagtgtgccttgctgagctgggctgtgcagaggcacctgagatgacttgggcttcctgaggaggctgggtgttactcctttattttattttatttatttgtttatttgtttttgagacagagtctctctttgtcgcccgagctggagggcaatgacacaatctcggctcactgcaacctccacctccctggttcaagcagttctcctgcctcagcctcccaactagctgggattacaggcgtgcaccaccatgcccagctaattttttgtatttttaatagagacggggttttaccacgttggccaggctagtttcgaactcctgacctcaggtgatctgcctgcctcggcctcccaaagtgctaggattacaggcgtgagccattgcgcccggccttttgcttctttaaattggactcagagttgggaggaaagaggttagcctgccaggggctcaagcacccaaggttgagacttagagatctgtaaatttacatataggctaaggtcgaaaatgtcagttggcacatccagtcattggctcccacgtatgcgtttctactcaaactttaagtgcaaaattttttttttttttttttatttatttatttatttttttattgataattcttgggtgtttctcacagagggggatttggcagggtcatgggacaatagtggagggaaggtcagcagataaacaagtgaacaaaggtctctggttttcctaggcagaggaccctgcggccttccgcagtgtttgtgtccctgattacttgagattagggattggtgatgactcttaacgagcatgctgccttcaagcatctgtttaacaaagcacatcttgcaccgcccttaatccatttaaccctgagtggacacagcacatgtttcagagagcacagggttgggggtaaggtcacagatcaacaggatcccaagacagaggaatttttcttagtgcagaacaaaatgaaaagtctcccatgtctacttctttctacacagacactgcaaccatccgatttctcaatcttttccccgcctttcccgcctttctattccacaaagccgccattgtcatcctggcccgttctcaatgagctgttgggcacacctcccagacggggaggtggctgggcagaggcgcccctcacctcccggacggggcggctggccgggcggggggggctgaccccccccacctccctcccggatggggcggctggccgggcagaggggctcctcacttcccagtaggggcggccgggcagaggcgcccctcacctaccggacggggccactggccgggcaggggggctgaccccccccacctccctcccggacggggcggctggccgggtggggggctgacccccccacctccctcacggacgaggcggctggccgggcgtggggctgacacccccacctccctcctggacagggcggctggccgggcggggggctgacccccccacctccctcccggatggggcggctggccgggcggggggccgacccccccacctccctcccggacggggcggctggccgggcagaggggctcctcacttcccagtaggggcggccgggcagaggcgcccctcaactcccagacggggcggctggccgggcggagggctgacccccccacctccctcccggacggggcggctggccgggtgggggggctgacccccccatctccctcccggacggggtggctggccgggcggggcgctgacccccccacctccctcccggacggggcggctggccaggcggggggctgacccccccacctccctcccggacggggcggctggccgggtgggggggctgacccccccatctccctcccggacggggtggctggccgggcggggcgctgacccccccacctccctcccggacggggcggctggccaggcggggggctgacccccccacctccctcccggacggggcggctggccgggtgggggggctgacccccccatctccctcccggacggggtggctggccgggcggggcgctgacccccccacctccctcctggacggggcggctggccaggcggggggctgacccccccacctccctcccggacggggcggctggccgggcagaggggctcctcacttcccagtaggggcggccgggcagaggcgcccctcaactcccagacggggcggctggccgggcggagggctgacccccccacctccctcccggacagggcggctggccgggcggggggctgacccccccacctccctcccggatggggcggctggccgggcagaggggctcctcacttcccagtaggggcggccgggcagaggcgcccctcacctcccagacggggcggctggccgggcggggcgctgacccccccacctccctcccggacggggcggctggccaggcggggggctgacccccccacctccctcccagacggggcggctggccgggtgggggggctgacccccccatctccctcccggacggggtggctggccgggctgaggggctcctcacttcccagtaggggcggccgggcagaggcgcccctcacctcccggacggggcggctggccgggcggggggctgacccccccacctccctcctggacggcacggctgcccgggcgggggggctgaccccccacctccctcccggacggggcggctggccgggtgggggggctgacccccccatctccctcccggacggggtggctggccgggctgaggggctcctcacttcccagtaggggcggccgggcagaggcgcccctcacctcccggacggggcggctggccgggcggggggctgacccccccacctccctcctggacggcacggctgcccgggcgggggggctgaccccccacctccctcccggatggggcggctggccgggcggggggctgacccccccccacctccctcccggacggggtggctgccgggcggagacgctcctcacttcccagatggggtggctgccgggcggagacgctcctcacttctcagacggggcagctgccgggcggaggggctcctcacttctcagacggggtggttgccaggcagagggtctcctcacttctcagacggggcggccgggcagagacgctcctcacctcccagacggggtctcggccgggcagaggcgctcctcacatcccagatggggcggcggggcagaggcgctccccacatctcagacgatgggcggccgagcagagaggctcctcacttcctagatgtgatggcggccgggcagagacgctcctcactttccagactgggcagccaggcagaggggctcctcacatcccagacgatgggcggccaggcagagacactcctcacttcccagacggggtggcggccgggcagaggctgcaatctcggcactttgggaggccaaggcaggcggctgggaggtgtaggttgtagtgagccgagatcacgccactgcactccagcctgggcaccattgagcactgagtgaacgagactccgtctgcaatcccggcacctcgggaggccgaggttggcggatcactcgcggttaggggctaagtgcaaaattttttgttaaagcctttggtagtctttgaaattcaataaagttcacaagtattttgcaagcactccccatagacttggagacttaaatattattttttgtgtgctgaagtttgcttttgagactaagacattactaaagttaatgccaatcttttataactgctttgtatataggaccttaataaagaattttaaaaatctgtcaggtgcggtggctcatgcctgtaatcccagcactttgggaggctgaggtgggtggatcacctgaggtcgggagttcgagaccagcatgaccaatatggagaaaccccatctctaccaaaaatacaaaaattagctgggcttggtggcacatgcctgtaatcccagctactcggcaggctgaggcagaagaatcgcttgaacccgggaggcagaggcggcagtgagccaagatcgcaccattgcacttctagcctgggcgaagagcgaaactctgtctgtctcaaaatagagaaagaaaaaaatctttctctattttgagtattgttcaagttgttacgtatttatacacatatatatcaatggaattccgtggaagtagagaggaatagaagcaaacatgctgttgttatgttatctgtaattcagcagtacttgcctgtgtccacagtgatgtggacatttccaggtgagcatgatggtcagcaacagcctaggactggccatggacaaaccaatatgcatttgattttgtggcacacacacaatactgctaatctctgctcagtggcttgtggcccagtttaggcagccagagaagagatctgccatagctatgatcacagtgtgtgtaattggattttgtatctgcttactggggtgaataaagccaggtgggagaaattcttttacactggcgttaactggcacataactcaaatcaacagaaacatgagcagagggtatagtggcaaagggcttgtttgctgccctatgtctttactcaagcagatgtcccttccccatgaagccttccttgctcctgagccagggctgcatttgatactgctcattcctaacctcccagtgcactttagcagagaaggatgagcacattttatctttcatttgttgttttctctggcctttcctacaaggttataaaagccttaggagcaggcatctatacaggttgagtgtccctaatccaaaatctgaaatctcgaaagttaggaccttttcgaatgctgacctgaggctgaaaggaaatactcattggagcatttcagattttggattttcagattagggatgctgagctggtaagtataatacaaatatttcaaaatctgaaaacatctgaaatctgaaacacttctggtcccaagcgttttagataagggatattcaacctgtagtaacaagagcttctatttaacatctcccccatgtacctggcattttacagatgttactttatttagtatgtgcaagaatcatttaacataactgtcttactcccttgagcttgctataacaaaaaatagcttagattgagtagcttataagaagagaaatgtcttgctcacagttctggaggctgggaagtccaatatcaaggctccagtggacttgatgtctgctgaggtcctgttcctcacagatggcaccttctatgtgttctcagatggcggaagggacaaacaagctctctggggcctctttgataaagacactaattctgttcataaggtcagagcccttatgacctaatcacctcccaaagggcccacctcttgttactgtcacattggggattaagtttcagcatatgaattttgggagacataaacatccagagcataaacgtaactaatgttatccttgtttcacacctgagaagacagaggctcagggaattgaagtaacttgctccatgtcactgctaggcagtggcagggctgggattgaaacacaaatctctctaacttctaagcccttttcctaccataccaccagggaatcagacctctgcagtttccatggtgcttaactcagaacccagcacttaggggatgtggtctttgctgaatgaataagcaggggatgtgtgatacaagaatttgtaccagaacctttggccaacatttccccaaggcccagcatccaatggtagagatcctgggtgactctctgtagatggtggtccttcacttctcatataggccattccaatctgaatgcagcttgttttgtgtgtgggaaggaattacgttttagggtattaaatatcctttctgggccatttagttacttgtctcctctcaaaacactaaaagcaattacatggtaattaagataaattacttgaccaattttcatagcaaactgattggtttcacttatccccccactgaactgttaagacctggcgagatcctttttatagttctttaaacttccaggactttctgcttatcttcaggaaggacagtggaccttcaggggagaggagaaggaggaaatttgcatatttaaaatgtgtgatctgagccaaacgctcttcagctaacttgatctcgcatcattttcccagcttcctttgagaattcagaatcaaaattcaggcatcaccatctagtgaccacagggtcctgcaccccagcccaaacctggggaccccttagggataatgccctttctcatttgtctttgagtgccctgctctttccactgaagagcccacagaacacagatgccagcaggcagccctgaaagcaggccttgtttgcaggtctttgcctgaacgaagcctgcttgtctgcctccttctgaaggccaggggtgggctacattttttggagagtaggaagcccaggggtcctcttcgtgctgctcctgagaacagaaggtagatagggtatgaagaggcagccgttgctagggctgccagaaaccagtccacccaggaaacaacacagctccacagctgcagtgagcacagctgcagaaacccaggagctgggcgagagggtgggggttaagatccaggcctctaccccaggccccagcatccatgctgggcaagcaggccacgtgctcccttgcttccagactggcagcctagcctccttgaaattggccctcactttatccccacccacctaatcagcaagccccaaagtctccccttgtctctgctctctgctgttcttctagggcccatgagggaacttttctgccttgggggctcctccacctcctggtttcaccttagctttttgtgtgtgtcttactttctccttttcatttcctcctcttgtaaagtgacccagccctggggctttacccattgtcttgcattcagctctcacagcgctgaaagacctccactctctacctctagcccttggttttctctctggatactgcctcttgtgtctagcttcatgaatgaggcttccatgtggacatacctcagacctgaccaatgtgcataaaaccagctccctgtcctgtctctcctgtggctccactagtccaagggccagatgccccactctcctttgttttctagattatatttggtgtacaaatcccatcaaggctttacaaatattcttttatctgccctttctcccttccgatttccatctcggaagtcagtatactatagggcaaagtgcagaatttggggctatggacagggttcaactctgatagcatcattttctgattgtgcgaacctcaggaaaatcatcaaatagaagcctctgattcattatctacgaagcagacacatacagaagggtggatcccagctcactgacctccttgcttttgacattttggactggaaaattcttgttgtggggctgccctgtgcattgtagaatgtttagcagcatctctggcccctacttactagacgctagtagcattcctgattgtcagttgtgacaatgaaaaatgtctccggacactgccaaatgtttcctggggagttaacttgctcctgtttgagacccattggtacagagtaatgctaagtcctgggtggtggtaatgaatattaacccaggttttcaggttttcacctttcagtcgtcagccacatgtatgaagttcccacattacttttattttttatttttttgaaacagagtctcactctgtcacccaggctggagtgcagtggtgcaatctcagctcattgcaacctctgcctccccggttcaagtgattctcgtgcctcagcctcccgagtagctgggattacaggcgtgcgccaccacgcccagctaatttttgtatttttagtagaaacggggttctaccacgttggccaggcttgtctctaactcctgaccttaagtaatccacccaccttggcctcccaaagtgctgggattacaggtgtgagccaccgcacctggcctcatgttacttttgattagtctttttcccagttagttttgacatctgcaggtgctgttctgacttgcttgattaattagttcctttcatgttacacatttttcaaatcagaacacactgggattgaaccttgatattctgttgtttgagaatgagagaccagttcagagttgttcagaaacctcagaactcccagtggggatgcctgcaggtttgacaccgccttgctgctcagggatcctaggcttgtagcaatggcgaatgctgatttgaacaccctgcccatacttgtgacaagcatttgtttaaagtgcctactatgcagaattttgctaacgttaatttatttggtccttgtgaagtaggtgttacttattttcactttacagaaaagcaaagtgaggccaaaagatacgaagcaacactgcctcagagatgctaagtagaagaaatgccatgagaggccaggtgactttggcatgaaagctggtgatgctaaatctctgtgctcttctgcctttttgggttgagcctttgctgtggctagagcacagaagcttatgaaggaggagctccttttaattgtggctcagaagttgcccatcttgccacctacaggttctgtgggtggagagcagacctataggccagacagatggctggttgagaccatgagccccagcactgtgtccagcacagggaaagcccccattaagggagcttcctccttgataacttggacaacacttggttgaacaacacactggatgctcactttccccagagagaacagcccaagagttcagtgatacttactcaaattgtagatgagagactgactgaccttgccctctgaagtgggaaactgaggagggttcccagaggcctgtgaagggcaggtaaccaggaatggtgacatggtaaggttgagtggagacagactgtggccccatggccctaggcagagtgcacactgggcatcctgcagcattgcagagacccattcccatgggaaatcccctgatttctccaccttagccaggagagtcctggggcctatgggtgggaggcttgagtgttgacagtcagaggggctgtgatgagagctgccaggtgccattctcaatgcccagaggatgctctggggaagaaagccctcacatgtttgccaaggtcaaaagcaagagctcattccagtcatggtctgtgtggaagctctttggtctgctgtcttggaaagcaaaggcagggatgtcctcctacgcggactgctggtctcccaggaaaagaatctgtggctcttacttgtcctgagtgatgctaagaccctgctaagtcaaagaagctgctataggcacagagccagtacccatggtcatagcagacagtgggcaatagaatacaaaaggccgaggtgtccagaggtaaaggtggactgtgtgttccctagtctcagactcttgtgtcttcagcatgctcctgagggttctgaggcacaccctccacgtggctttttttgtttgtttgtttgtttttgttgttgttgttgtttttgagacgtggtctcactgtgattcaggctggagtgcagtggtgtgatttcggctcaatgcagcgtcaaccttccaggttcaagcagttctctcacctcggcctcctaagtagctgggactacagccacatgccaccatgcctggcgaattttttttttttaacttttaatggagatgaggtctcactatgttgcccaggctggtcttgaactcctgactcaagcgatccacccacctcagccctccaaagtgctgggattacaggtgtgagccaccacgcctgccctccacgtgggttcttaaggaaaactacctgtttctccctcctgttagaggcccgtgactggctctgggaaggattgccatgaagagacctgtaagccctttctgataaggatttctcaaaggcatttgaccatgggtattttctccacaaacctattaagttttctccatttagagagatggtatcttcaagaatgtcttcaagtttgagctactatcacaaaataccatagaccaggtggcttataagcaacagagatttatttctcacagttccagaggctgaggtctaagatcagggtactagcatggttgggttctggtgagggttgcagatggctgatttctcattacatcctcacatggcagaaagagagtgagctaggtcctccagtggcagtggcggtgtcttcttcttcttcttcttcttcttcttcttcttcttcttcttcttcttcttcttcttcttcttcttcttcttctttcttcttcttcttcttcttcttcttcttcttcttcttcttcttcttcttcttcttcttcttcttcttcttcttcttcttcttcttctccttctccttctcctcctcctcctcctcctcctccttctccttctccttctccttctccttctctttctccttctccttcttcttcttctttcttatttcttcttcttcttcttccttctttcttcttcttcttcttccttatttcttctttctttctttctttctttttttttttttttttaagatggagtctcactctgtcacctaggctggagtgcagtggcacgatcttggctcactgcaacctctgcctcctgggtccaagtgattctcctgcctcagcctcctgagtagctggaattacaggcgtgcaccaccacgcccggctaatttttgtatttttagtagagacggggtttcaccatgttgggcaggatggtcttgaactcctgatatcaggtgatccacctgcctcagccttccaaagtgctgggattacagacgtgagccactgtccctggccctccggcttcttctttttttttttttttttttttttataagaaggagtctcgctctgtcgcccaggctggagtgcagtggtgtgatctctgctcactgcaagctccgcctcccaggttcatgccattctcctgcctcagcctcccgagtggctgggactacaggcgcccgccaccacgcccggctaattttttgtatttttggtagagacagggtttcaccatgttagccaggatggtctcgatctcctgacctcgtgatccacccgcctcggcctcccaaagtgccaggattacaggcgtgagccaccgcgcccagcctccgacttcttatacaggtactaatcctattcatgagggctctacactcatgacctcattaccttctaatggccccatctctaaatatcatcacattgggattcaggtttcaacataggaattttgtggggacacaaacattaagcccataacaaaggaggatccctgagcagggaattgggcacagggatctaagacagggaattatattatcagatccccagggcagaatacaggcatggtcataagttaggcagaatggagacacagttctagaaaaagattcatagcaagttgtcttgatggtaaaccaaggtccagagttgggcctctttagcttcctcctgactggagaaagcaggtgttctaaaggctagagtagggacagaggaggagaaaggaaaactaacatatatcgagtacatttatgaggcaatttacatatgaggtaaaattaatattaccattttacagatgaggaaactgtggctcagtgacctgcttagcaaatttctatagcatctatggcagtgacatgaacatggtatggatacatcatagaaatgtcatgataataaggataaaattctaaaatccgaatacccacccaactccaaatcttctctttgttcatgtaatgaccattttctgggactagccagtttgggttggattctgttcatattactgtcaaagataaacacagctggacattagttaaagtggtgagaatagatttttaattggtaataactattgcaacagggaaaagagtctagcttgaaccaaactcaatttccatttgtacagaggtgactgggcatattagtttttatttttttgagatggagtttcactctgtcacccaggctggagtgcagtggcaccatcttggctcactgcaacctccacctcccaggttcaagtgattctcctgcctcagcttcccaagtagctgggattacaggtgcccaccaccacgcccggctaatttttgtatttttagtagagacggggtttcaccatgttggtcaggctggtctcgatcttctgacgtcaggtgatctgcccacctcagtctccaccatgcccggctaatttttgtatttttagtagagacggggtttcaccatgttggtcaggctggtctcaatcttctgacgtcgggtgatccgcccacctcagtctcccaaagtgctgagattacaggcgtgagccaccgcacccgacctgtgactgggcattttaaagggagaatgagctcaagggagtcagggaagtgaaaaattacaaaaagtgggaaggaggggttggtccatgtgaaatccatctgggtttgcaaactggcatttatcaaagttaggctcctactctcccactgacgctagagggaccctatcttcaggcattgattgaaacaaacattgaattcttcaggcagccttgcgttttctcaggcgggcactttaagaggggctggtgttgtggtggtgtggcctcgagccattggaagcaatattagtgtttgttcaagtcgttacaggctgaagttgaaaggcctattcaagaagcagactctgagcctggctagaatttggtcaaagagagaatctatgtcactattctctaaatttaggaaatgaacagattattagaacaaggtaaaaaaaaaaagttggcacccaagtttatgctggaaaaatgaaggttaaatgccgtaggggaggggcagtgttagggaattgagctggaaccagcactgacaatatttgaaagcatggttaggttttgctgtggtttaatattttacaaatgttattccctgtcacatagctgaactaaataccccacatgtttgcgattaagcattatgagctgcagaacatatgtgctaataatatggttcatgcagcctgtgggcacttctcccatgacctaagatgaaggtgaggctttttgattttccttaaggtattgtgttttctgatgattcctttttgttccaaactttcgctttcccctttagaacgaagccttttacaggaatgatattttatttttatatatttattttttttgagatgcagtcttgccctgtcatccaggctggagtgcaatggcgcgatcttagctcactgcagtctccgcctcctgtgttcaagcgattctcctgcctcagcctcctgagtagctgggattacaggcgcccaccaccgtgcccggctaatttttgtatttttagtagagacggggttttgccatgttggtttcggactcctgacctcaggtgatctgcccgcctcggcctcccaaagtgctgcgattacaggcgtgagccactgcacctggccaggaatggtattttaaatactgtcatagcaagcccttaagaaaattcttcacagctgcatgttaacacactggcctgtccctgactttggctttgtttccaggatatacagttgtttctggaatgtacagtagctagattgcagccctccaatcatacaaaaacagactgagggtttggaaatgctgctaaagtctagttacagtgttgctcttgaggagtctggcgctatagggagtctgagaattccttatttgaaaaacagccaatggaaccgcacagacacactgaaattaagacattctttctgtagattatgcagcattgttagagagcaaagaaaagccacaggaataaaggactcaattcagccctctgctgaaggagagggtgttcctgaggcttgagtaggaattgacccaacagggacagtttggttgggctgataccaggaggctactgagaggtgtcgatgatgccttcctgagctctgctgaatacctccttggcatcagtcctcccccaacatctagcagaaacagaggagccagacattagggaccacattggggcgtgcttttccccacagatgcatactgaagtggggacaaagtcttcagctgccatatgacctggattgctgtttcacctatcacatgcatctaatctgacttcaacaatctacaggagaaggtagaacttcatatttacattttatttgagtggtttatgaagaaaagtagaggaaaactgcaaagaacggcagaagtagactcttgaggttggaggggagtaggggatgatggtgtgggagggatgaactttgcagggagttacacaaaatttggaaaattacagagaatactggaatcgccactaaaagagaggcagggcacctaaatctatttattagacaacaattctgagaaattattcatcactaagggcaggacagtcagttgatgcagtcaagaaggggcaggaaatagggcgagctgagttatgaaagccattctcagaaatgacccaaatttgtactgagctgttgttcttgagcaaccttggggaaaattatcagtctgcttttcccacagcctgatgtccaaggggcagatacgtgtggtgggcttgctggagaaataggctcttctcacgtgagaacagcatccttccaatctagagctcctggctccaggaagtggtggtggctctaccctggtgctatttcattagtgaagggtggggtggtggaaagtgcagaaaaggcaggacccctgacaccagcaaggcattggatctctctggacctccgggtggtggactttgggactggacagacctggtcacagtctaggttctacatcttactggtcgagcaactttaggcaagtagcttaactcctccgaacttattttccttttctaccaaataatgataatattacttcatgagtttgtgagtattaaatgagatcatgcatatacagcctacagcccttagcacaccatgaacacatagttatttgataaatgtttgttagtgtggttaattgaacagaaagccttaaatgtcttcctaaccctaaaatccagtgattctttgaactggggagggcagtagagagatttaatttgtggaaaaatgaaaagaccatttaaaattattcaatcagaaatgtattaagctttgtgtatttgtgtcaggcatttgtagacagtgtggaaaatgtcttatccaatgattctttgaactgggagggaagtagagagacttaatttgtggaaaagtgaaaagaccatttaaaattattcaatcagaaatgtattaagctttttgtatttgtgtcacaggcatttgtagacagtgtggaaaatgtcttaataaatgagacatgctctttccttgaaaaagcttcagtctgactcacaaagagtatatgaattttttcctatgatggcttgaaagattttatcttcaaattcctttttgtgagattgtttttccataccagtgcttcttatttatagggcttgttgcaagtaatttgcaatattgttacaggttgagtatcctttacaccaaatgctcagaccagaagtgttttagatttttttggattttggagtatttgcatccccaaatctaaaatgctcaagtgagcttttcctttgagtgtcatgttggcattcaaaacattttgaattttggagcaattcagattttgtgtttttgaattagagataatcaatttgtaataatatttaaggtattgctgtttgtgaaagatgtatttttaaacgatttagagtcaattcatgataatctccgtaatactcttacaagaattccaggctgggcatggtggctcatgcctgtaatcccagcgcattgggaggccaaggcagacagatcacttgaggtcaggagtttgaggccagcctggccaacatggcgaaaccccatctctactaaaaatacaaaaattagcagggcatggtgatgcacatctgtaatctcagctactcgggagcctgaggcaggagaatcacttgaacccgggaggtagaagtgtagtgagctgagattgcaccactgcactccagcctgggtgacagagtgagactcagtctcaaattaaaaaaaaaaagaattccaatatgatttcttaagtgggagaaaggggtggattgtacaaactgtgtgcaagtgcaacctttgttcgtgttttgtgtgaaccctcctattgctgatcaccacttaaaatggtagggacaattagttagttcagggcttccctaaatatggggagtgctaaattctgggtacatccaagagcacgtgctaggcttttgaatgccatttgtcacacatattgaggtctaaggttgcaaaccattgtatactagatccttgttattcctggtgtgaataggcatgtgtgcctacttttaatttcttcttgagttcagtgctttgaaaacagacagctgaagaaaatgtctaatagtctaaagaggaagcaaacactttcctagaaaccttcgaaactcagaaatggatttctagaaattctagccataatacatactccttttctttctgggcctcattcagaatcttgatgtctcaactgtctctgagttttttttttttttttttttttttttttgtctttccccagacagagtcttgcactatcccccaggctggagtgcagtggagtgatcttggctcactgcaacctccacctcctgggctcaagcgattctcctgcctcagcctcccgagtagctgtgaggagcaccaccacacccagctaatttttgtatttttggtagagacagggtttcaccatgttggccaggctgctcttgaactcctggcctccagtgatctgcccgccttggccttccaaagtgctgggattacaggcatgggccactgtgactggccttgtctctgaattttgtgtggaattgtcctctaggagtttgcagggtattccagattgaaagtagacctttgaaaagtatggggcatgcaggctgggatggaatccacagctgagggaaaagccagggaatcaaaatagaggaatctttgcttcagaggaaggcagctggggacttggtgccaggagtgtttggttcccagctctgcactaactggatttgagactttggggaaagtgcccagaagctgtggtctgctctggattgtcatgcagtttaaatgagacgttgcctgtgaagggctttctgggaggaacaggtacatatctagaccaaccctacttgtaatgcaggaacaaaacaaaactgaaattacatagatgctgccccttgaatactcttggattccagggtctcaaagtgcatagggtaaagtagcagatgactgaggaaaatgcatctaaacttctcttagccttcttatctctcggagacccaataggcttctaacagaccaaggctctggacagggtgtggccccctttcctatgagaggattaggagggaaggaaagggaaagaaggtgctgcatgaaattgatcttagttgttgactttgtgccaactggctggtgggggttttgagaccagaatagaaagatgaagtcatatagaaggatcagctgaaagaggtaagagaaacggaagcaagtgtaaaaaggattgataggctgggcacggtggctcacgcctgtaatcccagcactttgggaggccaaggcaggtgaaccacaaggtcaggagttcgagaccagcctggccaacatggtgaaaccctgtctctactaaaaatacaaaaattagcctggcatggtggtgggcgcctgtaatcccagctactcgggaggctgaggcaggagaattgcttgaacctgggaggcagaggttgcagtgagccaagatcatgccactacactccagcctgggtgacagaggaagactccatctctggaaaaaacaaaaaggattaataaaggaagatagcaagagattgaagaggggaggaagaggagggcagtgggaagcaggcctcccctcgacaatggggaatcagagctgctgactccagaacagtattaaacttccaggacaaaggtttgggttcctattgggcaccatatgaagttctatttggttgaataaactcacatcacatttgctgagtgcctcctatggaagagtcctggacgggggtgaaaggtggacagtgagggggtaggagtgcactttgcatagatctgggtttcaaggtaggagatgtttgtgtaaggtttgcttttaaaaaattcagggctgcttacaaagtaatgggcttgatttcttttctcctgcttatggaaatcagtttatttgtctcataataagcaaaaactgaagaaaccaacaccactgttgcaaattttgaagctacaaggaaaactgatgaggtgaaatttttggcatacatcagaatcgtattcagtctgaaacggaattatttcctctttttcttttctttttaataaacccaactaaagtaaatattttcctgagctctcacccctataggagggttattttggccttctgaagagggtgagatggagatatagtgctgctgatttcctacctgtgagcctcctcgtgggtcccatcgaaaccctgctctccctgctctgagggaaggtgcttcacagcaacttcagcctaagggcagtgacagtgaaatggcctccagggagccagcagcctgggctgccctccgctgtgtgtttttgtgccctcaggaatgtgtggatgcagcaaatgacaacagtgagtgctctgtccctagcggagccccaggccctgtcactttttgtcttggctggtttccaaggttgaatgattgcattggttgaagcttcattatccacaaggggaggcaagacagtgggctggagggagaaaaataggcctttcccacgggcatgattccagcagggtttgcatttttacatcagtagatctcagggactttcattttctgtcagtttgggccgtttgccctatcccagctacttgggaggctgaggcaggaggatcacttcagcccaggaatttgagaccagccttggaaacagcaggatcccacttctgaaagataaataaataaatatcccagcactaaagcccatgtatttagtggtaatacaatttctgcttttgacagcattttccactggatgtcagccgccatagcatcactttggagttggaaaggaccacagagctcattctagtgtaatccctgaatgtctggagaggctgtgcacacagctagtgagtgacagagtggtgcccagaatttgggttacccaagccccacatcagtgttgtggtccctacacttcactgcctctggtgtcattagaataatttcagtaatttgttgtatcaggttgggctgaagtgacctgtattcaaatcctggtttttccacacctaggtatatactcaagaaaaaggatcacacgaaacttatacacaaatattcagagcagcatttttcaaagtaactaaaaagtggaaacaaaccaaatgtctatcaactgataaatggataaacaaagtgtgatatttccatgcagtggactactcttcagccttgaaaaggaaggaagcagtgatatgtgctaccacatggatgaccttggaaacattatgctaggtgaaagaagccagacacaaaagccatatgttgtatgattcagtttacataaaatgtcctgaataggcatattcacaggcacagaaagtagtttagtggtttccagggcctgtggggaggggagtatgtggagtgactactaataagcatacagggtttattattgggatgaaaagaatgttgtggaatttggccaggtgcagtggctcacacctgtaatcccagcactatgggaggccgaggcaggtggatcacttgagatcaggagtttgagaccagcttggccaacatggtgaaaccctgtttctactaaaagtacaaaaattagccgggtgtggtggcgtgcacctgtaatcccagctacttgggaggctgaggcaggagaatcgattgaaccctggaggcaaaggttgcagtgagtcgagatcgtgccactgcactccaacctgagcgacagagtgcaactccatctcgaaaaaaaaaaaaagaaaagaaagaatgttgtggaatttgatagttgtgatggtttcacaattgtgttaacatactaaacatactaaaagccactgaactgacacttttttaaaagggtgaattcatggtataagaattatatctcagtaaagctgttatttaaaaaattctggctctacctcttactggctgggcgactttaggcaatgaacctaaagccaagtcatctcagctatgaaactggaataataatacacttcacagggtctttttgataaacgagattgtgaatttgaaaatgcttctaaagtgtaaacctcacatatttttggactgtcaatgggttataagttcattataaattggatttttaatcttctcctcctgtgtttttcacaatactaacaaggtctgggtacatagtgatcactcaaataaagatttattgagttgattcaaatgtatttcagttttattcaattgtggtaaatgaaactacacaacaggaaatctactcttttaaaagttttcaactgttaaaaacggtgttatgaacgatatgcacattgttgtacagcaaatctctagaaccttttcatcttacataactgaaactatatccactgaacagcaacttcccatttttacctactcccagttcctggcaaatgccattttactttctgcggtatgagttagactactttacatacttcgtataagaggagtcatgtaggatttgtccttctgtgatgggcttactgcacttagcataatgtgctgaaggttaatctatgttgcaacttgcgtcagaattttcttccttttaatactgaataatattctattgtatgaatatactgcattttctttatgcatccatccatcaattaacatttaggttgtttccatctgttgactattgtaaataatgatgcagtgaatatgagagtgcaaatattttttcaagaccctgttttaaattcttttggataggctgggttctgtggctcacacctgtaatcccagcactttgggaggccgaggagggtggatcacctgaggtcgggagttcgaaaccagcctgaccaacatggagaaaccccatctctactaaaaatacaaaattagccgggcatggtggtgcatgcctgtaatcccagctactcagagggctgaggcaggagaatcacttgaacccgggaggcagaggttgcggtgagccgagattgcgtcactgcactccagcctgggcaacaagagcaaaactccgtctcaaaaataaataaataaataaataaataaataaatgaattcttttggataaatacccgtaagtggattgctggatcatatggtagttctatttttagtttttgtttgttttttttttttttttgagatgcagttttgctcttgttgcccaggctggagtgcaatggcgtgatacccattcactgcaacatctgcctcctgggttcaagcaattctcctgcctcagcctcccaagcagctgagattacaggtgtgcgccaccacgcctggctaattttgcatttttagtagagacagggtttcaccatgttggctaggctggtcttgaactcctggtcttaggtgatccacctgtcttggcctcccaaagtgcctggattagaggtgtgagccaccgcacctggccctatttttaattttttgagggccttccatattgttccccataatggctgcaccactttacattgccagcaacaatgcacaagggttccgatttcttacatccttgccaagatttgttgttttcctttctttttttttttttttttttttttttgagacagagtctcactgtgttgcccaggctggagtgcagtgggatctctgctcactgcaacctctgcctcttgggttcaagtgattctcatgcctcagcctcctgagtggctgggatttcaggcacccaccaccacacccagctaatttttgtatttttagtagagatgagttttcaccatgttggccagactggtcttgaactcctgacctcaagtgatcctcccgcctcggctttccaaagtgctgggattataggtgtgagccactgtgcctggccatattatcctttttttttttttttttaaaagaaaataatggccattctaaaaggtatgaggtgatagatacctcgttgtagttttgatttgcattgtcctgatgattagtgatgttgagcatcttttcatatattttctggctatttgtatgtcttttttggagacatgtttattcaagtactttgccaattactaaattgcatgatttattttcttgccgttgagtttattgagttccttatatgttttggatattaattccttataagaaataccgtttgcaggccgggcgcggtggctcacgcctgtaatcccagcattttggaggcagagacgggtggagcacaagttcaggagattgagaccatcctggctaacacggtgaaaccctgtctctactaaaaatacaaaaaattagccgggcgcggtggcgggcgcctgtagtcccagctacttgggaggctgaggtaggagaatggcgtgaacctgggagatggagcttgccgtgagccaagatcgcgccactgcactccagcctgggcgactgagcgagattccatctcaaaaaaaaaaagaaaaaaagaaagacagaaataccgtttgcaaatattttctcctattctttatgttacctttttactctgttgattgtttcctttgctgtgcagaaacttttaagtttaatggtgtctcacttttctgtttttgcttttgttgcctgtgctttgctgtcatatccaagaaatcattgccaagaccaatgttatgaagattttcctctgcatttttttctcagagttttatagttttcaccgggcgcggtggctcatccctataatcccagcactttgggaggccgaggtgggcagatcacgaggtcgggagtttgagaccagcctgaccaacgtagggaaaccccatctctactaaaaataccaaaattagcctggcgtggtggtgcgtgcctgcaatcccagctactcaggaggctgaggcaggagaattgattgaaccagggaggcggatgttgcagtgagttgagatcgggccactgcattccagcctgagcgacagagcgagactccgtctcataaaaaaaaaaagaaaaaaaaacaggtttttttgtttgtttgttttttgtaggggaggagattcactcttgttgcccaggctggagtgcagtggcacaatcttgactcactgctacctccacctcctgggttcaagcgattctcctgcctcagcctcctgagtagctgggattacaggcgtccaccaccactcccggctattttttatatttttagtagagacgcgatttcaccatgttgcccaggctgatctccaactcctgacctcaggtgatccgtccacctcggcctcccaaagtgctgggattacaggcatgagccaccgagcccggccaaaaaaaaccaaaaaaacaaaaaaccccccagagttttatagtttcaagtcttatgtttaaatcttttatctattttttttttgagacggagttttgctctgtcgcccaggctgaagtgcagtgacacaaccttggcttactgcaacctctgcctcccaggcaattcccctgccttagcctccagagtagcttggaatacaggtgtgtgccaccaggcctggctaatttttttgtatttatagtagagatggggtttcaccatgttggccatgctggccttggacttctgacctcaggtgatccacccaccttggcctcccaaagttgttgggattacaggtgtgagccactgcacccagcctcttccatccatgttgagttgatggttgtgtatgatataagacaagcttgtccaacgtgcagcccacaggctacatgtagtccaggacggctttgaatgctgcctaacacaaatttgtaaactttcttaaaacatgagatccttttttttctttttttaactcatcagctatctgtagtgttagtgtattttgtgtgtggcccaacacaattctaattctcctttttctcctcctccttctccgcttcctctttctcctccttctcctccttctcctccttctcctcctcctcctcctccttcctttttttttttttttttttttttttgatatagagtttctctctgtcgtccaggctggagtgcaatggtgcaatctcagctcactgcaacctcctcctctcaggttcaagcaattctcctgcccaccaccatgcctggctaatttttgggcaggtacccaccaccatgcttggttaacttttgtatttttagtagagactgggttttgccatgttggccaggctggtctctaactcctgacctcaagtgatctacccaccttggcctcccaaagtgctgggattataggcgtgagccactgtgcctggccttaattcttcctccagtgtggctgagggaagccaaaagattagacatctctggtataagattacagtttagtttcactcttttgcatgtggatatcaagttttttcaacaccacttttttttttttgtttgagacaaagtttcgttctccttgcccaggctggagagtaatgacacagtctctgttcactgcaacctctgcctcccgggctcaagcgattttcctgcctcagcctcctgagtagctgggattacaagtgtgtgccaccatgcccagctaattttttgtatttttagtagagatggggtttctccatgttggccaggctggtctcgaactcctgacctcaggtgatctgctctcctcagcctcccaaagtgctgggattatagatgtgagccactgcacccagccctctttcttcctttttttttttgagacggagtctcactgtgttgcccaggctggagtgcagtggcgcatttgtggctataaagttccctgtgagtactgttttggtgtgctgtgttttcattttcatttgtctcaagatattttctaatttccttttttatttctcctttgatccattggttgttcaagagtatgttaattttcaaatatttgtgaattttttagttttccttctattattaatttctagttttattccattgtggttagaaaaaatgtttgtgtgatttcaatcttctcacatttgttaagatttgttttgtaacctaacgtgatctgctttggcaaatgttctgtgtgtgcttgagaagaatatgtgttctgctgctgttaggtggaatgttctgtatatgtatggcagtttagttgagtttatagtgttcaagtctattgtttctttagtggtcttctgtctggatgttctgtgtattgttgaaagtatggtgttgaaatctccaattattagtgggtggctatctatttctctcttcagttctgttaatgtttgcttcatatatttgggtgctctgatgttggatatataaatatatatatattttcagatggagtttcactctgtcacccaggctggagtgcaatggcactatctcagctcactgcaacctctgcctcccaggttcaagagattctcctgactcagctacctgagtagctgggattacaggtgcccaccaccatgcttggctaatttttgtatttttttgtagagacagggttttgctatgttggccagactgctctcgaactgctgacctcaggtgacctgcttgcctcggcctcccaaagtgctgggattacagttgtgacccaccattcccagctgggttaatatatatttataattgttgcgtcttcctagtgaattgactcttttatcattatattatgtccttctttgtctcctatgatagtttttgacttaaagtttattttgcttaagcatggctactcctgctctctcttggataacatttgcatggaatatgttttttcatcctttcactttcagcatatgtctgtctttaaatctaaagtgagtaccttatagacagcatacagttggatcatgttttttttttaatccacttagccaccaacagaattataatttttaagcatttatcagaagtaaagacatttagtaatgattccccccttcattttatatacctattttctctttattttatttttttaacagagtcaacctatttgatttcttgacaagaccacaatctgatcccaaagatgtgctccacaaatccaggcaaatgggtcacctttgatgatgatcctgctgttcaatcttctcaaaagtcaaagaattttcctctggagaatcaaggtgtctgtagaccaaatggactgaagctgaaccttcctggcctcagggaatttcccagtggatcttcctccaccagcagcactcctctctcctcccccattgtagatttttatttcagtccaggacctccaagtaactctcctctttctacacctaccaaagacttcccaggttttcctggcatccccaaagcagggactcatgtgctttatcctattccagaatcatcttcagacagcccactcgcaatatcaggaggagaatcttccttactgcctaccagaccaacatgtttatcccatgccttgttacccagtgaccactcatgtacacatccaactcccaaagtaggtcttccagatgaagttaatcctcaacaggctgaaagcctaggattccaaagtgatgatctcccccagtttcagtattttcgagaggactgtgctttttcaagtccattttggaaagatgaaggcagtgattcccatttcacccttgacccaccaggaagcaaaaagatgttctcatcaagaaacaaggagatgcctattgaccaaaaaagcctaaataagtgttcactcaactatatctgtgagaagcttgaacatctccagtcagctgagaaccaagactcacttagaagtttgtctatgcactgtctatgtgctgaagaaaatgcctcttcctttgtcccccacacactcttcaggagtcagccaaaatccggatggtctttcatgctgagaattcctgagaagaagaatatgatgtcttcccggcaatggggaccaatttttctgaaagttttgcctggaggaattttgcagatgtattatgaacagggattagaaaaaccatttaaagagatacagcttgatccatattgtaggctttctgaacccaaggttgagaacttcagtgtagcaggaaaaatccacactgtgaagattgaacatgtgtcttacacagaaaaaaggaaataccattctaagacagaagtagttcatgaacctgacatagagcagatgctgaagttggggtccacatcgtaccatgacttccttgactttctgactactgtggaggaggagctgatgaagttgccagctgtttcaaaaccaaaaaagaactacgaggagcaagaaatttccttggaaattgtggacaacttttggggtaaagtcacaaaagaaggaaaatttgttgaaagtgctgtgataactcaaatttattgcctctgctttgtgaatgggaacctggaatgctttttaaccttgaatgaccttgagttgccgaagcgagatgaatcctattatgagaaggactcagaaaaaaaggggattgatattcttgactaccattttcataagtgtgtgaatgtacaagaatttgagcaatcaagaatcattaagtttgtacctctggatgcctgccggtttgagctgatgcgtttcaagactttgtataatggggataatcttcccttttccttgaagtctgtagtggttgtccagggagcatacgtggaacttcaggcttttgtcaacatggcctcattggcgcagaggtcatcctatgctggttccttaaggtcctgtgacaatataaggatacactttcctgtcccatcgcagtggatcaaggccctttggaccatgaacctccagaggcagaagtctctgaaagctaaaatgaaccgccgagcatgtctggggagtttacaggaacttgaatctgaacctgtcattcaagtcactgtggggtcagcaaaatatgagagtgcctaccaggcagtggtatggaagatagatcggcttccagacaaaaattcaagtaaatattcaacaccccaagtttattttcatgggaaatagcttaaatattcttaccttcctccttgggttgaaaccaggtagagacagatggcaatttgtcagctgaggctgtgctttggggtaggagatggaacatttagctaaacagctggtttatttgtttccttttgcacctatttctaccagataagtttaactgttgaacattttttaaatatcatacgaaataccatgctaggctaggaatttgttgtggatggcggcactaagagaaaattcgttgatatccatggttgagattaacgcatcaacttcaaatgttaaaaatatttctaatatagctgagattccctaattaatctctaaagatctgtcatccatgaatatacctgaacttctttgcattctcagctgataccacttcttccttaggtttgctccctgctctttgaaataagactgctttcatttttacccaaattgatttttgttgactgaattcacccatttggtcatctcaacttgtattgtttttgtttttgacatggcatctcactctgtcatccaggctggagtgcagtggcacgatcacggctcactgcagcctccacttcccaggctcaagtgatcttcctgcttcagcctcctcagtacctgggattacagatgcataccatcgtgcctggctaattttttgttttttagtagagacggggtctccctatgttgcccaggctgctcttgaattcctgggctcaagggatcctcccacattggcctcccaaaatgctagcattacaggtgtgagccacctcatctggcctaaactggttgttttagaattaggtggacacacgtgagtgttaaaaattcagttaatttttaaaaattttgcaaataaaaattatctaaaagtcagaacttgaaaagacagttatagtaccacatttattttggagtagtaagtaaatagtagtggacataatataataaagtcaaaaaccaaattttaaaattagagctctttcctattttagttgagggttgttggttttttttttttttcccccctagcagagcactggtcactggtctctggagttaaattggaggtggggttgggggacctgagttgatgcattcatgcatccatcgatccatccatccattgatccaaatcttttttttcttttttttttttttttgagatggagtctcgctttctcacccaggtggagtgcggtggcacaatctcggcttactgcaacctccgcctctcgggttcaagtgattctcctgcctcagcctccggagtagctggaactacaggcgcccaccaccatgcctggctaatttttgtatttcagtagagacagggtttcaccatattggccagggtggtctcaaactcctgactttgtgatcctcccacctcggcctcccatagtgctgggattacaggcttgagccactgtgcccggcccatccatccaaatctttactgagtacttactgtataccaagtgccacatcaagtgctggggataaagataaataaaaatctgatccctgtttccagatggctcacagctgctgtagtccttcagagaaatttaagctcatctaggcccctccaggctgtggacttcagaggaagcatttttctttggggtggccttatggcagtgtttctcaaacctggctatattattattattattattttgagatggagtcttactctgttgctcaggctggagtgcagtgcgatagctcactgcaacctctgcctcccaggttcaagtgattttcctgcctcagcctcccgagtagctgggacgacaggcgtgagccaccacgcctggctagtttttttatttttagtagagacggggttttcccatgttggccagactggtcttgaactcctgacctcaagtgatccacccgccttggcctcccaaagtgttgggattacaggtgtgagccaccatgcctggccaaacctgactatattagaataacttgaaagcttttaaatcatctcaatgtttaggtttcacttcatgctaattaaatcggaatctctggcgggggtgggcggtggggagggagccagattccaagtattttaagatctctccagatacaaggtgtagccagagggaagaacactgctctccaggtgttgtaaagttgtagaaccagaagaacaagccccagactacaattgacttgaggggcagcactgcccgtaccctggaggccatgggaccaccttgtccatgactctctgtttgttggtttaacacctgttgactgatgagagcttgagctatgggcaggatccttcaggtgagagacacaggcctagtgagctgaggagctccaggaccctgtgcagaagggaagttcctacattgtctttcttcctgacaccccatacccttcttcattaatgccaaatttcaccccacagcgttctcaagactcagattaattatgttcagttcccccatactagcaaggatagctcaggcttagggcagagtgaggtggtgatggtgcagcctggtcacagtaaatggtctcaaacagcacattctgatcaactctgctgtgatgggagggaaggtcagtatcttctatgatataatccactgagatgatgtttcctgctttctttttttttctttttttgggatggagtgttgctctgtcacccaggctggagtgcagtggtgcaatcttggctcactgcaaccgctgcctcctgggttcaagcaattctagtggctcaacctcccaagtagctaggattacaggcccgcaccaccacacccggctaacttcttatattttgtgtagagatggggtttcaccatgttggccaggctggtctcgaactcccaacctcaggtgatccacccgcctcggcctcccaaagtgctgggattagaggtttgagccaccgtgcctggcccctgctttcttttataacttggctagagaggcaaattgaaccatttgcatcatcatgccagagaaaccagttttaaggtcttcatacaaggttccaaatggtctattctaaaagttacttgtgctagttttaggttagagggtttaaacaaaatcagagtattagcttttgttttgctcaacaaaaagggaaagagaggcaggcagaaagtcaggcaggctggaatgcctattggaaactcctggatctgcaggtttcccctgaaatctgggtgataaactaactcctgttgttttccgttgatcctagagatggtctcgaggactagaacaaaaggtccaaagcagtttttgcatagacttgaagtggtaattatgcttttgagagagaagcacaataggctcaggctgtgggcttgcccacgtggtgtgagagggacaagagcacaggctccctttgtagtccattcctattgctctacttagagcaggtgctccgggaggccctgaaggaaataagcacttggctaaagcctggccagggtaaccacacttatttttcaaactgagaacccataccaatcatcttttctaattttgggagtgcagacacgtatgaagctttttgtgaaaatgatcctgtttataatactgcatttttttcagagtcattggtgtagttaactgattcaatcaacaagaatttattgagaaggagtctcactcatttactccacaaacatctactaaagttcttctaggtataggttctgtgctgagtgtttaagagatacagacacaaacatgattcctactctaccagaaacttaacagtctagaaggtgagacagactctgaagcagctacccaaatgcactgtggaaaagtgcatagttccaggcttggacaaacatatgcacttagggatcccagaggaaagggtaataaactgcctggggactagggagggcttcgctgaagagctgatggctgggagagtcaatagagtttccatcaaagaaagaaacagcagaaccacaggtgtgtgggtgggggatcttacctaagttttggggctgagggagtggtcggggaagagaccagtgtattaagaccttgtgggccatgctgtggggtgtgaagtttatctgtcaacagggcctcggggttgttttcggcatgactgctacagaatcatatcttgtttcagaaaggctggcatgcagtgcagaggaaagatttaggagtagattatagacacagggaagttgggaggaggtaagggttgctgagcaaaggcagtggcagagagagagaggcaagagatgggtgagcgaattcaggggaggtgcccctaagtgatgacagattctctatgggcatgagggaaagggagggaatgggacaaggtcaggtgctctggctgtggtggataggtgggcaatggtgccattagccgagatagcctgggatcttctcatcactcatccttttaaagtctgtttcccagtcctggccacatgttagcatcattaaagcttcaaacacatacccatatttgggccccatcccctactaatcgggctctatgaagatgaggctcaggtgttgatgtttataaaggctcatgcagccggggttgagaactactgacgtgatcccctaggcagagatcattcctccctgctctgcatatgcctttgtcttccagacctctgttattgctctcccatgagtatttatttatttatttatttatttatgagacggagtctcgctctgccacccaggctggagtgcaatggcaccatcttggctcactgcaacctccacctcctgtgttcaagagatttttctgcctcagcctcccaagtagctgggactacaggtgcgcaccaccacgcctggctaattttcgtgtttttagtagagatggggtttcgccatattggccaggctggtctcaaactcctgacctcgtgacctgcccagtttggcctcccaaagtgctgggattataggcatgagccactgcgtccggcctcccatgagtatttattagcagtggagctcaccaagaacaatgacaagaatggacatttccagggaaactggctggacctgatcttggccttcaggaattcttttgtaaaaccgtcatatcaccaggcccacagaggacaacattttacaggcatttcagtcaattacacagtgataattcactgaacaaatcctttgggatcacagctgctttattgagatcaggtctgtgcacaaagaggaggcccagggaaaacacagtggggctgtgtcaggtggcgtccagagggcatggtgcagctgtgggcctggcttggggcaggacatttctgggattacagggccctgccccaagcttctccgttgagggggtagggagggcaatgcagagagtgagagggtgccagggcaggctataagctaatttgcctcttgagaagtagggtaataataaggttggagcagagaggaaatctttgtcctaaggcagtgcttctcaaacttttgtgggcccaggaatcaccttgttaaaatgtggattttgactgagcaagtgggatctggaatactgtgtttctaacaagtgctgatgtgacgccaatgcatctggcccaaggaatacgcttagaatagcaggatcccagaatgcatctctatttttctatatgacttttagatcagttgtgtatttagagaacataaagtttttaaaaagctctttaaaattttatccttttcaagattgtctcggaaaactttgcattatttgaaaagatacttcgaaaatggaaactgaatgaatagcactggagtgcagtggcgaggtctcagctcactgcaacctctacctcccaggctcaagccatcctcccacctcagcctcccaagtagctgggaccacagcacgtgccatcacacctggttaattttttgtatttttggtagagatgaggttttgccgtgttgctcaggctggtctcgaacttctcagctcaggcaacccacccgccttggccttccgagtgctgggattataggtataagctacctaccgcacctggcaagaacatataaactagtctactatgttctaattataaaacttttttttaaattttttttccttcctgggaatttgagggatcaggattgaccttttttactggggaaatcacctgtgatttctggaaaggtggggagggctgctggtcccttaatgtcccttctaaccagcttgtcaatgcttagtattcctttgacagtgggcaggtctttcattttgcaacaaaggtttgcctgaggcactagctcacagacttcattcatactaaggtgtgaatgacagcagaggagcttaggctttgttggggtgatagagagagaaagagaaaggaagaaagagaaagacagctgaagacaaatgaggatgctggttagccagaggaggtgtatatggtggcacagaattattaaggggaatgagagtggtggaggagcaattaaatatatctacctctaacttcccaatttttcgacttttctctttttttcttctgccctgtcatcagcacgttggttgctctctcctcctccactctgtcatcctcttgctattctttcccttcggccctctaacagttcagtttcaggtgtaaaatattttggttcaggagggactggatatcaactagacctaagattttgtgatttacattccccgtcctaagaaaaggaattatgttgagtgaacaatgaccaaagctggacagttccccctggtggtcagcactgcgacaacacgattttcctctatcttttattcattaattggtgaatttgaaaataatctgttaagccccaaacatgacagacattgtgctaaggacagacatgacacctgtccctgtggggcagaaagtctgaagagggagtgtgttactaaacattgtagagcatttagcattttcaaaagccttaaaaaataagccagaaaacttgaaaggaaaaaggcttttaccatttttaaagaaaagcaggtagaaaggttttgtttctgacattttttgtaccactaagtcttcaatttgggtttagttcttcaattttcatcgtaaaatttccccaaataattttttcttataaagtgtgagtatcaaatcagatcatgtgtagtataatttttaactccgaatgtgtaacattcacagtccctttattagcaaaattatagtaattaaataatactggctttataattgaatagcactttgcaaaataatatgtctggctcatctatattgctatagaatactactgccccagtgctgtatgcatatgaactggttaatcctcacaacagcccttataaggttcaggttatcctcattatccacatttttagatgaagaaactgaggctcagagagataagcaatttgtaaccctagccttaaccactttgccataacaagacagaagaatgcctgcagtaagtgtaaatgaacttactgtatcctcactgcagacagaggactaaaaagagtaatggggtttgcaatctttctgggtgtgtgtgtatgagaatgaagttatcacttgcctccagtgatcaggttgttaagagcacctcagaggccactgttgtcctacccttcctgtaagtggtagagatggctaatgagcatctgttggttaactgattgatgatttctcaaggctttttacagccttagaattctattagtcactctacaagaaacaggttgtatggaacgaaaggtaatttatcttttaagaattaagtgaaatcctttaaactcttgtttttgtgcctaaagctatattctgatggaaatgctctttctctagctatgtcagtggtacagtaatttaatctggttcttgaaattactctttatctcatacatttatttaagtaaagatagccacattagatatggagatgctatgaacaatgcaacagaatcatggaatgtttgtaaagctgctgcagtgattacaatgaaaatattgatcatttccttataacacacacacacacacacacacactatatgacccccatctaaaatctttgaaatatatccagtatctctgggtctggcactgaacctggcctggcatagcacagatgctcaataagtgacaaattgagtgaaaaccaatattagattaaaatattaaaggccaatatgcccatttctactctgtatagctgttccagtcaaagtattttggaaggatgagtgagaattacagtagggaaaaataatttgttccactgaaaaaagaattcttggcctggaacattttctgaaagttaagtttaacttttaaaaatcagaattttaaaataatgcgacttaatttgggctgaagtttatttttgagttatctgtaaatagatggtaaggaaatgaataaattaataattataagatgttactcagtctaagagaaagaggcttgtacaggtcttgagcacattgtagccaaataattatgtttaatataaatattactcatatcttttaattaaggaaaacaattaagtttaagcatattactatattgtttaatataaattaaacattaatattaaaaatattgcttaaaataaatatttagcaaattatattagtataatatagtaattatattgttatatactaatataatttgctaaatatagtaatatttctaattaatattagtaatatttctaattgaaaacatttttaggagttcatctgtgcctgcatatagtaatatattttttatttttatatttttgccattcttattcaaaatagtaatgaagttgtacttgtttttaaagctagtacttaaaaatggcagacagctttccccctagttggtgcaaaattgtagattttcatggtatgttgtttaaatggaatttgcactgctgcagtgctaatgaaattccttattaaggagagagatgagtgccttttatgttcaagagaaatgttcaatggccattaaaatactttgactatttgattttttttccctcgaggtctagatcatccccattgtctgtcatacaaattagagcttggatcagaccaagaaattccctctgattggtatccatttgctactgttcagttttccgtgcctgacacctgtgcctcaaggacagaggtcaggtctctgggagtggagagtgatgtccagccacagaaacatgttcagcagcgagcttgctacaacatccaggtacatcccaaaacttctagaactgtgacctgatttggctttaaatatttgttttgctgtcttttgtgatcgtgtatgtgttgtgtgtgtgtgtatatgtgtggtgagatttgccctagagaggatctcagctatggaaacttgatggccaccattgagcttagttcttcctatccattctggagaatgttgggaacacttaataatttagctctcaatgaaaaacaggacattaaaaatgaatctacattttagaagcatatttataataaaaattatgatgttaggacaccatttctcaaaatatgtgctgcagaacatgtgtcccatataattatccaacaaaagaataagttggggaatgccgtatactaaattaatgttaaataaaggctcccaagaagtcctgcaataaggaaacttgttaaacttagttaacccagtttttcccaactcattggctattgtgtcttgtctttgtgggtatgtgtatgtaaaacacttatccctatcttgtggaatagtgttctgtggagcatgctttaggaaatgctgagttactctattatggtagttttcagtttttttttttttaagacggcatctcactctgtcacccaggctggagtgcagtggcattatcttggctcactgcaacctccgcctcctgggtccaagcgattctcctgcctcagcctctcaagtaactgggattacagccacccaccaccacacccagctattattattattattattattattattattattattctatttttagtagagatggggttttgccatgttggccaggctggtctcaaactcccgaccttaggtaatctgaccctctcggcctccccaagtgctgggattacaggcgtaagccaccatgcctagcctattggtagcttaaagttttattttaaatttttaaatagagatgggatctcactatgttggtcaggctggtctcaaattcctggtctcaagtgatcctcctgcctcggcctcccaaagtgctgggattacaagcgtgagccaccgtatccagcctggtattatggtagttttaaatgtttgccatcagctcttctgcattcttaggcagatgaactaaaggaggacatacacttacatctgtttctaaacttgttttcccttcttatcctcaagtttagtagatatatggatgtctcctgccacatatttcccacagtatcttgaaatggtgatgcatcttgctgattttgtttaaaaggttttctttattttgagacagagtcttgctctgttgcccaggttggagtgcagtggcatggtctcggctcactgcaacctccgcttcctaggttcaagtaattctcctgcctcagcctcccgagtagctgggattacaggtgcctgccaccacgcctggctaattttttgtgtttatagtagagatggggtttcaccatgttggccaggctggtctcgaactcctgaccttgtgatctgtctgcctcggcctcccaaagtgctgggattagaggtgtgagccaccacacctggcctaaaagtatttttaactagaaaatatttcaaaaatcacaaaaattaaatagtgcattacagacaggtggttcagtttagaatgtatgtttcccttctgtctttcacatgagcaacattttataatttctaatagcatttattttatttttaaaaatttaaattttgcctgttacacagccctcaggaggtcctgagaacatgtgcctctcaaatagcattttaaaatctatgtgttgcttgacttgcagcaaagattaatgccattctgattttctactaatttatttctattaaaaatagtgatattatacatgacatcgctaatatcaactgggtttcctatactatagtaatgtgagtcaggatttttctttattttggactatctgtttagaagtctatgtttgggtccagttatctttttctactgataaaagtaatgataggtagtgctgtcctgtgcagccccttcagacctgaaggatgtatttccccagcaggtgggaattgccgccgctgaagatagctgcctttcctgaggtcatgcctccttcctggaatctatgcaggggtgtataggcccctttgcatcaacttgggctaacgctgtaggtcagcccagcttcagctctccagggcatggacagaagccttcattctgactacattgcatcccagcttctctctctgcccatttagcttcatttcctgcctcactcccccatgaatgttgaactcaacggcactctccagtaaactttctgcacacagatctccatctcagagtttatttcttggggaacctgacctataacactaggtatatatatattatgtgtgactgaaatgtgggtcaagtggcatggagactgtgtttatacttattttcctattcacagggcatgccaggttcatgcaattttagtggacaattaaaaattactttacaaagtatctcttgctttagtagcatttactagttgatgtgcacctggtggcagtttcaaaatgttttcttccatttagtaattatctgttgccagatactgctccacatgcagggacacagcagtgtgaacagagagacaaagtccctgtcctcatggagcatagtttctagtgggggtaaacgaaaaatagttagtagataaataaataaataaatatgatttcaactaataacaaattccaagaaggtaataaaatagggtaacgggatagagagtgactggagggctttatcaggggtagtcctggaggacctccaggaggatgtgacatttgagctgagacaaaaatgatgaagagcagatggtttactattaggttgctgcaaaagtaatcacggtttttgccattagttttgcagcaacctaatagtttgtaagatggcttgtttcaattagataattttgggtgcattataaatcttaagggggccaatggctagatacatgatacagccatatattcaggtagagggataattgatcatatgtctagtcagatctgtaaattttttttcagtatacatattctgtatacattttataaaaactacgtttgacttagaagacagttttggtgctcttgaagacttgaccctggcggggaggatttgaggggctctgttgttcaaaaggagagcagagcgcctcacttggaagctactgtaggagggtagagggctgtgtctgtgtccaaagggtgaggtttgtgcagtctgtgccacatgtataaaataggactgaagaggtgtgagtgctgtgttgcatttgttaatgctgcctgtgttttgcttttgcataacaggttgaaatagaaaagaagtggattaaaatcgatggagaagacccagataaaattggtgactgcataactcagtaggagtagcaagagtttatgatgacagcccacttgtcaaatatgtaattcaccgaaaccacaccaagtcctgctactgtagagtggaaatgacttctgaatagcggttttaggacaggtctgatggctgtgtttagagaagtttagacctaaaaccgaacaatctgtattttttgcttttcatgtgtttttgtcctaggggttcgatctaaaatgtttctataattcgtgtgatgttttgcttcctattgaaactcaaaggcactgttactcgttgtgtgaccccgcagccagtatgatttttgattactcagtggctgactgttttgctctctggattactgaggtgccgtcttcatttcttcccatctcttcttgctgcttagtgtctgtactagagggtaagggaatcaaaggagacataaaccaaaatagttaattttccctctttcttgcctctgaaatgtggctaggtgtagaatgatgttgaaaccacaggctaaaatgtagatctggaagtatctgtgcttttgaattacttatttacctgtcctcttaccgttggtaaataataattggctatatttggtacctgtctctctcctactgtattgtcattttcaaaatgtgtttgttttctggcgcgtgctgcaaagaagctatttctgttgtcctacatattttagtataaatcactaagacatatttcctttcacttggcaggattcctttcaaaatggaatctgagtattagacactagttaacatatttgtgtatattaaatatgaatttttaaaatttataaatactattttccaaaagtacagactctaaggacatattttgataaagtattatttgtaatgaacacaagcctctcttgagtagaagtctaaatcacattatgattattttatactagttctgctatcatgctgttttatgctaattctgcttattttagagtatttttcattaaaaggtgagcaaagtgaaagatacttggtattttacccagatttctaagtggcaacatttttattcttcagagtcaggtaaatgactataatagtttggtttctaatgaaaagtcaatagcattagcagttataattctgtttataatttcctttcagcatttacagtgaaaagtgagaattttaaaatttatgaaatctatattccaggtattgtttttagtctgaaaaacaaactcccccatgtggtattaatataccttcaatttatgttgagtcttaaacataattaggagatatttttctctatttgctagatttgttttgagtcaaaactgatttagtgttcttccaaacaacatttatgtgttggcctacagagtttatttcatgtgttttttttaatatttaatattatattacattcattgaaatctgttcaaaaacagattaagacaaacatttatgatggtctgtatcaatcagcagattttattgcttttcattattttactgtaaaggcaaagaatgcaataggtgatggttggttgaaaggaattgttattgctgtttttattttttactttttttgagacagagtctcactctgttgcccagcctggagtgcagtgtgtcatcttggctcactgcaacctccgcctcctgggttcaagggattctcctgcctcagcctccaactagctgggattacaggcacaagccaccatgcctggctaaaattcttttgtatttttactacagacggagtttccccatgttggccgggctagtctcgaactcctgacctcaggtgatccaccagcctcggcctcccaaagttctgggattaaatgcgtgagccaccatgcccggccgctattgctctttttaacttcatttgatgccttgcttataatatcatatgcttgaggctcactgttgatgtagagtagggcaaatctgtgtgtgtatgtcattaaaaaaattctaccatctttctttatcatctggtgtgggcgcactctacagtgacttcagtctgctcagaacgaatgtggaggccggccgaaactgatgctgcccacagtcccagtgaagttaggtgggttaattactgccattcctttctaagtgtgttttatggcatcctgcccacaaagaactcacagtctgattaggatgaacttaatgactatttacacctcaaaatatattcagcaaagggttcacttagttgcccctcatgcttcacaggttgactagtatctgtgggtacctccctgcccaggttattcactcacaagccaccgggccttcaggacatctcaagattcagtcttgacaatataatagcaaaagctggactaaagcccaaatggattgtctgtggcaatgcagaagctgatagcattaacagcagggtgttacagcataattgttaattcgcacatctattaggatccttaaatattcattacttaatgttaaattaacattctgtgtagggaggggaggcttattcaattcttctgacctcagaactggcagaaggtcagatgtgactacagaactctaggtgaaaaatcaggtagggttcaaattaagtagaactgcccttgccggaatagtgatcttcaaaaaacccttgcttttaggggagggaagcggggaaggaaaggaatgagggaggaaatattcctttctagcattcattttgcttagatcactccattgtgagtttgaccattttggagtcaaatgagcagacttccaaggagttgaccagtttgtgactagtctggtcacctttccagttacaggatcatattaactgtgtaaatgaattcatgggtagatgatttgtgcagatctgaatttaagaacatttcctttttctgtgggaatcacaagagtttatccactaaaaaaagatatgtaaaaaagatactttccagcacataaataaaggctggaattttacaacctgatgtatatattagacagttctaggatgttagttcccttcattccagagctatgcttgtgatacagccccttttcttataaagtcagttagaaggacttccttaacaatgactattataatgtcttacttaaaatacagttttgtattctgtcaatgcaaatataagacaggttgagccttaatcatgtaacaaaatattttgtagattacatattgatttttcaaaaattaaaaatgtatttcaaactattcttactgtgctgtgaatttatatcttcttctgcaagacctggggctatttttttttcttaaggtatgaaatcaatttcaataaccttaaacaattgaccctctgtcaggcatatgtcaggctccactcttaaggagtcagtgaccatgacctctttgcatatcctggaaaaatgacatcatcaaagtatagttgataatgttataaaggatgattttaaaaatagggtataatcatgactcacaaagatatgaggctgggtgtggtggctcacgcctgtaatcccagctctttgggaggctgaagcgggtggatcatgaggtcagaagatcaagaccatactggctaacacggtgaaaccccgtctctactaaaaatacaaaaaaaaaaaaaaaaaaaaaaaaaaaattagttgggcgtggtggcgggcgcctatagtcccagctactggggaggctgaggcaggagaatggtgtgaacccgggaggcggagcttgcagtgagcagagattgcgccactgcactccagtctgggcaacagagtgagactccatctcaaaaaaaaaaaaaaaaaaaaaaaaagaaatatatgaaatgaatacatgcataagattaccactattcaaagcctttcacaatttttccttgaaaacaggaaaaactttgtccacagaattccatggaattttcaacctttggcaacttgtagagtagtcctgtagaattaatgtgcacctaaaagccacatttttaaagtttagaaaaccagttttacaaaattgcacagaatatatatcaggtaagatatacgtgtgggtggtagggagttgggggagagtggaggagagttgtgcgggagtggagggaggctgtaggagatatgaagggaatcagtgcttataaaggacgaacctaacaacctctccaccctcctttttataagaaatctgccttgtgttgaaattaaatttttattgagctactaaagttaatatttcaaaaaggcatcagtacttcatagaagacagagcatgaagcaccattttagccactgctagcactcacaaggcttggccctagttcttcaggaacagcaaaaggattgactggcaaaaactgaccatatttgtaacaacagtcctcaaaatcccatcaatcaattcttccctgttttgtctcaactctggctagactgtcccaccgcttttgtgtagacacagggtagattttgatgttgtctctcctagaccctccccatcctctgcaactactgtattccaaggaacttatacccttagccagggccctaaaacacagggttatgtgtattctgttgaatcatatgtaatcgccaatatttacctttcttgatgggaatttcacgggctcaatctaattatccacatatttccctaggtcatatgatacaagcactttttgttatcctgcttagaaatggcaatgaaatatgaatttgactaatttttaaagcaagacagagttgctagtcaagaagcaaatagttgaattacaaaaatccatagatacaagctacagataatattgtgcctttaaaatcatctgtaaggaatgtaatcattttcctctgtaaggaaaaggaaaactgattagattaattgccccaagttttaaaatatttcagttcatttccgtgagacttcctggggaagaaaggcacagcatcattagactctgggttttgctgcttacccttcatgtatctgcactcgcacagccttccaaacttcagagggaagagtggcttctttaaataatatgactgtgcgtgttgacattttcctgagaagtcccttttgtagaatccagaattgtgaactccatgaaatgtaatttgcagtacattctttaaacagaagagggtgctctcgggcaagctgatgctacccagctctagaaatataagcatttaaatttggtggtgcttgtattatgattagtgcaagatcttgggggcatttaataaagcatttcaaagcattgtgagtccagtggagtataattaaaattaatgcaatagacaaacacattaaagtattcttaatgcctagtctaaaaatgctgtcaaatacagttttacacatccgaaagatttaaatactatgcttgtctctgaacatttctaactgttacagagaaagaaaaacagtgtcttccttctccacaggtttcaaacaaaatttttctaatgagagttaataaaatcttctttctttaaaagatttataagatattataattaattcatcctgctttggcatgtgtcaaggtcaatgtggtctctaaaaatctccagtccaggattgtactttcagcttcttaggtaagaacaagcaaagatatatgctttcaggagaatatttcatgctgccttgactcagggacaagccttggttctgtttcagtcctcagaaaggagtaatgaatattgttcttttcaagatgggctctgtatttctctcagaaatctccctgggtggatgttgttgttttttgtaaagccagttaggacactctctttccaaaagtcttatatcatgagtagtctatgagtgtagctgtacgcacgcagcattcccaaagccttctgaagtacagaaggcttcctaaagacattggctgccagtttggcactctgagtcacctcaaaatgctatgtgaccttcgttccaaataatcatcttgctgatcattctaattttcttaagtgcttactatatgtctgcatttttctaggtactagggacaagtaattacaaaaacagttaattcctgctgttatagagagcatataatagtgggggaagtcaggcaataaatatcaagttgtgattattgctatgcagaaaaataaagcagggtaaaacaataaagagtggtagaagcgtgccattttagataggttggtaagggacgttctctttgatgagatgacattctagcagcgagacctgaaagaaatgaggtagagtgccactcagatccccagggaagagtgtgtccagcagagggctctgctagtgcataggtgcgggactcggggtgctaacccgtcagaggaacatcacagaggacagatggctgctggatggccatatcggagtgagcaagggggtgggatggaggtggaaagagatcagagagattgtggggaggtgggggaggcagaccacctagggttttgtgggccatggattttactctgagtgagatgggagcccctggaaggctttgtgtagaggaggggtagaactttgttacatgttaagatgatcgtgtggacataaaaaggaggtagaggcagaagcaaagaaagtagttaagagtctattgcagtatctcaggtgtcttagtcctttcttgctgctatacctgagactgagggatagcagaaatttctcacaacacaaatttctcacaatcttggaggctgggaggtccaagatcaaggtgccaatagattcagtgtctggtgagtgcctgtctgtttcttatagtaggcacgttcttgccgtgtcctcacatggcaggaggggcaaaagggctccctgaaccctcttttataagggcactaatcctgttcataaggacagagccttcatacctaattacctcccaaaggccccacctttcactaccatcatcttgggggttaggtttcaatatatgaattttgcgtgggacacaaacattcagatgatagcatcaggtgagaggtgacggtgattgagagtggtgacaggagatgaaaaatggttgaattcagaacatatttgaaatatggagccaatagtatatgccgatggattagatgtggcgcgtgagggaaagaagggaaccaaaacaactgccagatttttggcctgagcaacgaaagagtggagttgattttatggacgaggggaagggtgttgtaggagcaggttttggggagaaagatcaggaattcatgtttggatgtgttaactttgagatgcctattagacgtctaatggagacagcaagtagcaattgaatgtacaaggcaggaaagagggctgggataaagatgcgcctcttagagatatcagcgctttcagccatgggactaactgggatcacctgggagtaaatatacactaggagtgggctgagaattgagcccttgggctccctggagtttagaggtcaggaaaatgagggcaatgtcataaaggacactgaggaagagtagctggagtagaagaaaaaagagaatggcattcattccaggggtcaagtgaaaaaggatgtaatgagtttcctcaaatgctgctgctagagtaagatgaggactgagagttgactactgaatctagcaacatggaaatggtgaccttgacagaaacagtgtcactgaagtgagagcaatggaagcaaactcaagcaggtttggactcagggagtaaatggctttgtaggggaagcaaaatttccttctaccctcttcagttctgttgttggtccaagaattaaactgacataagacagattaacaggagaaaagcataccaattttattaatatttttacacggacgtggcagtcttcaaaagggaaatgaagaccctaggaagacagtaggccgtgaagcttatatacattttcacgcaaagaacaataaattatggggatgtgacaagacaaaggggcttgggcttggggcattaaattgtaggacagtgcctaggaaatacatgggggaaattaacgaaagacagggtcgttttggtagtttgttgtggaagtccatttcggcatcaactcctagtctctggtgataagaatgttctcttcctagtacagggaaggcacctttttcatggaaaattttatgatctgtttttaggtagaaatgaggaggtcagagagcctatgttagtttgttttgcatcgctgtaaaggaatacctgagactcagtaatttataaagaaaagaggtttaattggctcacagtttggcaagctgctcaagcatggaaccagcatttgcttggcttctggcgaggcctcaggaagtttttactcatggcagaaggtgaagcgggagcaggcatgtcacatggtgagaaagaagcaggagcgagaggaggagcttccaggctcagctctgcatgaatgaacagagtgagaactcactcattatcgcagggacagcatgaagacattcatgagggatctgcccccatgacccaaacacctcccactaggctcatctctaacactggaggtcacaatgcaacataaaatttggaggggaaacacatccataccatatcagagcccttctgcatgagctgtttctcaagtgccttcagattaaaataatcaatatgccaaaacagcatattttgggatggcacgaatcccttcagccccctttttttttgggaatagagtcttgctcttgttgcccaggctggagtgcagtggtgccatctcagttcactgcaacctccacctcccaggttcaagtgattcttgtgcctcagcttctcaagtagctgggattacaggtgtgtgccaccactcccggctaatttttgtatttttagtagagacaggggttcaccatattggccaggctggtctcaaaactcttgacctcaggcgatccacccacctctgcctcccaaagtgctgggattacaggcatgagccagtacacctgttccccttcagctcttttgaggagttttgctgtcaatatgaacactggaacagtggctggggaggatgagatctcaatacttccctgacatcccttaagactcaagtcttgatactttgtctgctctctggctctttctttgtcattactattatttttatcttcttgatgttgactcttgctaaaattttttgtcttccttattgttaatgcttatagaaaatgattccttgttatcttttagcccatgtcatccgaatcatttgctgtttctagcctaggtgctttgactatgccagcttgtatttcttcagaattttcattaactatatgtgtggtattgtaggcattacatattttaaaataaatttagccattgcttcaatcacatcctgctttgttttaaaatttttcttggttgaatttcactgggtcaatgtcatttcatattaggatggtaatcccacttcaaattttcttatcaaattcagaataattataaaccagttgctggtttcataatcttaagaatgccaacaaagttcctgcaggataaaaaaagcacacctatttattcatagtttttatatctacctaatagtttgaacttcgattctttattatagatgatacactaatattctatgtaaataattgtccagtaattaataagtgaattttaataaaattaaagtatctgtgaaaggtacaatttaggcaactgtgaaatcatactattagtgggatattttattgttttgattcattatttattttaaagctgttttgtatggttcaaataaggaggtgatcaaaatattatttcacgactcacatggcttattgtcacacacagggaattttttccatgatgtttaaagagggaaagaatcacaagaacaaatctcatagggaatacacttgatagatgaagtacattaaccatgtaatgaatgagttccaaaattactaaagcctagttgctcaattaggatgaatgcaggctctatggaaagtgaaagctagttgaagtgtcaggtatgagtgtaagagaggattttgggagagatagcttgatcagcacaacagagatccatgcagacacaggaggtccctccatgcaagagtgtgggtgttgctgctgagtcttcggagatgaccccaaaggctaacaggatgtagtcctgccatacctggagctcacgatctttggagaagcaactcaacagagtgcagtcatgccatggcctaatctctcaaagtgtctgccaaactattagatttgtaggtaagtcatgcattacttaccaatgggaaaatgtacaaaatgagaaatgtgttgttaggagacttcgttgttgtgcaagcatcatagaatttactgacacaaacctagatagtatagcccactacacacctaagctatatagtatggtctattgctcctaggctacaaacatgtttttggtaacagcatgctactatactgaatactgtaggcagtagtaatacaatggttttgtgtatcgaaacatatctaaacaaagaaaagatacagtaaaactatggtattataatctcatgggactaccattttataagccgtccctcattgacagaaacattgttatgaagcacaccactgtattttggagtccagtagttgaagtcagtagttcacatatggggtttgataaggtgtgatgtaacattctcggaggaagtgggagtacatcgcaagttcttatcatagtaaaacatatgtcactcatagcaaactatacatgtgttaggaataatttcaaagctgtgcaacaaaaacagttcacaattaaaatagaagaataaacttcaatttaaaaatattattactcaaaaatagtaaatatttaatgtataaagtaatgaaacaaaacttactaaacaaaaatattacatcttgcaattcacactccattttagtcttttaaatttaaagatacaaataaaaactccaaatggtcacatagaatgacagaattgaagtaacctaagtttggctgggcacagtggctcacgcctgtaatcccaacactttgggaggctgaggcagatggatcacctgaggttgggagttcaataccagcttggccaacatggtgaaaccctgtctctactaaaaatacaaaaattaactgtccatggtggtgggcatccataatcccagatacttgggagggtgaggcatgagaatcacttgaacccaggaggcggaggttgcagtgagcagagattgtgccactgcactccagcctgggaaatagagtgagactctgtctcaaacaaacaaacaaacaaacaaaaaaattggccaggcacggtggctcacgcctgtaatcccagcactttgggaggccaaggcgggcggatcagttgaggccaggagtttgagaccagcctggccaacatggtgaagccctgtctctactaaaaagaaccaagaacaacaacaaaaaaaactagccagacgtggtggcagggtcctgtaatcccagctactcaggaggctgaggtaggagaactgcttgaaccggggaggtggaggttgcagtgagccaagatcgcaccactgcattccagcctgggcgacagagcaagactccatccaaaaaaaaacaaaaacaagaagtaacctaaattctatttcttcatctttacaatcacagtttattttaaatctattgtttaaatccaagaatacatggtaccaaaggaatagagacacaaattgcacctggaccattatgaatcccgagacgaatatgggtatcagtccacatgtgtcagaggtccaagtgtataactgggagttctccaaattaacttctatgtaggatacaatgtttattatacgctaagaaactaaaaaaaaatgctgatttgaatctttcatttgcattattaaaactcaacaattattatacttattgtttagaatgcgtgccaatattaaataaaaaattggtggggaggggagatagagtatttaattgtggacattcttttgccagaattgccagaacatggtgataatcaaaagctgactgactttctgttgtttcatcattgtgtttaaattatcagtaaacaatgcttctcattattgcctgtgcccaggactgcccacttccccatacttggtacaccactggattggcagtgatccactgttgaaaggaattggcaatgatccactggtgaaaggaaaattaatgatgcagcagggtgcagtggctcatgcctatagtcccagcactttgggaggctgaggcaggtggatcatctgaggtcaggagttcaagaccagcctggccaacatgtcaaacccgatctattctaaaagtacaaaaattagccaggtgtggcagtgcatgcctgtagtcccagatactctggtggctgaggcaggagaatcgcttgaacccgggaggcggaggttgcagtgagtcaggatcgtgtcactgcattccagcctgagtgacagcgtgggtggggaggggggaggaaaagaaaagaaaattaacgatgcaaaggagagagagagagacaattgctaaggccatatctctgagcagatgagaggggaaaggacccaaggcgccagcagaggggctgacagataaaagcacaaacagttcatccacggcaatgaggcaagacagagtctatgggtacggatgaatgcaggcctgtcatctaaggtgttctttcttagtttctttcccagaagtggaacaggggattcagagacttttcaccatcccagagatggaggatcctgtttctttaaggactctttattaccgattttaattttctttttttccccctgggtttttttgtttgtttgtttctgtttttgttttttttttgagagagaatctcactctgccacccaggctggagggcagtggtgtgatttcagctcactgcagcctctgcctcctcggttcaagtgattctcctgcctcagcctcccgattagctgggactacaggtgtccgccaccatttctggcctatttttatattttcagtagagacagggtttcactatattggccaggctggtctcaaactcttgacatcaagtgatctgcccacctcggcctcccaaagtgctgggattacaggcgtgagccactgtactcagcccaattttattttcttgaaaagtttgatcacttcctttaatatgtgttctttaaccgtattttttttttcatggtagaggttgccgtggatgtcactggtattaatgcttcaatatcagctatactgactcaaaagaggacattattgtgattttagaactgagatgatcaattccctctaacagggaataaatggttaaggcagctctgatttgggaaatacatttgtgagcactctagagttcagtttctttttctgcttttcatctctgagagagacgctacagagctgtgagtggccgggtgggggtgggagaggccgcccgggagcagtgcttgtccttttctgtagagttttattttgatattttcacactgctcagagagaattccatccaaaggtcctcaagtgccatgaaaaggacaaggaaagagcatctttgaacagtggcattgttaaatgccaagagcctgcctctccagtggataattttgagatattctgaaacacttttcaaaggctttgccaagtactcattgtggaaaaggacacattctatattaaactctcactgggatcagagatggccttgggtaagactgtgacctagacgatgtttgtagccctctttttcttgcctcttcctccatcagtgatgctccagtcccttcccccacacctcctcaaggcttttagggtctccctgcctccttctttttgtcttatatgattgagtgccacggaagggtagatgtcagtaacttagatcttggtgttcttctgctgcaggcttttccagtggagctacttattcctccaaaccccacagacctttaactgcttctctaccttcagtgtggctgtcctccatcctccagtccaccctttgtgctgcagtcaggaagggacacattatcttgcatttgcttaccagtgagccttagctttcaccacagcttgccttattctctaccctctagccaaaccaaacaaactgctctgttttcctcaaacccatcatgttctcaaaccctgcatgttctcaagccccaagttttggctgatacagtaccctctccctggaatattcttccttgcccccttcctctgtctcctactcattccacagacctcagtttaggggaccaattctaagaagccttccctggccctccccattcaggttaggtgaacctcacaggtattttttttggtactaatcctgttatattgtaattacttgcatctttttctttttgcccaccctctttgggattttgactggggtggctctgcccagttatttctctttttctgggaagagaaccatctgcaggggtggtggtaggtgatggtaggagcaatgccagtgatatggggctaatcccctggccagagattacgacctatgtgttcaataagaaacactacatgaatgaatgatcggataaatttagatcaatgcactacttttctccctatgatagttgcattttaatccgtaattttctcccacatataggctagaaattccattttataagagcttaagaataaattcatatcaataacttttaatgagtgtttttcatatttgaggtactatgctaggaactcaaggggcatataagaatgaataatacacagcctaagccctcaagaaatttaaaaatctattacacttatggttgcaaatgtcctttaaaaaataaacacatacacatatccaaggggttgaaaaatattaaaatatttgttttaaaatttgatttaatcttgtttttgaaagctggtaaaagtggagaggaagcacccttagctttttagcacctgttgtttgtctgggactgtgttttctcatttaatagccagcaacttatgaaggaagtgttacttttctctctctctttttaaatttttttttgagacttaaaaaatttttttttgagtcttcctctctctcccaggctggagtgcagtggcctgatctcggctcactgcaaccttcccctcccaggttcaagtgattctcatgtctcagcctcccaagtagctgggattacaggtatgcaccaccatgtctggctaattttttgaatttttagtagagaaagagtttcactatgttggtcaggttcgaactcctggactcaagcaattcacccacctcggcctcccaaagtgctgggataacaggcgtgagccaccgtgcacggccaaggggtgttgtttctcatcatgaaatgaaaacatctctcttgttaaaggtatcttggaacgcttgtgtggctgtagatggctttttttcttgtacttgaaacaatatcccgtgcttaatttccttgacctgtccatgtaacaataagatgtaacttcaaatgaaaaacattcacataaagaatcattcactagctcatcccatgtaaacacatataagcaaacactgacgttgccactttcaaagccaaaagaaaatgcaatcacaagtagggatgatagtggtaggaaaggggccacagtggttttctgtggtgtttggatagaatacagtggttattgtctaaaagttttctgtcttgatgaccctttcttggtcctttggctagaaaaagcaagcttttttatgtttcctctctgaccattggtatttctgggttgccagcttctccagcacccaatctaggatatgggaggcaaaaagaaaatcagagaactcactgctatgtggctgttgggattgcgaggtccataattggcctgccatattctcctcacttttcagagtcttcttatgtttgtttagatatataacattttagctgttcatagcagaatgaataggaagaagtgtgtttattttatgttgtccctgcctctccgaatatttgaagcatctaagacaacagaatagaacagtcaagatgctgccacttacctcttataaaatgagacaaattaggaaaaaagaaaagcacagttatcgagggaacaaagctggttggttttctgcaggtcatagccttaagttcaaattatttgtctttatctccaccttgtctaggttggagaattaactggagacaataaacattattgttgctaatattttatgtacatgtatgattatatgcattacgattaaagaaatgaaagtataaccatttgttaggtaggaaattactgaatccttatcaagaccttgatgagaatgttgaaaaagtagtgatgaggaaaattgtgtttgaagtcatcccacatactttttatgagttaattataattagtaatacgtgcacgatatatacatctcttgaatattaaaatattttgaagtaggcagtcatatactcattaacagtgttccattgcattgtgtcacatggtcactttaactgaaatcttgttggagtgggaggaggaattcatcatggtggaatagaatcagatgttcaaataaagcaagttgattttggagctgtattagaaaattgaaaatgttacaaaagtgcagagtataaaataaatcagaactgccaacactgtaaccatttcaaagttacagggtgaggcagagattatctggattttcatttcctgtaagatgtaaaggatgaaacagggtcagagaaacaccctgggtttagtgcattggttgcaaaatgttcagaagttaattatgaatatttgctgcctttagtcatatgctcaaataccaacttgtattttaatcaccaataaataattagagtctatacaattattgaaatactttgtatttgactggaaagtttaatacgtaaaaaataatgggctgcctctaaaatatttttctttcctttttttcttttttgggacagagtctcactttgtcgcccaggctggagtgcagtggcatgatcttggctcattgcacctctgcctcccaggttcaagcaattctcctgcctcagcctcctgagtagctgggattacaggcatgcaccaccacacctggctaatttttttatttttagtagagacggtttcactatgttggtaggctggtcttgaattcctgacctcaggtgatctgcccgcctcggcctcccaaagtgctgggattacaggggtgagccactgctcccggcctttctttacatttttatccaacaaaaggacttcacaaatatggcctttgctcacaataagcaaagtgaaattatttctttactttcagaagagtatcactaacacctccaggcaaaagtagtgaggacacatggggaagaaaattaatctgattattaagatttgcttaaatgttgcaaaaactggtattgattatcagtaataaacatatatattatatattatggtctctaaacaaagtaggagaaaaatgaaaatctgatgctccaaattgtgttggccagttaagggggagctttatgctttggcagaggtgtaattcaaaggaataggtacttaaagaaggactaagttttggcatttcttttttattcattatttactaacaaaaaatagccactgtaaaattgcctcactgaggctgtaggatcttgaaatttcaattttaccatcaaaagtaccttgtaggctggatgtagtgactcatgctcataatgccagcacattgggaggctgaggtatgaggattgcttgaggccagcagttcgaggctgcagtgagctatgatcataccactgcactccagcctgggtgatagacctagaccctgtctctctctctaaaaaaagtggattgtttatgcaacatacttcctctctgagtttaaaaaattgacaaaagaaatgtaaccatcatgactatactattctgcatatttcatgataatttgataagctatcaaacgtaagtgttaaaagattcttttacatacttttcaaatgctcttgtgactggtgaggtcactcaagacacttgagattacaatgagggacagtccaatcagagaatgggtgctggtttagttatttcacactgtgtaacaaattatccaaaatgtaactgcaaataaaattacagatattcatgatctcatatagcttctgaggatcaggaatctaggagatgcttagagcgtagatttggttcaagataactcaaagatatgtagtaaagcttgtcagggctgcaatcatctgatagttcaactggggaaggatctatttccgaacttacttatgtgactgtttgagggtttctcatacttgctgactgtgggctggagtctcagttccttgccaaatagacccctccataagctacctgagtatcctcatgacatgacagctggcttcctccaaaatgagagagtgagcccaagaaagaatccacagctatgaataaccttatctcaaaggtgatatgctactacttcttcttttttttttttattttaatttaatttttttttttattgatcattcttgggtgtttctcacagagggggatttggcagggtcataggacactagtggagggaaggtcagcagacaaacaagtgaacaaaggtctctgttttcctaggcagagtgtttgtgtccctgggtacttgagattagggagtggtgatgactcttaatgagcatgctgccttcaagcatctgtttaacaaagcacatcttgcaccgcccttaatccatttaaccctgagtggacacagcacatgtttcagagagcacagggttgggggtaaggtcatagatcaacaggatcccaaggcagaagaatttttcttagtacagaacaaaatgaaaagtctcccatgtctacttctttctacacagacacggcaaccattcgatttctcaatcttttccccaccttgcccccttttctattccagaaaactgccatcgtcatcatggcccattctcaatgagctgttgggtacacctcccagacggggtggtggccgggcagaggggctcctcacttcccagtaggggtggccgggcagaggcgcccctcagctcccggactgggtggctggccaggcggggggctgacccccccacctccctcccggacggggcggctggctgggcagaggggctcctggctgggcagaggggctcctcacttcccagtaggggcggccgggcagaggcgcccctcacctcccggacggggcggctggccgggcggggggctgagccccccacctccctcccggacggggcggctgctgggcggagacgctcctcacttcccagacggggcggttgccaggcggaggggctcctcacttctcagacggggcggttgccaggcggagggtctcctcacttctcagacggggcggcctggcagagacgctcctcacctcccagacggggtcgcggccgggccgaggccctcctcacatcccagacggggcggcggggcagaggcgctccccacatctcagacgatgggctgctgggcagagacgctcctcacttcctagatgggatgggggcccggacgaggtgctcctcacttcccaggtgggatggcggccgggcagagacgctcctcactttccagactgggcagccaggcagagacgctcctcacttcccagaggatgggcagcccggcagagacgctcctcacttcccagacggggtggcggccgggcagaggctgcaatctccgcactttgggaggccaaggcaggcggctgggaggtggaggccgtagcgagccgagatcacgccactgcactccagcctgggcaccattgagcactgaatgaatgagactccgtctgcaatcccggcacctcgggaggccgaggctggcggatcactggcggctaggaggtggagaccagtccggccaacacagcgaaaccccgtccccaccaaaaaaacacgaaaaccagtcaggcgtggcggcgcgcgcctgcaatcgcaggcactcggcaggctgaggcaggagaatcaggcagggaggctgcagcgagccgagatggcagcagtacagtccagctttggcccggcatgagagggagaccgtggaaaggagagggagagggagacgggagagggagagggagacgggagagggagagggagacgggagagggagagggagacgggagagggagagggagacctacttcttctttattttagtggtaaaataaacctaccatggtacaaggtaggaggggacaacaccaagtggtcaataccaggaggcagggatcactgggggccatcttgaaaactggctaccacaggtccacgtggcagatttgcaacttggatttacctagaacttgtgttaaagcatacctcctctagtagtcattgcctgttattgggaagaaatgactagtgaccattcagacaaactgcaaggggcaaatgaaatttgctgacatttctctgctaacattacatagcctctccataacttgagtatactgactgtactaagaaataacaattcaacttttagttacactttttatgggtaccaagatccaagaataatttaaaaaatatacatgatctacgtatagttctgagaagggcagaatgtgtaataaagtaaaacagtatgctgtcacagaaagttaggtgattaccaatcctaagcatttagaaataaagctttaaaaccttcctatgaaaaagatggaaaacaagagacacttttagctttcttatttcccagcttgaataatttaattggattttataatatcagtaggaatcaatgactgcttttagctttcctactttgggtgaaagataagtcactttgaacactcctggtagtaaattgccaggtggagagatatgaccattaaaatgaccatatatagttcttggctttttgtaaaagaaatttctaatagttttcaatgtaggaaagttttctaaagggtatcatataaatcagctacttgaaactcacaaaccataaggtacctgacccaggcaaatcacatacacagtggtaggggataaacagctctactgcacttacttgcacaaataaataaataaacagccaattttaaatataatagagtttttaatcatcaaataacgtatccatctggttaggtcaagacctatttgcaggatagaaaggctgtttagaagagttgtggccaagtgcggcgagtcatgcctatagttccagcactttgggaggctgcggctggtggatcacttgagaccaagagtttgagaccagcctgggcaacatggcgaaaacctgtctctacaaaacacacacacacactcacacacacaaaatagctgggcgtggtggcacacacacctgtagtctcagctccttgggaggctgaagtcagtgggttgcttgagcccaggaggtagacgctgcagcgagctgtgatcatgccactgcactgcagcctgggcaacagtgtgagaccctgccaaaaaggcagagttgtggcaacagatggtgacttcttcccttttctaatcctccaggttatctgtgcttacatcttccctcagtcttagctaggtaacgtatgccccaagatgctctgcccttcaggagagagaattattgtaggtagacagctggtgatttctgcctaactaagaaaaggagataggaacgtattagctgctgactttcttttagcagtggttttccaccttggctgcatattagaatcagattttgccgagtgggatccaggcactaaacttttttttaaagctccccgcgtgattttaatgtgcacccaaaattgagactctttgtcttaggtcagggggtctcatgtcagcgcccattggaatcacctggagagcatgttaaagttacagaatgctaggctccatcctccagtctgattcaggagggctggggtgggacccatcatttgcatatttaacaagttcccagatgctgctgatgctgctgtaccacgctgacaagtcttagaaaaatttggctcttgttatatttttatacaacaaaaaatggagttcagctgtgagtggggtgtagggggaggaatgaaaattggtaaatgcagaggacagatatcactagtctcccctcttttctttccccatcttcttcaaagctgaagttagactgagatctacccctgcatttcccctcctcgattttcatctttcacggattgaggaaacaacctgtgaacggcccaaagccggctagacccaacctaaccatccgttttagcgggtctcttttctcacacaggccgaccgcctctccgccttgacccccacctccactcaaacccgctccatctattaacgttctcttctgcccagccacgcccccggcgttctccgtggttgcgcacctgacgtacatcgttcaaaacgtgcccagtgtttccctccgagggcactgcgtgccgcgcaggcgcaaagggccaggtgctggaggtgctgtcatggcctgcctcaacccggtggtaaggaagacctcaggctctgtgtagagggagcgccctgggactccgggttcacggcagccgaaccctgcaccttttgtttccccctgacactttacagattgtcataaaccctctctcttccttaggggctggggctcttcttcacgtctgtgttggaggaagctgctgagggccagtagttcagcaggaagttgggccagccccgccaaaagaacaagtgccctttttctctttttacccaaactgaggctatctagttggggtgtttagaggtggaactgatcctcaaccctgctggtttcctagatactagaaaacctccaagttcggttgtgttaattttaccgtggacattgttaattccaagctgtattatttactgcttgaaataacaatgtgatatctcatgttacctccccacatgtttttagtgtctttcactacccgcccatttcgttgtcctttaacaacttaatgcttaagtgtacaacctacattaccctcctacctctaacggacacttaatttgcacagtgagaatttctagtctcagtggcacttaggagaccatcaatcttaaaaacctgaatcaaagaacaaaaatcaaggattcatctttattaccaattcatctcaacagacttcacatttcgtgaaaggcaatgtgcctgtccagatctgtgtaattttatgggttccgggtattatatatgcagtataacagctccatttttagagacatgctactttaattatatgtgttttatgatagtgcgttttaagatacataaaatacctatactctgcctgaatataaggttactatgtatgccaatttatctgattgtgaattctatgaaggagtgtctgtattttaaatagaggagttaagatggactagacatagttttaataacagggatgcaatacaaagtctgtggtcatagaagagaaaatatgttcaatacctattttgatttctgaaaaactgtgttctaatgggtactttttgactactgctgtgttaagattttttagacctaagagttttttccttcggtgttaagcgtgatcacactagctgggactaccactgaagcatcaatttagtatgcctttatcaggataaactgttttagaagaagcacctaatttaggggcatttagtcttaatgcatgtgcttgtgaataacattatttaaatgttactgattggcctattcgtataggtttaccctgggtctttagaaggattaaagcatagctttaaatactaaatactcttaggggctgggcacggtggcttacacctgtaatcccagcaccttggaaggtcgaggtgggcagatcacttgagcttaggagtttgagaccagcctggccaacatggtgaaaccccatctctactaaaaatacaaaaaattagccaggtgaggtcgtgcacgcctgtagtgccagctactctggatgctgagacaggagaatcacttgaacttaggaggcagatgttgcagtgggcccagattgtgctaccgtactccagcctgggtgacagagcaagactccatctcaaaaaaaaaaaaataataataataataaaaaaaaagcacagctactcttggcatgaacaggagtatttaggagtatttatttagtactcttaatgagtactgaatagggtaggatgaaaaggcaatcctagagtgccacaattttcattttggcgtgattaagcaatttgaaataagagcaactcaactaaattcctgctttgctgtttcttgccggtggaacttccactaagtcagtattgtcagcacatagcattgccattttggcctgggggcatagtttatatagatatgaagggctgagttttttcacataccctcttttttgttgctataactagtgtttaatctgggtagaaatctgcttaatttcattgtcatggcatgtttgactaggaggtattttagaatgttatttggtctcttcagtatgcacactgtggatgggtaaggttgttcgtgcccttcttaggttctggtaggaaatccgttttggaacaggtgtatttgataatggtccagaatatatattttttggactttgtgtattttggaagtgagatgagctttaattgctctattttaagtgtttaccccagttttctggcttggagtttatttatatttgtggaaataatatagtgaaccctaaaaaattctcctttggccactttgataaagaggtaaattgaaaacagaaggtctatttctggttgacttacattaatttcccttttaaaaggagttgaggaggttaaatactgacacaaaaggcaagtaacatgacaataaccatgcatctttgagattattagctcatatgttattgtagttctgtaattcagtcttgtagataggctgagactatgggtctgaagctaacacagtttatggaaagctaagactatattgggaataggaatgtacatagtaaaagttttaatggtgacttcacaagactagaaggtatgcactgcatatcttttaaggccaaatatgttctaacttgagaagtcagaactttaacaggccgggtgtggtggctcatgcctgtaatcccagcactttgggaggctgaggcgggtggatcacgaggccaggagttcgagaccagcctgaccatcatggtgaaaccctgtctctctaaaaatacaaaaattagcggggcatggtggcatgcacctgtaatcgcacctactcaggaggctgaggcaggagaattgcttgaacctgggacgtggaaattgcagtgaactgagttcgtgccaccgcactccagcctgggcaacagagcatgactccatctcaagaataaataaataaataaataaataaataaataaataaataaaatgaaactttaacaattgcttttatgtagcctaaactctacagatctgtaattgaagatgtaattgaaggagttcggaatctatttgctgaagaaggtatagaggaacaagttttaaaagacttgaagcaggtttgtagccgatacaactttttcttcctgtcttttgttgtttttttcagcatacaaaactgatatagttctgatctctcaaattatagtttagtacttacccattcattgtgccatcaggatgacgttagtttttaagaaactgaaaaaaagagaagtatcattatatgtgtatatatttttttaaagtaaactttttttttcccctctgcagctctgggaaaccaaggttttgcagtctaaagcaacagaagacttcttcagaaatagcatccaatcacctctgtttactcttcagttgccgcacagcttgcaccaaacattgcaatcgtcaacaggttggataccattagtaaatgagtactgttagtatcttcagaacaaattctcatttgggaatgtttttcagttagacagggtaatgttcttagggtgagaaggcttggacacctaaatcatttctattaaatgaacacagtataaatcattgccccatgtaattattgattaaaaactcaggttattcgaactagtttttattttaaatattaaattttacaaagatgataaagcctttctttagaggaaagtcacatagtttgtcagctgttgggagcacccattggtaatttcagataatttgactgggtctagtcaaggattagaagtggcagagggaaaggtgagtgcttgcaagtttgtgtgttctctttctcttattttttgtgtatattataaatctgatatattgggagcaaaatggagagttcagaatatggagattattcaggctacctcactgttttggatatataaaataatggctagaaattgatcatgtgcatttatctttattcttggacttagcaaatctagacttctgcttttaagggaaatgtttgtccacattatgcgtatcaatttaaactggaagggactagctaataaaagataaaacttaagagttttctatccttgtatgcttgattcctttctttttcttctgattcttataatctttatgttactcatatgtgtatatataaatgtatactcgcatacaaacaagttttattgggtttagctgaaattcagcagagtagtctgcaagaagtgagggtagattttggattggattatcagtaataagcagatagttctttgcatgcttgggaaaattcacatgaaaattacatgggccaaggtgaagagaacattgtaaggatgcttgtacttcttctattacaaagtgggagaatttacatgtggcagcaattctaacatataaaaatgaataaattaacaatgaatgttgaattagcaaatacaagttttatcgaatactgtgttaataaagtataattttgctctgtaagaattagtcttggcagttttaattgttgacacattgaaacatttttcatcagttgggtttttggctatgctttaattttaaactactatttcattgggacatctccttctctgtttaaataacattcctttggagttttgttaatcactgttttatttattacagaatgctaaagatgtttttttaacttatggttggcatgagggtgtggtgggtatggaagaggaaaatacttgactgtcttttatcagaagaggccgaggtgggtggatcacctgaggtcaggagttctagaccagcctggccaacatggcgaaaccctgtctctacttaaaaacaaaaacaaaagcacaaaaattagccaggcgtggtggctcatgcctgtaatcctagctacttgggaggctgaggcaggataatcacttgaacttgggaggcagaggttgtagtgagctgagatcgcgccactgcattccagcctgggcgacacagtgagactccatcttaaaaaaaaaaaaaaaaagcatggtgaacacttctaagattctgtcattcaaaattgcaatactagattttgccgcaagatggtaatattaccagtgatttaaataacaaaagtcttgcaactagtgtatcaagtttgtttttactcagctccttattctgtatcttagcagttagaataatagaaataattacattttaaatagtttttctccttattctcttctacatcatttataatgaagaggtttcagaggaattacatgtatcccttaaaagtgctttataggcttgttcctgtctctcttcatctttaggtaccaaacagtaagattcttgaaataaatagtctcataaaattgaagtacttcttaattatatcttctcatggtatgcttttaaaagcctgattaaaataacttaaacttctagaatttttttatctcttttgatagcaagttcaaattaaatctacaattcaataagtcatttgcctttgtctgtaccatcttaaaacttgtttgctcagtcaaaatcacaatgagataccgtctcacactagtcagaatggctattattaaaaaactgaaaaacagatgttggtgaagctgcagaaaaaagggaccacttatgcactgttggtgggaatgtaaatttgttcagccactggaaagcagtttgcagatttctcaacttagagctacaattcaactcatcagttctattactaggcatttacccgaaagaaaataagttgttctaacaaaaagacacccacacttgtatgtttattgcagtactactcacattagcaaagacatggaatcaactcaacccatacatggtggattggataaagaaaatgtggtacatatataccatggaatactatgcaaccttaaaaaagagagaaagaaatgtcctttgcagcaacatgggtgttgctggggccattatcctaagtgaattaacacaggaacagaaaaccatatattgcatgttctcacttataaatgggagttaaacattgggtacatacagacagaaaggtgcgaacactgggtactccaaaaggagagaaggagagaagggggcaagggttgaaaaactacccgtcaggtactatgttcactatttgggtgacaggatcaatagaagcttaaacctcagcatcatgtgatatacccacgtagcaaacctgtacacataccccctgaatctaaacccagaaacttgtttgctctatcatatgttcttcgttttttatttgtgtagtaatttcctgtatcttcagttctctactttgtttggtctcaggacccctttaagctcataaaaattaaggaccccaaatagcttttaaaatgtgggttgtaagtatctatttactatgttggaaattaaaacaaaaatttaaaaaatattggtttatttaaaaatttaattacatgttaacataatagcatatatttatgagtaataattcttcgagaacaaaaatatttagtaagaagagtgtcatcaattaatgtcggcttaatgaggtttgcagaaatgagctggattcttatctatttctatttatttacattttattgtatgtaaggtgttcaccatagtgctttgatatagatagatagatagatagatagatagtgaagaggttggtatagtctagcaaattaacatatctgtcatctcacataggtgctcattttaggtacttttagtatgccttaagtcttctcttttagcaaaaatcccaagtgcagcacaacattattaagtatagccctcatgttatctattagatatttagacttattgatcctatgtatctgtgactttggatcctttcacctacatcttcttattttctcccttcctgcctctggtaactgctattttattctctatgtctgtatttgtggttttttttttttaacatataaatgagatcatgcaatacttttctttttgtgtctggcttatttcacttagtataatgtccttcagtttcatctatgttgtgacaaatggcagactctccctcttttaaaaagctgaatcatattcctctgtgtgtgtgtgtatacagacataccacaatttctttatccatttgtccatttgcagacacttcggttgtttacaaatcttggctatcgtgagtaatattgcaatgaacttggaagtgtagatatttttatgaggtagtagtttaatttcctttgggtatatatccataagaaggattgctgaatcacgtggtaattctatttttaatttatttaggaatctctgcacagttttatacaatggctgaccattctgcattcccaccaacagagtacaggggtttcctttcctctgtactctcaccaacacttgtcgtctcttttctttttggtaatagccatcctaacaggtgtgagttgatatcttaatgcagttttgacttatattcctctgatgaatagtgatgttgagcacctttttgtatacctgttagctgtttttatgttgtctttggaaaaagatctattcaagtcctttgccaatttttgaaaaggttatttgtttttctgttattgagttgtgtaaatcttttaatatattttggatattaagccctttatcagatatatggtttgcaaatattttctccgtatctgttggctgctgttttattttgttatttgttttctttgctgtgcaggagctttttaatttgatgtctgtatttattttattttattttatttttttgagggagggtcttgctctgtcatccatgctggagtacagtggagcaatcataggtcactgtagccttgactttccagggtcaattgatcctctcacctcgacttcatgagtaactgggactacaggcatactctatcatgcctggctaattttcacattttttgtagagaccaggttttgctgtgtcgtccaggctggtcttgaactcttggaatgaagcaatcctcctgcctcggcctcccaaagtgctgggattacagatgtgagcgactgtgcctggcttatttattttcgcttttgtagcccgagcttttggtgtgatatccaaaaaatcattgccaaggccattgtcaaacaggttttcctctgtgtttttgtcttggagttttatggtttaaggtcttatggttaggtcttttgtctattttgaattgatttttatgtatggtatgaaaataagagtccatttcattcttttgtgtgtggaaattcacttcttccaccaacaaccatttattgaagaaactatcctttccccattgtgtcctcttagcacccttgttgaaaatcagttgaccatatgtgtttgggtttatttctgggctctctatactgttctgctggtctttgtgtctgtttttgtcagtgccatactgttttgattactacaggtttgcaatatagttttaaacaagaaaatgtgatacctccaactctgctttttttttcttcccctctgaattgctttggtatttaatgtgttctgttgttccatatgaattttagacttttttttgtatttctataaagaaagtcattggaattttgataagagattttgttgaatccatattttgctttgggtagtatggacattttaatgatatcagttattccagtccatgaacatgggtattttcccatttatttgtgtccttcagtttcttatatcaatgttttatagttttcagtgtacatatctttttttttgaggcagggtctggctctgtcatccaggctggagtgcagtggcacaaccttggctcactgcagcctccaccccctgggcgcaagccattctcccacctcggactcccaaagtagctgggactacaggcatgtgccacaacatctgactaatttttgtattttttgtagaggcagggtttctccatactgcccaggctggtctcaaactcctgagttcaagcaatccacctaccttggcctcctagagtgtgcatatctttcaccttcttggttaaatatattcttaagaattttattttttaagatgctattgtaaatgagattgtttttatgattttttggataggtagttatttgtgtacacaaatcccactgattttttttgttgattttgtatcctgcaactttactgagttcatcctctttaaatatttggtagaattcagccatgaagccatctggttctgggcttttctgtgttgggaggtttttaattactacctcgatctctttattttttatatctgttcctaaattcaatctgttgtgatatgttgtttttgtgaaagtataggaagaaaatctagccttccacagatacatagttggaaaaaagggaagcattttaatagtattttcagataattgataactacactaaaactcaacaaatggtagtttctgagaggttagctgcatgatggaatctggaaccacaaggaactttttggaatatttcattagggtttattggtataccttgcactttgaatggctttttaacacgtgtaatgttacagcatacattggttatttggaaaaattggtttcctgtcatacagttgaaacgttgttcattatacaagtttaaaaaaatcatattcattgatataactaggcctctcatccattgtggttgatatgaattttccaaaattaaatttttgcttgaaaagttgagttttatcattggcaaatacatgctgttagtttttcttaaagtgatgggcatgcttagtttatgtttaaaaaaatgtctgccagatacccagtttgaataactatagttgctgtcagatattctttcaagtaaaaatggtgtttcttgaaaaaagaggccatgtttttttttcttttcaacttttattctagattcaggggtacacaggcaggtttgttacatgggtatattgcatgattctgaggtttggggtacaaatgcatagtacccccaggtactgagcatagtatccagtagttagtttttcaacccttgccttcctctcaccctcatccctctagtagtacccattttctcttgttggcatctttatgtccatgggtactcaatgtttagcttctatttgaaagtaagaatatgtggtatttgtttttctgttcctgcattaattcacttaggataccagcctccagcagcattcgtgttgctgcaaaggacatgatttctttgttttttatgagtgcatagtgttccatggtgtatatataccacattttctttatccaatccactatggatgggcacctggattggttgcatgtcattgctgttgtgaatagtactgtgatgaacatgggagtgcatgtgtcattttggtagaaagatttctttcttttggatatatagccaataatgggattgctgggtcaaatggtagttctattttaagttcttagggaaatctccaaactgttgtccacagtggctgaactaatttacattcccaccaacagtgtacaagtgttcttttttctctgcagccttgccagcattggttgctttttgactttttaataatagccattgtgactggtgtgaggtggtatattcttgtgttttgatttgtatttctctggtgattagtgatgtggagcattttttcatatattggccacttctatatcttttgagaagcatctgtacatgtcttttgcccactttttaatggggttatttgattttttgtgaattgttttaagttccttatagattctggatattacaactttgtcagatgagtagttcgtgaatattttctaccatcctgtaggttgtctgttcactctgttggtagcttcttttgctgtgcagaagctctatagtttaattaggtctcacttgtcaattttgtttttgttgcaattgcttttgagaatttagttataaattattttccaaggccgatttctagaatggtgtttcctaggttttcttctaggattcttatagtttgaggtcttacatttagaactttaacccatctttgtaactgaatgcaagttcagtcactcactgcttgcagagtccagttaacaagagggaggtgtggtaggaagaaagtgactttgcagccaggtgcggtggctcatgcctgtaatcccagcactttgggaggccgaggtgggcggatcatgaggacaggagtttgagaccagcctgaccaacatggtgaaacctgtctttactaaaaatacaaaaattagccaggcttggtggtgcgtgcctgtaatcccagctgctcaggaggctgaggcaggagaattgcttgaacctaggaggcagaggttgcagtgagccaagatcatgtcaccgcactctagcctgggcaacagagcgagactccgtctcaaaaaaaaaaaaagtgactttatttccaaagctggcaaggaggaagtggcttgattcctgtccaaagcaatgattttgaattttgatgagggaaggcaagggtttaaaaaggtaaaacttgatatggaaggcatgtaagaattgtactgagtacaacgtctgtgtgtcttgttctgttggctttcttgggttccagtccacctggagcatgggctggagtcatctcaacaatggcaaggttgtggactagctgccttgcatttatcactgcagttttgcagctgggtccccaggcttggtctgtttgtctcaagattagcccctagaacttctaactaggcacataattagatactagcatacagttagatagatgtgaagggagtatatgcggtgagaaagggaaggacatgaagtctattttcaggctaagggaaaaggcttctgaagtttgcttcaaggttaggtcttgaatccaaagggaaaggaaaaaaaaagttttaaaatgtattttgaatttaagctgcccagttacatcttgagttaatttttgtatgtggtaaaaggtaggagtctagttcattcttctgcatatggctaccagttgccccatcaccatttattgactagggagtcctttccccgttgcttatttttgtcgactttgtcaaagatcagatggctgtaggtgtgtggctttatttctgagttctctattctgtttcattgttctatgtttatgtttttgtactgttgctatgctgtttggttactatagacttatagtatgggtgaagttctgtaatatgatgcctccagttgtgttcttttttgcttatgattgttttggctgttcaggctccttgttggttccatatgaattttagaacagtttttttctagttctgtgaaaaatgacattggtggtttgataggaatagcattgaatctgtagatttctttaggatgtatggccattttaatgttattgattcttgtattccatgagcttggagtgtttctccatttgtttgtgtcatctatgatttctttcagcagtgttttgtagttctccttgtagagatctttcccttccttgagtagatgcgttcctaggtattttatttttgtgtgtggctattgcaaatgggattgtgttcttgatttggcgttcagcttgaacgttgttggtgtaaagaaatgctactaattttatacattggttttgtatcctgaaacttaactgaagacatgtattagttctaagagtcttttggtgaagtccttaggattttctaggtataagaccatattgtcagtgaagagagatagtttgacttgttttcctgtttggatgccttttactttttctcttgagtgattgttctatacctccagtattatattgaataggagtggtgagattgggcatccttgtcttttctggttctcagggagagttcttccaatttttgcccatttagcatggtgttggctgtgagtttgtcatagatggctcttattattttgaggtatgttccctcaatgcctagtttcttgagggtttttcttttatcatgaagtcatgttggattttaccaaaagctttttccatgtatattgagatgatcacaggtttttgcttttaattctgtttattgtatttgtcaataaatcatatttattgatttgcatatgttgaaccaactttacatcccaggaatgaagcttatttagttgtggtgagttaacttttgatgagctgctgggttcagtttgctagtattttgttaaggatttttgctctgtgttcatcagggatgttggcctatacttttctttttttatcatgtctttttcaggttttggtataaaggcgacgctggcttcatagaatgagttagagaggagtcccttctcctcaacattttggaatagttttcagcatatttggaatagtatcagcactactttgaacatctggtagaattcagctgtgagtctatctggtctggggctttttttgggtggtaggttttttattactaattcaattttggaactcgatattggtctgttcagagttttaatttcttcctgattcaatcttgggagattttatgtttctaggaatttatccatttcctctagattttctagtttgtgtatgtagaggtattctaatagtatctgaggatcttttgtatttctgtgattggttgtaatgtcatctttgtcatttctgactgtgcttattggaatcttccctttttttctttgttaatctagttagtgttctatcgatattgtttatcctttcagagaaccggtgtttggtttcattgattctttttttcccccttaatgatcactgtcagaaaatcattgattctttgtatggatttttgggtctcaattttgttgtgtttcactccgattgtagttatttcttttcatctggctctagggttagttcttgtttttctagttcctctaggtttgatgttagattgttaatttgagatctttccaactttttgtggtaggcatttagtactatacagtttcctcttaatactgcttttgcttcatctcagagatttttggtatgttgtgtctgtgttttcatttatttcaaataattttttgatttctgccttaactttgttgtttacccaaaagtcattcaggagcaagttttaaaatttccatgtaattgtgtgatttggaaaaatcttggtatacatttgtttttgtttttgttgttgttgttttttgcttccaactgttattagtctttttattctcttggcaatgtcttccagagttaactacttctgttgtaggtgataaaaatgtataaggctctacttcagatgttggtactgctgtgagcgtggtctcttcctttactcaactgagaattaaaacttgattcttttttatattccagtcccagaagtaattccctctatagaagttatctaatgatagtcttattcatcctagtagtggcttacaaccaggctctaacctctccaggaatactataggatggatttagcataaacatatattaaactaaaaaggattctttcaaatgagtttaagtgcattttatttttagacaacctacttgacaagttttttgttttttttttttgacagagtcttactctgtcactaggctggagtgcagtggcgtgatctcggttcactgcaacctccgactccctggttcaagcgattctcctgcctcagcctcctgagtagctgggattacaggcatgcaccaccatgcccagctaatttttttatttttagtagagatggtgtttcaccatattggccaggttagtctccaactcccaaccttgtgatccaccagccttggcctcccaaagtgctgggattacaggcgtgagccaccacgccagccgacctgtttttcttaaaaacaatgcttccactccaaagatataatggtcgaaataaatgaagagctcaagttgacatcagtccaatttatcttaagtcattgtgtcatgtgggtgataggcagcaagcagttgtgatgacaggtgatagagccaaagtaattgccaattggttaacatttttccatttctaaaccatctttaaagaaaatcatatacagggtcacaccatcctcatggtagagcaactatgccatctggattcatgtttttactggtaaaaaactggtagttgttgaaattagtaagatgtgcttggtttgttctacagcttctgtcataaaaggttttactgtttaggtctctgttcttcatgttggcctttgattgattttatgtaatctttgatgtacttcttgtaggcttctttttgaagtttgtttcctgcaagtgatggttcatgacagtatcaacataagtgattaatgtgctttcggtaccctcaccctcagggccttctgcggaggcatttctgtcaatgttaccctctgtcctactgactatcttcttccccacccccccgtcccacttccaggcacagccagtctgcaatctcccagatattgtaaatgttggagaacagctcatcatggctgataaggtccgggtagataatcttgatggcagctgaagggagatgcggtggtgctggcttagcaggattccagagattagagtgaacatgatgcagctggagcagtgcttggtgggtgggaggagtgggtggaaaaggagatttctgtttttattcctctgtggtctatgagtatggttggtatgataatttttttgaacttattgagatttgctttatggctgagcatacggtcaattgtggagtatgttccatgtgcagatgagaaaagtattgttctatggccaatgggtggagtattctgtagatgtccatgaggtccaattggtcaagtttaaattcataatttctttgttagttttctgcctcgatgatctaatgttttcagtaggatttcaatagggggaagtcccccaccattatcgtatggctgtataagagttttgtaggtctagaagtacttgtttgtaattctgggtgctccaattttgggtgagtgtatatttaggatagttaagacttcttgtggaattgaatgcttatcattatataatggccttctttgttttttattgttggtttaaagtctgttttgtcttatataataatagtgacctctgctctttttttgttttctatttgcttggtggatcactcttcagccctttattttgagcctatgggtgttttatgtgcatcttgttttttatctaacttgccactttgtgcctttttagtggagtgtttagaccatttacattcaaggttaatattgatatgtgaggttttgtttttattgagaaggagtcttgctctgtcactcaggctggagtgcagtggcacaatctcagctcactgtaaccttcgtctccgggttcaagaggttctcctgcctcagcttcctgagtagctgggatggcaggcgagcataaccacgcctggctaatttttgtatttttagtagagacgggatttcaccatgttaccaggctgatctcaaactccttacctcaagtgatctgcctgcctcggcctcccaaagtgttgggattacaggcatgagccactgtgtctctggctgatatgtgaggttttgatcctatcatgaaattgttagctggttgctttgtagtttctgttgtgtggttactttatagggtctgtttataggcctaagtgtgttttcatggtagctggcatcagtcttttgtttccgtgattagaactcccttaaggagctcttgtaatggtggtctagtggtaactaactcctttaatgcttgcatgtctgaaaaaacctttatttctcctgtgcttatgaaacttaacttggcagggtatgaaattcttggttggaatttcttttcattaagaatactgaaaataggcccctagtctctcctggcttgtaaggtttctgctgagaagtctgcttttagcctaaagggtttccttttgtacaggatctgacctttttctctagctgcctctaagattttttctttagcattgacctttgacagtctgggagggcaggggccatgaagagtggggccagattgggcacatccatctacaggtcccccagtggcaggtacaagcactgaagctgagggagaatccagtgggcagccaccaggtgcccagaggtatatctaggcatggaactgggaaacctccttggccccaagttctctgcacagtgatgaggggcagcctaaaattctaatccagggtagtgagtgctccagatatctggagatctgcctgggcatggagtggagagggccttcctgcatcaagatctctgcataggaggggtgggatgactcaggctagtggaccaggcaagcaggtgctatgaatacctggagatctgcctaggtgtgtagcagagagggcccccttgcaccaggatctctgcacaggaagggtggagtggatcaggctgttaatcaaggtgagtgggtgctccaaaggtctagacatctgcctgggcatggagtggagatgacccttctgcagcatgatctctgtccatgaaagatgagtggctcaggctgctggtcacgcaagcaggtgccctgaatgcctggatttctgcttggggggtggagcagaggggaccccacttcacctcgatcccaggggaacagcaggggcaccaagtgatggcacatgcagttcagtttcagattgccaagctggccctggctgcaagtctcattgcccaggagagactgcaactgtagcagctctcctcccactccaggcttgcaatagggaagagtataattccaatacctacttctgaggtgctttccacctcagaagtggtggaggctgtggaggctactaccctgctccagagcaggtgcttcagtctgtggcgcaagagtaaaatgcttgtatggccatgcagctgggttacctagaatggctgactttgtatgcaaccagattaaaaatggcatcctgtgcttggtcctatgtctgggaaagtgtctgcagcttctcctagtgtttttccctcacagcgtctccaaccctttccccaagttagcttcagggattgggaggaaaaaaaaagttctccctcagcctgagttgctctgatctcctgtggaaaggtgagtcactgagggaggctgtctttctctctcatgtactggggcttcacttacttttatcagccaaatgccatcacagtggctgtttggcaggattctcgtctttgggatttggagtatcctgcatgattccattagattctcattttccttcttgaattaaagctcaaaccattgatctttatttactattttgttatttccaaatggtggaggcctgctaacaggctttaatctgccacctgaggaaaaaaaggctatattaactcccagcttaaacaatgacacaaatgcttttccttgtacttttgcatgctgcagaaatgctttatccttctatttcatctcgtaaaatattaaaaggaagtatacttgctagttgaaatttagtataataattcttagattatgcaaaggactttcttaccttaagtgaaatatctttgtggttgttcctgctgtttttgtctgttgtgtttttttaactgtgagtagcaattgagaataaagtgaccacttgcaaggtttggtgctactaacttaattcatgctaagatgtctacagttttacttgttattgcttttgcatcatcagttcaaatgtcaacaaaaccaaataaaaatactaaatgagaaaaaggcatactttgtcttggtatcatgaaaatagttttgaccttataaacaccctgaaaatggtcttaggtagcctcagtggtttgtatattacactccgagaactgttgttctgcatgtagggtgactatatgtaatttataatctagttttgagagagagacaaatggggttctattaataattacctcagaataacaggtgtaaactgggactgtcctgggcaaattgggacgtgtagtcaccctatgattaccttatttctaggggacttcaagtcagcttctgtatttggtcttcatgtcacatgatctttttaaaatgatactatcagtcatgatggaaggaagggaagggaggaacagggacactgagaggtttgtggttgctttcatatttgagcattaaaactcctaaagtataggtgtaaactgtatgtccgattgttcttgaacttagatgtgttgaaaatttcagcaatgtggttggttctttaggtgatttgagagttagaatattgtttggtcatcaggagacatcttttatgctaatgcgtattcacaaagaagaaattcacctgtttctatatttcctgaatcatgtaattttattattaaaatttggattggttcaaagaagatccaagaatcataaaactataactgccgcaatgtatcaaagaatttttgatggtgaataagaaacaatacacttatgaatgtggatattgttatgccatgttagtgtattataacattcttaaaattatgtttgtggagttgaattcttgctatgttaaaatttattgttaaatttactatttctaatgagaacaaagatacaatataccagaatctctgggacacagctaaggcagtgttaagagggaaattcatagcactaaatgcccacatcaaaaagttagagagatctcaaattaagaacgtaacatcacaattgaaagaatcagagaagcaagaacacttcagccccaaagctagcagaagacaagaaatgaacaaaattagagctgaactgaaggaaatcagggcacaaaaaaccattcaaaagattaatgaatccaggagttggtttttgaaaaaattaataagatagataggctgctggctagactactaaagagagaagatccaaataaacacaattagaaatgaagggaatgttaccactgaccccacagaaataaaaataaccatcagaaaccatcagtctagctgctggctagactaataaagagagaagatccaaataaacacaactagaaatgaagggagtgttaccactgaccccacagaaataaaaataaccatcagaaactattgtgaacaacacctctatgcacacaaactagaaagcctagatgagatgaataaattcctgaacacatacaccctcccaagacttaacgaggaagaaattgattccctgaacagaccaataaggaactccaaaattgaatcagtaataaatagcctaccaaccaaaaaaagccaaggacctgatggataaacagctgagttctacctgatgtacgaagaagagctgctactattcttactgaaacgatttcaaaaaattgaggaggaaggactcctccccagctaattctgtgaggccagcatcatcccgataccaaagcctgggagagacacaacaaagaaaccttcaggccaatattcctgttgaacatcactgcaaaaatccttaacaaaatacttgtaaaccgaatttagcagcacatcaaaaagctaatccaccatgatcaagtgggctttatcactgcaatgcaaagttggctcagcatactcaaatcaataaatgtgattcatcacataaacaaaactagacagaaaccaaatgcttatctcaatagatgcagaaaaggctttagataaaattcaacagcctttcatgttaaaaactctcaagaaactaggtattgaaggaatatacctcaaaataatacaagccatctatgacaaacctacagccaacattatactgaatggggaaaagctgaatgcattccccttgaaaacagcacaagacaagcatgccctctctcaccactcctattcaacatagttttggaagtcctagctatagcagtcaggcaagacaaagaaataaaggacatccaaatagaaaagaagaagtcaaactgtccctatttgcagatgatatgattctatatgcagaaaactctatagtctcggccgaaaagctccttcaggtgataaacaacttcagcaaagttttggatacaaaaatcaatgtacaaaaatcactaacattcctatacaccaacaatagccaagcagagaggtaaaccaggataacaaaaagaataagacacctagcaatacagctaaccagggaggtgaaagatctttacaatgagaattacaaaacactgctcaaagaaatcagaagacacaaacaaatgggaaaacatcccacgctcatgggtaggaagaatcaatattattaaaatggccatactacccaaagcaatgtacagatgcaatgctattcctatcaaattaccaatgaaattcttcacagagctggaaaacactattttaaaactcatatggagctaacaaagaacctgaatagccaaggcaatcctaaacaaaaaggacaaagctggaggcatcacattacctgacttaaaactatactacagggccacagtaaccaaaacagcatggtactggtacaaacagacccataggccaatggaacagaatagacagccaggaaataaggctgcacacctgtagccatctgacctttgacaaagtcaacaaaagtaagcaatggtgaaagcactcccaataaaataaatggtgctgggataactggctagccatatgcagaagactgaagctggacccctttcttacaccacatacaaaaatcaactcaagatggattaaagacttaaatataaaaccccaaactgtaaaaaaccctagaaaacaacctaggcaataccatcttggacataggaacaggcaaagatttcatgacaaagacaccaaaagcaatcacaagaaaagcaaaaatttacaagtgagatctaattaaacttaagagtttctgcacagtgaaagaaactatcaacagaggaagcagcctacagaatggaagaaaatatttgcaaactatgtatctgacaaaggtctaatatccagcatctataaggaacttaaacaaatttacaagagaagaacaaacagtcccgttaaaatgtggataaaggacatgaacagacacttttcaaaagaagacatacatgcagccaacaagcatatgaaaaaaagctcaatattactgatcattagagaaatgcaaatcaaaaacacaaggagataccatctcacaccagtctgaatggctgttgttaaaaagtaaaaaatgaacagatactggtgaggttgcagagaaaaggaaatactgatatactgttggtgggagtgcaaattagttcagccattgtgtaaaacagtatggcaattcctcaaagagctaaaagcagaactgctatttgacccagcaatctcattactggatattctcagaggaatataaagcattctaccataaagacgcatgcgaatgttcattacagcacttttcacaatagcaaagacagggaatcaacctaaatgctcatcagtgactgactggataaaggaaatgtggtacgtatacaccatggatactatgcagccataaaaaagaatgagatcatgtcttttgtgggaacatggatggagctggaggctattatcttcaacaaactaatgcaggaaagacagccaaatactgcatgttctaagtgggagctagatgatgagaactcatgaacacaaggaaacaacagacactgggtctacttaagggtggagggtgggcgggggcagaggagtagaaaagataactactaggtactgggcttaattcctggataatgaaataatctgtaaaacaaaataatctgtaaaatctgtgacacgagtttacctgtggaacaaaccttcacatgtacccctgaacttaaaataaaagttaaaaaatttagtatttctagaacatacacatgaagaccaaagttatgacacttttagtttgagtaaaaatatatactcatttaaaacttactttgttattaaaaccatcttgaatattaaaatttgtttgatgcacatttaaaggtataacttgtgagcatataaaaataagttattatttttatatgttcaagtatataacttgttagtttagtatcaaaattaagtaggagctgcatgaaacttcattataaaactgttcaatgcttttattccaatgtctataaagaaactttaaaaactctcttattgtactgtttgatttatttaaatatagagaattatcttacaggatttattgcaaggtacctaaaagaggatgattgttgctattttttctcaaggaattcatttaattgctttagacaatgtgttaacagatttttatttcctctccggctattacttaagctgcagcagcttaagctttgctcacttcagctaatgaagactaataccactgtgttcctgccagttcaattctttctaatttagcttttctaaaataatgcctgttaataagcaaggtcgtagatgaacagaggataaaaataattctgtgcttcattaaccatcaatctgtagcctttcttctgttgtcttaacgtggaaggaatggttagtttaaaaaaatgtttgcttttatgagttgtttgttttatgtgacggagccattctaatgtcaggaacagatctttggggcaattttccttaatgcagtttgtgaaaaacaggccataataaatattacattaacatataaacatgctaaagtttgtgtttttattaaagatgagggaaaatgacattctaacagctatatttagtcatgttcaggtaaaatgaaccttgagtatctaaggtatatggttacattgatcaactaagatccttctactgtagttattattttttctttatgcttatttttaaatgatagattacatttacaactagctggtcaatctttgagatgtattataaatgaaaggctggttagcatagaaaactggtagataataaaggaaagatatatgggactgtaggtctaatgtaggtcgagttgtcattctggggatttgttttcttacatatttttagcaattgtacctgttttattgcagagacttgaggagacatgttcttattcatttgttcctaaaactgttcaggtgtgcttgcttacttgaccaaagtactgtaaataacttttcataaaataatgaattggaatttatgttgaacctatacaatttagaatgggtttatgttgggttaacatatttatgctcaatattatagtctcacggaaatgtgccactttaataaatatttaataaatattacttgacttaataaggacaatctaggtgttttgttatggatttccaaagtacagtatagttgattacaatgagatattttctttcagcacttaaaggagtttatttgtaaagtctttatgtgaagttgttgcaaaaaatataattactttttaccgcacttggaatcaggaagtttagaattcaccatggtttaacctgttagtgatagaaaatattttttaaaaataagctatatttagtgattttattaaattggtaaattctaatgaatgtatatttattttgtttcctatgcagcatcattagttattcctgctggtagaactcttccaagttttaccacagcagaactggtatgtagcttacttaaaatatattttaaaagacatgtcccactgttagcgagtggtggcaaaatgctgaacatagatgtaatttcttaccctccagttgaaagtgaaaagatgtggccgggcgcggtggctcacgcctgtaattccagcactttgggaggctgaggcaggtggattgcctgagatcaggagtttgagaccagcctggccaacatggcaaaaccctgtctctactaaaagtacaaaaattagctgggtgtagtggtgggcgcctagtaatcccagctactcaggaggctgaggcaggagaatctcttgaacctgggaggcggaggttgcagtgagctgagatcatgccattgcactccagcgtgggtgacaagaacaaaattctgtctcaaagaaaaaaaaaaaaagatgtggtaaagagtggggtgacagaatagcatctgtagcatagatgtaataaaacgcagaagttccagaattgacattttcttgccaagttttcctgtctttcagagcagttgttagcatcttccaagactgtacctacaaggttaggaaatgtctgaagttatgttgtatggggttttaatacactatataatgttatatgcttgttacatcctaaataaataattttgaggttttttttcagattttttttcccctctagaatggagcaacatcatagttttgactttaattaaactggaatatttttgtcattttgtaccttcgtgaagtatagcttgtttatattttcccccttagtacttgaaggcagaagatacatttacaagttaacatagaaaaccaagtagtttttcgggtagagaagaatagcagcttttcacttttatctttcttccatggtactgagagtagtacataatctactaactgttttttaattttctttcagcccataggttgcctttgtagggcaaatgcttagtgggctagttatttccatttcttcactaagaacagccaaaaccacacaccttaataggatttttggaaagaatggtgctgcttttgataggagaccaatgaagaaatacctctgcctttggaattcaaacaaatattttttttcctgttaaaataagtaataagcttgtattaataaaaagtaaaaatgggctgagcacagtggctcacacctgtaatctcagtgctttgggagactgaggtactgggcaccatagcaagaccatattaatacaatttttttttttttttttttttttgagacagagtcttactctgtcacccaagtctggagtgcggtggcatgatctcggctcactgcaacctccgcctcccaggttcaagtgattcttctgcttcagcctcccgagtaacgagattacagacgcccgccaccatgcccaactaattttttgtattttagttgagatggggtttcaccatgttggccagggtggtctcaaactcctgacctcaagtgatccacccaccatggcctcccaaagtgctgggattacaggcgtgagccaccgtgcccggcctgtacaaaatttttttaaaaaaattagccaagcatggtggtgtgtgcctgtagtcctggctacttgagaggctgaggcaaaaggatcacttgagcctcgtaattggagattacagtgagttatgattgcaccactgctcttcagcctgggcaacagaatgaaaccctgtctcttaaaaataaaaatgcaaaacatttataaataaaataaagagttctgtagtcttatactccaagaataaatgttttaactctttgatgtttattcatccagacttctttcatgaaagctatattagtttttaggataaaaagtagggatactctttttactgtttctgtaatttctgttttctaatttagtaatatagatggactgctttcaatttcagttagtacaaattgaccttcgtggatgcagcacagtttaattaacaaacttttgttggtgaacatttaaattatttccagcatttttctaatatagtattctattgattatgcttgtgtatatgtctgtgtgtttctgtgataatcaggataaatttctaaaagtagagttcatgggtcaaaggtcatttgtattttcatttttggtatatatattgcaaaaattatcctccaaaagggttgtaccaatatacattcatacaaacagtagtttgagagaaccaatttttatcacattctcaacaacactggatgttatcagtctttcaaatttttgcaggtctgagaaccaatggccctgcaaagctatgtcttgggcaagttttttgagttaatgtttatactgttcattaggacttactagcttcattgctaataactgtagaataggattcctcttgatccttaatgggatgatcgatattgaaaactattttattcaaagaactcagccctaatattaaatgttaagtattgtcaaactattgtccagaatcagattttttgactccctgtgagatcagggaaaaaaagatacaagtaaagtccttttctaactttctaatataaatttcttatatctagggcacttcaaactccagtgcaaactttacttttcctggttatcccattcatgtaccagcaggtgtgacactacagactgtatctggtgagagtatattctaagaatctttttgttttcagcattggtactattttttggacattaagcttcatgatttttaaataaactatataccagaagttataagaacttttaataaaattgattttaaaagtaatgataaatggtggttttgattgttatagagacaatctaccacaaaaggcactgtactaggcctgtcctatatttgattcccagttctctttcccaacattgtataggggttctttgtatatattttttctaattcaagtcagttatctaaattttaacaaatacaaaataaaataacttacctgcattcctgctagctctaattacggattaaagattaggatgatcaacctttgccccctttcttattagggattgcatggtctgataggacatccaatagtttggaggttaaccggtttctgcttttccgagcaccatctcttgattttgaagaggatcatacctcttctttgggttgttgtaaagtttaagtaaagcacctaactcaacactcaaaaataagtccttttttttgagatggagtctcgctctgtcgcccacgctgtagtgcagtggcgcaatctctgctcactgcaagctccgcctcctgggttcacgccattctcctgcctcagcctcccaagtagctgggactacaggcgccggccaccacgcccggctaattttttgtatttttagtagagacagggtttcaccgttttagccaggagggtcttgatctcctgacctcgtgatccacctgccttggcctcccaaagtgctgggattacaggcatgagccaccgcgcctggcctttttttttttttcttttatagtgttattttagaggaagaaaggagaagaaatttgattacttttgaaatcattaaactctcttttggatagcattgtcttgctatatggcattttaaatatatgaagtatattttacatgattatgtttgttaaaatccagttttttggctgataacattaatttatcaaacaatggaagaggttcatggattaaatattggtgtcctttatgtatctcaaagtgtgccataaaagcaattgtgggaaaagtctggaattaaagcaaaacatatgtaattaaaaaaataagaatttatatattgattgtagaaatccaaaaatgtctgaagaataaaagaaaaacccctagagataaccaccattaacatattggtgtatttttttccagcctttgtggatgagatttttttttttttttgtggtggttgtcaaaggaaattttaattctattatacttacaattttgctttctcctttttaaggtcacctttataaagtcaatgtaccaattatggtgacagagacttctggaagagcaggtattcttcagcatccaattcagcaagtatttcaacagcttggccagccttcagtaatacaaactagtgttccacaattgaatccatggtctcttcaagcaactactgaaaaatcacagagaattgaaaccgtgctacagcaacccgcaattctaccttctgggccagtagataggaaacacttagaaaatgccaccagtgatatacttgtatctcctggaaatgagcataaaatcgtgcctgaagctttgttgtgtcatcaggaaagttctcactatatcagtcttccaggtgttgtattttctccacaggtctctcaaacaaattctaatgtggagtcagtgctcagtggttcagctagcatggctcaaaatctgcatgatgagtccctctccacaagccctcatggggctctccaccagcacgtgactgatattcagcttcatattcttaaaaataggatgtatggatgtgattctgtaaagcaaccaagaaatatagaggaacccagcaacatacctgtatcagagaaggtatagttctgtgtccaacttcttggtatcaggggacagatagtggccagtaactggatatcctgaatattttcaagctgtaatgttaatcagaattatatatattttgtttttttctttagaagattatttcttttttctagtgatttaaaaaaatttttaattgtgataaaatacacgtaacataaagtttaccaacttaaccatttttaagtgtacagatcagtagtgttatatacattcacatgtggtacaaccaagaagattctttctttattgttgtttttagtataactgtcagtccttgaaatattcatgcttagcatttctaaatttttcatttcaataaatgaattataatacttcttcagagaaaatgcgtttgttttaaaaggtaatctgtttaccagtctcttatactgggaaacttattttatgtctgcagataaaaattaaaagacccagaaatccagaccagtagtttgtggaatgttttgagataattaattatcaaatgtaatatacaaaagaagcccacaaagttttttttttcctgctctacctaatttttctgaattcctatatggaaacttttccctacatgagggattatgttgctagtaattttgtttctccctgcctactaaaatactagttttacttaatttcttttggtattgaaaccactaaaaattagcttctagttaacttttgatattgaaaataggtctgaatttttaattttcaaggaattcatagtaatggcagaaagactcatggagaattttggattataaaaattaaaaaaattgcattctttttacaaatataaaatacatcttgtggctaattctatttacacaatttaggacatgtgaaaaatacttaaaggtttttgctccagctagtggtttagccatcatctagacccactgtacaaatctgtagcaatggatagttaagcacaaccttaatattttatcttcatgatatttaaattttgctagttagggaaagacatagggcatagtgaaaggccaggaacaaagaaaatgacaatcagaaactatttggcctgttttagaatgtttcagatatttattgaaacctgttcaagatctctgagcaaatctgtttttagtttttctataagtgttcatattaaaatgttttattgaggttttttttacgttttttaacataacatataacacttagtaaataaatgtaggttaaactaataagtatgaaacatttgattttgaggtaaaactaactacaaatgtaaaatgtttgttttcatcactactacttttggaggcactttttacctggattctgtgtgaattttgcagatgtttggtgtgatgagtcaaggacttattctactgttatgtattgtatgtcatcatgtactttttctgatatggggaaatagattagttaagggatattaatcaaggattgattgggggtagtggttgagaacataagctttggaaccacagtaggttcaaattctaggttcactacttgcaagcaaactatataacattactccctgaaattcaattttagtctttaaattggcccctaataccaatcttgtaattttgagaattatcagagataatatatatgaagtatttaaagcttctggcaccatagtaagctttagattagtgctattatgctctatgagcttgtaatatattgggtaacttttcatgtaacttgtttgttagttttaaaaaaggtctatgtctaacacacaaaatccaaacgtacaagagtatatgtaaaatgcttatttatttattgtaagttacctttaagatagtaagcagtttggtaggtttatgctgaactaattttcaaagactttacaagtagtttttctttttataagtaacttaaagcaagttataatcaactatacttgtttacttttcctgtgttgtaaactactggagagcttatggatctataggtttaagaggtaaggatctatgttgtttgaacattctgtttcacaaaatatattcttgatagcttttaattctgccccttgtaatttctgttctattttctttgtctgaatttgactcttctaggtactttaaaaatggaatcatacaatatttgcccttttgtgactgtcttatttcacttagtataatgttttcaaggttagtcgatatcgtagcatgtgtcagaatttcattcctttttaaggctgaatcatgtgagtttgacaatttttaaattttgtaaatattcctggaatctgttccttcatctccactcctagtgccattgccctaattgtttctcatgtgggataattttatctaactaatttatcagtgtgtagtctcttctacctcttactctgctcctgccaatccatccatcctagaggtcaaaggcctaagcttcagggatcagaattgttttgaatcccttctctattccttaataattgtatgacttagagaagttactcatttgtaaaataaagataatagtatctaccatgtaattgtggtaggattagttaagaaaattaatgtaaagtgctcagcagcacactggcaccgtggtaaatgctcagtgcatgttagcactctcttcctggtggcttccagagatctgtcccaaatgcagcctggttgtgtcttttctccacttaacacatcaccgactgcccttcacctataataaataaacttcaggcaccttaatatacatatacaaagcatattacgcgttctttctctgccaaagtttcctatttactcttccttcctcacatgaatatactttactgggaacaccaaaccgtgagtgattcttggttttcaaccttgttatttcctacttctctttttgctttttgttatcccctctatttgatgcctggagtttcttcccaccatcctttcctctggttaattcctgcttattcattacttcctccagaaatcttcagtacttctccacctaatttttccttcattattaaattggatgtagctcttctgttttgtcacctgaagtatgtctgtcataatgtagttcaaagatacattgatatgttctctttgcattgacagttacatttatctttgtatatgcagtaatctaagaatatatacacactcgtgtgtagtggagtataagcttttaaggataggatctagaattacgtttatttggctcagtggttctgaatcctggctgaatgatcaaatcattgggccattaaaaaaaagtgcaggtctaccctaagagattaaatctaattgatctggaatgaggcttagtcatcaatatttaagagcttctggagtgattgtaatatatagtcaaggctaagaaccactgatgtagctcaaaatcaatgtatgagtgaaaaatggagtgagaggataagagaatatataacttctaagtaagagttttcatttttcttctaagtccacacatattcctctaaaatataaaatgtcctatcaataattgactttagaattcatttaaattgagtaaatactttttgagtctctatatgccattgtgaaattaatatatcaaaatcagagatgtttaaaccagatatgtgactttttcttcattataagaagaaagccaatttaacaaaataattttttatatctgtcaaaatatattaagatatatttcattccaaataagagtggagtggcatgggatgctactgtacatggtcaggcaatatataattatcattgttactctattgtaataaattaaattcctgttaagaattaaagaaaatatgccctgccattacaattatagaccactgaatttgatatagtttacgttgaaaatgtgaaaagaatgtgtattgtaggttaggcttatcttgttttatatttatccccacatatgggtatgaagttctgcaaatttttactagccattgggaaaatagggttctttcattggagggaagcttaaattgcaaagactggaagctggatttggcgaacaaagctttatcatgaagcatcctatttacttgcttattgtactacccagtcacagaagccacatacaatcaaagacaccttggttaagctgagaatattggacattattgagctggtttgttttagtgcagagaaaataaaaaaaaaggaagcatttcctctgtcagatgacatcatctgcattagaattgttgacatttctttcacgtttggctggaattcatagatgtatcagcagcgactttcctttaacattcaacaggctaaaaataccagtgtttcttagggctgccaacatctgattttaatcattatttgtacattgataccatcaaagaatttttatgttgtgagttcttttttttttttttttttaaattggaaactgacatctttgtaataatgaaaagtttggttagtaaaatttggtactctataccattggagctcctgagatgcttggcaaacatggttttgctgctttagtaaagaaagcgttgctgtctatttcagcacatggcatgcattagtgctaagacacagccaataattctaaaagaagtctcatctgctgacataaaactcaaatatattagagccacggttttgaattattgtgtttcccaagacatttatcaaaaaatgtaggcagaatattaaattcttcatgcagaatttttctggcttttcaaaggacaatgcttgaagcccttgtttgatccttggggagacatttactatttttgagagggagcaaaagccccctcataacaatttgatctagaggagttcattgatgatctatgtggtggacgtttggctatatgaaagacttaaatctttgttttcatggtcctgtggtatcagttatggatgttgctgtacaactcctggctattttggtcaaattaccacttcagaagagattggagtcagataatcatgtgaatttttcaatgcctggtggaagtgcttctgaagaaaaaagttgagaatgataactcttttgctgttttgaaattaagtttagatttgtaattttaatcctctcccagagtaaagagggcctcactgattgaaggaaaatggtatgaggctacgtaaattcaagtagaagagtcctggaatcttcagtattcctttataagcttatccttgtctggcaaggtaacatagaagctctgattcatttttcaacagaagatcttgtggcttaaagttttcagtacttgttgctattaaaatgaaaagccaggccgggcatggtggctgctgcctgtaatcccagcactttgggaggccaaagcggatggatcacttgaggttaggagttcgagaccagcctggtcaacgtggtgaaaactcgtctctactaaaaatacaaaaattagcggagtgtggtggcaggcacctgtaatcccagctactcgggatctgaggcaagagaatcacttgaacctgggaggcggaggttgcagtgagccaagatcgtcccactgcactccagcctgggcaacagagcgagaccccatctcaaaaacaacaaacaaacagccaatttcaacatgtggtttaggcctaggacaaatcttatactaattgactttattattattatcatttatttatttttgagatggagtctcgctctgtcgcccagactggagtgcagtggtgtgatctcggcgcactgcaacccttgcctcccaggttcaagagattcttctgcctcagcgtctcaagtagctgggattacaggcctatgccaccacgcccagctagtttttgtatttttggtagacacgggggtttcaccgtgttggccaggctggactcgaactaattgactttaaaataactcaaatttaggccgggcacggtggctcacgcctgtaatcccagcactttgggaggctgaggcgggtggatcacaaggtcaggagatcaagatcattctggctaacatggtgaaaccccatctctactaaaaatacaaaaaattagcctggcgtgcggctgtagtcccagctactcgggaggctgaggcaggaggatggcatgaacccaggaggctgagcttgcagtgacccgagattgcgccactgcactccagcctgggtgacagagccagactctgtctcaaaaaaaaaaaaaaaaaaaagtaaaataactcaaatttaaagaggcatgatatatatacaataaaattcatcttttaaaaggtagcttttagatttaccatatgaattttggcaaacatgaagttatacaaccctacctgagatagagaacattttcattacctcccagtttcctcatgtgcctttgtagtcaataccctctttcaacccccagttcctggcggtcactcactgacctgttttcttttggggtaggtttaccttttccagaatattagacactatcatgcagcatgcatttttagcacaatacatttgagattcatccatgttgttgcatgtatcagtatattccattgtatggttataccacatttatttaccagtttgacatttgggttgtttccagtttttggtatttgtgaataaagcccctgaaagggccgggcactgggtgatcccagcactttgggagactgaggcggttggatcacttgaggtcaggagttcaagaccagcctggccaacatggcaaaaccccatctctactaaaaatacaaaaattagctgggcatggtggcacacacctgtaatcccagctacttgggaggctgaggcatgagagagaatagcttgaacccagtgagctgagatcatgccactgcactgtggcctgggagacagagtgagactgtgtctcaaaaaaaaaaaaaaaaaaaaaaagaaacagccccgaaaacatttatatgtagattttatatgtgtaaatacctaggagtgggattgttagataagatgataaacgtatgcttatgagaaacagtcaaactcatttccaaggtggctgtatttccaccagcaatgtatggtggaattttgcatttctaccagcaatgtataagatttgttgttggtacaccacatccttggtagttaacactatcttttggtaaggagaagtttttaattttgatgaagtccagtttattatttttatcttccagtttatttattttgactttcagtcccgtatattattttgacttctgcttcatgtgtcttatcaaaggctgcaaagattttataatacttctaaaaactgtatagttatagttttgtcatttaggcctgtgatctattctgggctagttttgtatatggtgcaaggttaggatggaggttcatttttttttttggagacagagtctcgctctgtcgcccaggctggagtacagtggtatgatctcagctcactgggttcaagcgattctcctgtctcagtctcccgcgaagctgggattacaggtgcccaccaccatgcctggctaattttttgtatttttagtacagacagggtttcaccatactggtcaggctggccttgacctcctgacctcaggtgatccccctgcctcagcctctcaaagtgctggggaaacaggggtgagccaccgtgcctggatagctcatttttttttacatatggatattcaattgttttagcattgtttgttaaaaagactgccttgtctcactgagttagctgtctgtgcacattatgtatctaaagcacttcacctttagtgaaaattactacatctgtgttggtttattactgaaggttcactctgtttcattaattcatgtgactatctttttgctaggaccacactgtcttgattatggtaaatttatagtaaatcagagagtgtgaatctctcaaatttgttcttttttccaaattgtttgggctattctaattcctttatatttccatataaatattaggatgcgcttgtcaatttctaaaaagaaaaattgctaagactgatttgggtttgtgttgaatctatagatcagtaaggggaattgacgtcttcacaatattgagtcttccaattcatggacataagttttttttttaatttaggtttttgacttctgttactaatattttctagtttttagcatatacatattatacatattctgttatatttttatctaaatatttcatggtttttggtgctattataaatggtacctaaaactgccatcaagaacatttttattcttatttttaagcttcatttgcattgcatttttaaaaatatatttttatttttaattagttaattcattagtttgtagagacagacagagtctcactgtgttatccaggtttgtctcaaatgcctggcctcaagcacttgtctcactttggcttcccaaagtgctgggattatagacgtatgagccaccatgcccagcctaaaatacattttttaaaaggtagaaaaaactgaaaatttctaaggcatttgaagtacattgccacaatattttaaaaagaggttgtgccagtttttcctgccaccagtactttgatcagttttgccacatagtatagtatatcactactgatttttaaaaattcaatttttctcctgtgctaaagtacacataaaattaactatttattttatttttaaattatttttacaatttttaactgtatagcttagtgacagtaagtatattcacattgttgtgtagctatcaccaccacccatctctagaaatttttcatcttcccaaactccatgcccattaagcagtaactccccatttctcactctcccagtccctgacaaacaacaattctactttccatctctatgaatttgaccactttagttacctcatataagtggaatcagacagtacttgcccttcttcatttagcgtaatatctcagggttcatccatgttgtagcatgtatcagaacttatctccttgttttaaggtgaataatatctcattgtatgtatatactgcattttgtttattcattcaagtgtctgtggatacttgggttgcttccagcttttggctattgtgaataatgctgctgtaaacatggcgtacaaatatctcttcaaattcctgtctttaattttttcggatatatatggagaaatggaactgcaaaatcatatgacaattctacttttaatcttattaggaactgccatacagtttccatagaggctgcaccagtttacattctcaacagtagtgcacaagcatctgatttctccatatccccaccaacgcttattttctgtttttttttttttttttttttttttttttaataattgctaccctaaggggtttgaagtggtatcttgtagttttgatatgtatttccctaataattagtgatgttgaacattgttttatgttcttctggccacttgtatgcattctttgtagagaagtctattcaagtcctttgcccatttttttaaaattggactgtttgctctgttgttgttgacttgtagttctttatatatcctggatattcacctcttatcagatgtatgatttgcaaatattttctcccattttatgggttgcctttactctctgttaataatgtcttttgagcacaaaaggttttgattttggtgaagtccattttatctatttttttcttttgttgcctatgcttttggtgtcatatccaataaattattttcaaatccaatgtcatgaaattttcaccacctgttttcctctaagagatttatagttttagttcttatctttagctctttgatccattttgagttaattttcgtagatggtataaatttagggttcaactccattattttcaatgtggtgctagttttcccaaaatgatttgttgaaaagactgtccattccacattgaatggtcttgttacccttatggaaaattgacgttttatgtaacggtttgttgctgggatctttattttattggtgtatacacctgtctatacattaataacacactggttttattttttaatttttattatttatcgtttcagcttttatttaagattcagggagtacatgtgcaaggtttgtgacataggtatattgcatcatgctgaggtttggggtgtgattgatcctgtcatccaggaactatgcatagtacccaaaacagttcttcagcccttgccctcacttccccttctccctttttggagtccccaatgtctattatttccaccactgggtgtccgtatgtgcccaatatttagctcctatttgtaagtgagaacatctctttatggttttctgttcctgtgttaattcacttaggatgatggccttcggcagtatgcatgttgctgcaaagaacatgatttcttttttttggggctgcatagtattccacggtttatatgtaacacattttctttattcagtccaccatgtatgggcacctgggctgattccatgtctttgctattgtgaatagtacttcaataaacataagagtgcaggtacgtttttggtagaaatatttcttttcctttgggtatatatccagtaatgggattgctggattgaacggtagctctattttctttgagaaatctccaaactgctttccacagtggctgaactaatttacattcccaccaacattgtacaaacattccttttcctctgcagccttgctggaatctcttgttttttttttttgactttttaataatatccattctgacttgtgtgagatgatatcttattgcatttttgatttgtatttctctgatgattagtgatgtggaacattttttcatatgtttgttggctgcttctatatcttcttttgagaagtatctgttcatatcatttgcctactttttaacgtggtcatttgatttttgcttgttgaattgtttaagtttcttataaattctggatactacaactttgtcagatgcacagtttgtgaatattttctctaattctgtagattgttcactctgttgatagtttcttttgctgtgcagaacctctttagtttaattaggtctcacttgtcaattattgtttttgttgcaatagcttttgaataattagttataaattatttcccaaggctgatgtccagaatggtgtttctcaagttttttctaggattgtttatagtttgagatcttacatttaaatcttcaatccatcttgagttaagttttgtatatggtgaaaggtaggagtccagtttcattcttctgcatatggctagccagctatcccatcaccatttattgaatagggagtcctttccccattgcttatttttgttgactttgtcaaagatcagatggctttagatgcatggctttatttctaagttctctattctgttccattggtctatgtgtctgtttttgtaccagtgctatgctgctttggttactgtagccttataatatgggttgaagttaggtaatgtgatgcctccagctttgttctttttgtctgtgattgttttggctgttcaggctccttgttggttccacattaattttagaatggtctagggattttttttggctggtaagttttttattattgattcaatttcataattaggtattggtctgtttagagtttcaatttctttctgtttcattcttgggagattgctttcaggaatttattcatttcctctagattttctagtttgtgtgcatagatgtgtttataatagtctctgaggatcttttgtatttttgtgggattggttgtaatgtcacctttgtcttttttattgtgcttatttggatcttctctctgtttttctttgttaatctagctagtgcttgcttgtatgaaaaagctcttatatctccttaacttatgaagcttagtttggtgggatatgaaattgttggttggaatttctttcctttaagatgctagaaataggcctacaatctctcctggctggtaaggtttctgctgagaagtctgctgttaatctgatgggtttccctttgtacatgacttgacttttttctctagttgcctttatatatatattagcagtgtccttccatagtctggtaactatacaccttgataatgttgattttgtatagtgtcttgaaggtgttctctcaatttcttgtatttggatgtctacctttctagcaagattagggaaatgttcttgaattattccatcaaatatgttttctaggttgtttagtttttctctttcaagaatgccagtaattcatatatttgattgctttacataatcccaatatcacactatttttattattgtaattttgtagtatgttttgaaatcaagaaatttaagactttcaatttgattcttctttttcaagattgttttggctatttggcattccttgagatttgaatttttggatagatttttttctttttctgcaaacactcttgttgggtttttgatagagattgtgttggctctttagatggctttggataatattcacatcttaaccttattaatttttgaatccatgaacttggggtgtctttccattgatttttgtctttattttctttcagcaatttttgttgttttcagcatatacaagtcttttgcctctgtggttctgtttgttcctaaataacctattctttttggtgctattgaaaatgaaattattttcctaattttctttttgagtttttaattatttgttgaaatgcagctgattttggtgtgttgattttgtattctttaacattgtggaatttatttatttttcctaacagtttgtttttgtgtgtctgtgtgtatggaaactttagaattttctacatataaaggcataacatctgtaaacagagataattttagtttttcctaattttgatgtcttttatttcttttacttgcctaatcatcctagctagcacttttagtactgtgttgattagaagtggtgaaagtagttgtcctttccttctttctaatcttagagatttcaggggtttaccattcagtatgattttttttttatcttgaactatccttgcatcccaggattaaatctcatttggccatggtgtaggattcctgtaatgtgctattatatctatttgccagtattttgttgaggatttttgcatgaatattcatcagaagtattggtctgtaatttttatgttttgtctttgtctttggtatcagggtaatgctggcctcataaaataagtttggagatattttgttcttccattttttggaagagtttgaggatgattggtattcatctttaaatgtttggtataattttctagtgaagacatttggttctggatttttctttgtaggtagggttttgattacttattcagtctactttccagttaatatacttattaagattttctattgctttctggttcagtctagattgcgtatttctaggactttgttaatttttaaaatagattatctgatttgttgtggtgtaagtgttcatagttttctcttaaagttctttatatttctgtaaaattattaatgatgtcccctcttttatttataattttattttattattattattattgaaacagagtctctgtcgcccaggctgaagtgcggtggtgtgtgatcttggctcactgcaacctctgcctcctgagttcaaatgattcttgtgcctcagccgcctgagaagctgggattgcaggtgtgctctactatgcccggctaatttttgtatttttagtagagttggggttttgccatgctggccaggctggtctctaactcctggcctcaagtgatccacctgcctcggcctctcagagtgttgtgattacaggtgtgagacaccatggccgaccctcattgataattttagttgagtcttctcttcttcttatcagtctagttataaaggtttatcaattttattgatctttttgaagaagcaactcttggttttgttgatttttctccattgtttctcattctgtgttttctttttctctaacattattatttatttcattctgctagctttagttttgatttgttctctcctttatagttttttaagatgtaaagttaaactgttaatttgagattgctcttttaaaatgtaagcacttatacatgtccctccccattgttttcactgcatccccaaacttttttttttttttttttttttttttttgagacagtttcactctgttgcccaggatggagtagagtggcacaatctccgctcactgcaacctttgcctttgggtcaggtgattctcctgcctcagcctcctgagtagccgggattataggtgcccaccaccactcctggctaatttttgtacttttagtagagacggggtttcaccatattggccaggctgatctcgaactcctgacctcaagtaatctgcctgcctcagcttaccaaagtgctgggattacaagcatgagccactgcacctggcctgttgcatatatctgggggctctgatgtttggtgcacatgtatttataattgttatatcgtcttggtatattgattattttatcattatgtgattaaaaattattttttcctttttaaataacagtttttgacctaaaatccattttttttctggtggtaacatagccactgcagctctattggttatcatttgcatggaatttatttttccatcttttcccttccaacctattcatatcctggatctttagtctcttatagagagcatatagttggatcttgttttttatccattcttctaaactatgtcttttgattggggagtttaattcatttgcgtttagagtaattactgatcggaaagaactaactcttgccgttttgctgttttctatatgtatttaggttttctgtgatttcctcctttattaccttcctttgtgtttaattgatttttggtttcccttctcatttcctttgtgtacattctatagatattttctttgtggttaccacgggtattacatataatattttaggcttataataacctgttttaatcagatagtcacttaaattcaatcacatacaaaaagtttactcgtttacaactttgccctcccctactttgtcttattgttgttacagattacttcttcatattttatttacacattaacatagttttttaatgcttttgtcttttaaatgatgtagaagaataaaatcaattataaactaaaattatgttaacactgatttatgtatttgtccatgtatttaactttaccagataattttacattttgtgtagcttcaagttactatctagcatctattcattttaacttaaaggactccttttaatatttcttgtagggaaaatctaactataatgaattcccttggtttttatctaggaatgtcttaatttatctttcattttttaaaggatggtaaggcagagtttattcaaggggatccatggcaataggaactactctagctgggttttgcagcggcagagagagactggaaggaattccctcccttattgttgaaagataattttgccagatacagaaatcttggttgatcttttttttttttttttttttaacactttaaatatatcatcccactgccttgtggtcttcaaacttcggctgaggaatctgccaaaacacttactggggattccttgtacatagatgcgttgcttttctcttgatgctttaaaggtatatattttttaaatttatttccaactaccacatgttctcacttataagtgggagctaaacaacaagaacacgtggatactaggaggggaacaatgaacacgggaataattgagggtggagtgtaggaggagggagacgatcagaaaaaaatacctgctgagtactatgcttattacctgggtgatgaaattatctgtaaactaaacccccgtgacacatagtttacctacataacaaacctgtacatatacccctgaacttaaagtaaaagtgaaaaaaagagagaggtttatttaggaaagaggtctcccttgtagatagattaaaatattacgcattctaaactgaaacttggctggaaacagtggctcatacctgtaatcccagtactttgggaggctgaggaaggaggattgcttgagttcaggagttcaagaccagcctaggcaacattgcaaaaccccatcaatataaaaaatacaaaaaaattagctggccatggtggtgccctcttgtagttccagcttctcgggaggatgaggtgggaggatcgcttgagcccaggaggtcaaggctgcagtaaactgagattggaccactgcatttaagccggggcaacagagtgagaccctatctcaatcaatctgaatcaatctcaatcaatcaaaactgaaacttaatccttcaaatatgtttattttacttgtcctaaaacaatgtccctagaagtattaaagtgtaaagcactgttattttcccattttgagatctctaatgtaaaaatgtattttttgaaaataatttaaaacataaaatgctatataataaacatttaaaaattttttttatttttatattttgagacagggtcttgctgtattgctcaggctggagtgcagtggcaggtcatagctcactgcagccctgatctcccaggctcaagtgattctcctgcctcagcctcctgagtagctgggactgtaggcacacacaaccatacctggctaatttttagtagagataaggttggtcttgaactcctgaactcaagcgatccttttgtcttgtcctcccaaagtgctgagattacaggcataagccaccacacctggtctaaaggtattgtttttaaatttcaatttctaattgtttattgctactatatagatatgcagttgaattttgtaaattgacctaatatcctgtgacctcgttaaacccacttaataattttagtagttgttttgtagaccatttggggttgctttatgtagactataatctattttgatgaataaaaaaaaatatttcttcccagagtgtttttttttcttggcttattgcactgactaggacttccagtacaaaattaaataagagtgccaagagcagaaatcttgttcctgattttaaggggaaagcattctatctttcaccaagtgctatgttagctgtatggttttaatttttttttgtagatatcctttatcagatggaaacagttttctttaatgtagtttttttttttttaaatcatgagttgatgtttaaacaattttcccctctattgaaataaatgggtttccttctttcatgttttgatatggtgagatacactgattgatttttgaatgttcagctttcattttatatattgctggattcaatttgctaagatttcgttgtggatttttgcttctatgttcatgaggagtactggtctgtagttttgttattttgtgctgggtattagggtaatattagtttcatagaatgaattgctatgtatctgtatctcttctgttttctgatagagtttttagctttctgaatttagaatttttccttgtgggaaggtttttaatggaattaaatttctttaactgatacgtctctttaggttatctgtttcttcttgagtaaattttggtaatttcttgcaatggatttatccattttacttaagttgtaaaatttattgaaagttgataatatattattttaatgcctctaggatctatgtaacatcccttctttaattcttaatactgtttgcttgtgtcttctgtctgtctctctctctttctctctctgtctgtcgtgctagaggtttttctatttatttatttgtttatttattgagacagaggctcactctgttgctcgggctggagttcaggtggtatgatctcggctcactgcaaccagcacctcctgggttcacgtgattctcgtgcctcagcctcccgactagctgggattacaggtgtgtgccaccacacctgactaatttttgtatttttagtagagaatgggtttcaccatgttagtcaggctggtctccaactcttggcctcaagtgatccgcctgccttggcctcctaaagtgctgggattacgggtgcgagccaccctgcctggccaggtttttcaattttattgataatttcaaagaatggacttttgaccttactgatttctctctctctttttttttttttttggtttttaatttcactttttttcccttttaaaattttcattatttccttcctcctgtttactttggacttattttggccttctttttctagtttcttaaggtgggatattatgctattgatttgagacgtacttattttctgatataataatttaatgctgtaaatttccctctaggcactgctttgggtacatctcaaaagtttggacattatgttttcatttgcattcaattaaaattattttctaatttatcttatgatttagtctttgaccattgggtatttataattgtgttgtttaatttttaaatatttgggggattttccagatatctttctgttactggtttctagtgtaattcttttgtggtcagagaatatactttatatattttaaatttgttagggtttgttttatgtttcagaatatggtttatcttggcaaacatgatatgtgctcttgaagctatttggctatttttgggtggggtattctctatatattaattaggttaagttggttgattgcattgtccagggtttccatatctttactgaatttcagtccactttttctattgactactgagagaggaattttaagtcttcacctgtaattttagatttgtctattttttatttttattactttttagtttagttttgaagctatgtttgtaggtatataagtatttaggattgtcatcttcaatcgatccctttattatatttaatgttttttatttatctctgataatatttctggttctgaagttaacattttctgatattaatatagcagtttcaggtttattttgattagtgtttgcatggtatgtgttttttctgttcatttacttttaacttacctgtgtcattgtatttaaagtgagtttctttctttctttcttttttttttttgagatggtgtctcgctctgtcacccaggctggagtgcagtggcgcgatctcagctcactgcaacctctgccttccaggttcaagcatttcacctgcctcagcctcctgaagagctgggattacaggcatgtgccaccacgcccagctaatttttaaaaaacatttttagtagagatggggtttcaccatattgaccagactggtcttgaactcctgaccttgtgatctgcccacctcggcctgccagatagacaccatatggttgggtcttgctaatttaacccagtatgataatctctatcttttaaatgagatgtttaggccatttatattcaatatagttattaatcaacttgtcagggtgtgtgtgtgtgtgtgtgtgtgtgtgtttgtgtgtgtgtgtgtttgtgttcttccttttttctgttttcctgaatgcttttgattcttttttgctgtgtcacatctactgatgaccccttcacatgaaatttttactctcatattgtggtttttattgttagaattttgtgctaaaattcttgtttttcttttttctttattttcctaactccccaaacttgttatctgtgctgaaattctttatttgttcatggatttttttccacttttttccctaaattatttggtgtatcaatcatagtttgacatttctaactgtctctgagtctggttctcttgattgctttgcagtgtgatggttggtttttgttgcttttagtttgtattattatttttgagaagagtctcactctgtcacttaggctggagtgctgtggtgcaatcacagctcactgcagcctcaacctccctgggctcaggtgatcttcctgcctccacctcttcagcatgcaccaccactcccagctaatttttttttttttttgtattttttgtagagatgggatcttgctatgtttccaagactagtcctgaacttctgggctcaagcaatctgccagcttcagtgtcccaaagtgctgggattacaggcatgagtggccatgcccagcctcattaattttgattgaatgtcagacatcttatatataaagagagactgaagtaaatagtatttatagttgggaatggacattactcttcttatagagagatatgtttgtatgtcccatctgtaagggctgtccctccttggatttcaggctgcttcaagaaaagttgtgattttgtaatttatccagcttttgttcattgttagtatggtagtggcattcttttcagcttttacattatgggctgtgggccctctaagatttctctaatttattcgtaacagaatacaaatttatcttatttatgtaatttggacttattttcatttttgagcacatagccattaatttttgcatacatgtgatattccttatatttcatctgtgaagcaaatctgtttccaatgtagtaaaaattaattacatgtaaacttacataattttagtcaatttgaatttttctacacagtattatttgttgggtatacttttttgagggttcattattggtaatattcatatgggtttgaatcctagaagggcagttgtccactcaaaaaataagttgagtatatgcatattattaaagttgtatcttaagttattgagatgtgtattattgtattaaacatcacccatgacttgcaaactcagaagaaatatgaataaagggcatctgttcaaaccttagtaaaacttcttggcttctgttaggagccttcttgactctgcaaattcccaagactttccaggctgatacgatgaaggctttttgggtgctgtatcactcttcattcccctcttcatagcccctggtaaccttgattttactgtctgtttttatgaatttgcctgttctaggtacctcatataagtggaatcatataatatttgtcctgtgtttgccttatttcacttactataacctttatatttctgattgtaaaggatggaaagtcatcctttccatttgcttgggctacatttctatattccagtcttaaagctaatgtaacctgttgcttatgtaatatgtgtgtcaacattatgtatggatttccaaaacaaccagcattatagcatctggagctttcaccaagttttcaaggggcctcttacttttccaaagaggttaagaactactgctatagattctgaagcatatataatcatataaaacagcccctgatcttaaggagcttgacattttattgatctttgtcctgtctatgacaaactaatgggttggggtgggtagtattgtatgaccaatatagaagcctacactgaagagtgaagcgcagtgacttacgcctgtaatctcagcactttgggaggccgaggcgggcggatcacgaggtcagcagatctacatcatcctggctaacacggtggaaccctgtctctactaaaaatacaaaaataaaattagccgggcatggttgcgggcacctgtagtcccagctacttgggaggctgaggcgggagaatgctgtgaacccgggaggcagagcttgcagtgagccgagaacgcgccactgcactccagcctgggcgacagagcgagaccccgcctcaaaaaataaataaataaataaataaataaatacacaaataaattagaaaatgcctataaaatacttagcagaggggtttatttgttagctgtgctggatgaaggtaatgataaaataataaccatctacgtgaccagaggtgattactaaatttcctttatatattttttacttttgttgtgctgaattatctataacataaaaatttgccattttacccatttttaggtgtacatttcagtggtactaagtacattcacaatgttgtacaaccatccccactctgtatttccagtactttttcatcttctcaaacagaaactctgtactcattaaacaataacttttcattcccctcttcatatcccctagtaacctcgattttactttctgtttctatgaatttgcctattctaggtgcctcatataagtggaatcatgtaagatttgtccttctgtgtttggcttatttcacttagtgtaatcctttacatttttatttatccattaagcacaatgacatttgtcttttctatttcattgaattactgtttaaagtcaaatgaaatagttaaatcctaataggtactatataaatttaagacggtatgtataaaaactggtaaatattacctgaaagtaataaactcatttgctgtctccctgtgattgtaagtgggttactttatttataatttaaaaaattattcctatgttacatagaaatgctaggcttattctaaaattcaaagttagattttaatgtcataagagagaagtttgcttgaactgaccatttgtggaatgtttgttaattttaaatttggattcaatattttatataccttatttgacttgaactttattgtatttctttctctttttaggattctaattctcaggtggatttaagcattcgggttactgatgatgatattggtgaaataattcaagtagatggaagcggtgatacatcttccaatgaagaaataggaagtacaagagatgcagatgagaatgaatttctagggaatattgacgggggagatctgaaggtacctgaagaagaagctgacagtatttcaaatgaggattcagccacaaacagtagtgataatgaagaccctcaagtaaacattgtagaagaggtgaggatgacttttgagctgagacttcctttattaatttataacatttctactttattatgccttggaaccaaaaggaatagcaagattaatcttttctttactcttttgaaataagacttatttggggccgggcacggtggctcacacatgtaatcccagcacttcaggaggctgaggcaggtggatcatttgaggtttggagttcgaggccagcttgggccaacatggtgaaaccctgtctttactaataaaacaaaaattagcagggcatggtggcacatgcctgtaaacccagctactcaggagactgaggcaaaagcattgcaggagacaggttgtagtgaaccaagaaatgccactgtattccagcctgggtgacagagcaagactctttaaaaaaaaaaaagacttattatatgcttggatttaaacttttaatcttcaactgtaatttaaaaccaataataaatatttgggaatgggcttctgtattggtcttaactagaggtagtaggtgatctaggcaatgggagtggctgttaaagaaggcagcctaggtagaaacatatagtatctgctctaattctagtaaatgtcataaaatccaggtagagtgtgcttattaaaaagtgtgtaagtagtattagctataatttatggcagccttatatatgtgccaggcatcatattaagtcttaaatgccttatcttaatagtcccaaagtcctgtggttcttactgctatcctgattttagatatgaggaaactgagatatggagagttttagtaacttgcctaaggtcagtcttgtaattattaaatggccaaacgggatttatttatttatttatttttgagacagggtcttgctctgttgcccaggctggagtgcagtggtgtgatcttgactcactgcaacctctgcttcctgggttcaaatgattcttatgcctcagcctcctgagtagctaggattacaggcacaccaccatgcccagctaatatttatatttttagtagagatggggtttcaccatgctggccaagctggtctcgaactcctggcctcaagtgattctcctgccttggcctttcaaagtgctgggattacaagcatgaaccactgcacccggctcaaacagggatttaaacccaggctatttgacttttagtacaattatattctgctgctctaggttcctttatttctttgttttgttttggtttggtttttgagatggagtctcgctctgtcgctcaggcttgagtgcagtggtgtgatcacagctcactgcagcctcaacttactgggttcagatgattctcctgccttactctcccaagtagctgggattacaggtgtgtgccaccatgccaagttaattttttgtattttcagtagagatgggatttcaccatgttgcccaagtaagtcttgaactcctggcctcaagcaatctgcctgcctaggcctcccgtagtgctgggattataggaatgagccaccacgccgagacaagttcctttatttctatatgtctctttatctttaaacaatttaaagcatcataaaattccttaatgtgatcatctttcgtctttaggaccctttaaattctggagatgatgttagtgaacaggatgtgccagacctgtttgacacggataatgttattgtctgtcagtatgataaggtactgtatttaccttttggactttgggtttattaactgcatttatagtagaaaggtatgtaaaatgatgggaaataagatgaagagttacacttcacaattaatcaaaacagcagtttaattctggaaattctgagtgtgtattttgggtctagcgctgtgctatgtgatctcagtgataccagaaaaagtgacagtccttaaggaagtaatgatcttattgaaacaagatgtttcttttggaaaactagaaagacatacaatgagatggtaggtaaatcaacagctaaaatatgtgacaggtaaatcaaatgctaaaatatgtggaatgtaatcaaatgctaagatgagtggcaggtaaatcaaatgctaagatatgcagcacagatagtaagccctagaagtggctaggaaatgtaagaaatcatttgtagttggagttccccataaatccatgggtgatgtggggttttgaaatgggtcttgaatgacttgtaggatacaggtaaatatggagaataagcatcagatagaatagcccaataaaaagcagagaaatgaatggatgtagtatgtacaagggacactgaagagatagctctggcttgaacaaagtgtcttttattggatgtatagtactaggaagtgaagctgggtgggagacagaataggaagcagattagaatatcctgaatgctagtaggaaaaatctgaacttggtctgagggacactagccttctgagaaggttattgagaaaattgtaattgggtttaaaagccagatgtgtttgatttggaaaaagcaaatggtaaaagtgggtagggcagacgtgaagtgcccagaacccagacagaggatggcagtgtaagaacatggagaagtcagaggttatgatggaaaaatcggtgggacttggtcattagttgaaggtgtctctcaggtttccagcctagagattatgttagtagcagtctaactctagcaactaaaaataatactgctttttaaaaaacactacagctgtgattatgtagtcaaatgggagtttttgtccttaattcatgaatatttatattcttaaagtggctttgagatataatgaacatagtatacaattcgcctatttaaagtatacaattcaatggtttatttagtgtattcatagatatgtataacaattatcacagtcaattttagaaccattttatcacctcaaaaagaaaccccatactttttgtttcttagtgcagtattctccccattttccctactccaagcctgtaggcctaagaaaccactgatctactctctatttctatggattttcctattctggaatttcatatgaaagaaattatataatatgtggtcttttgttactggcttctttcacttagcacagtgttttcaagagtcatccatgttgtaacatatatcacgtcttcgttttttaaaaaaattgctgaataatagtctattgaatggatataccacattttctttttccgtttgtcttttgagggacatttgggttgtttccactgtaggggagaaaaaagtaataccttttccttacccattgctatttccctggttgaggcacctataaaaaagacagattaacaagagaaaatcattcaaatttattttaacgtacattttactgacacaggaaactttttttttttttttttttttgagatggagtctggctctgtcgcccaggctggagtgtagtggcgtgatcttggctcactgcaagctccgcctcccgggttcaaaggatcttcctgcctcagcctcccaagtagctgggactacaggcgcctgccaccacgcccggataattttttgtatttttagtagagatggggtttcaccgtgttagccaggatggtctggatctgacttcgtgatctacccacctgggaagtgctgggattataggtgtgagccactgcacccagccgacacaggaatatttagaaatgaagacccaaagaaacagggaaaactatttttctggacagtcataccgaagtatgataggaggaaaaaaggatatgatctaatgacaataaactggaggaaacgtagtaaggcctgtttgttcagatttttgtgtctctgtgtcttcagagataaggacacttattttcctttgtgtatagggtagggacctctgtaataaaggttttatgacttactttaaaggaaggtcagataatccttttatggcctggttcaggggagaagggtgagggcaaggtcagaaagactttcctgcttctgccattttttcaaatgtcaggatgccagaacacatatggggtaatgtgttctgaaccccatagatacctttttgctgctatgaataatgcctctatgaacatttgggtacaggtttttgcgtggacatatgttttcatctgtcttggcatatactcaggagttgaattcctgggtcatgtggtaacagcttaaggaactattagactattttccaaagtggctgtactattttacattcttattagcagtgttcgagggtttcaatttctccacatcctggccagcactggccataatccgactttctaattctaaccattctaatgagtgtgaaatggtatatcattgcggttttgatttgtgtttccctgataactaatgcgtatttacatatttagccttttttttttccagtcacaatttgaatatatttagggggaaacaaagaataatgttttgaattgctgtaaaaagaaatctttttctctgaaaataaggtcactttctccactataacattttatacaaatagaaaaccgcaatttagatgctgaatacaaatataaacataagaaggaataggggatagaaaaggaacagttcttagtttgaaacttgttttagtttcttataaacaatatattgccttctataaaaaaacattataaggtacttaattatatatacattccataaagtctcatgcagaattttctagaccattatggatgtggtatcctttgtttgccgcaatgtgggagataccttgtaattaattatgtagtactttgtatttttgcggtgttttatcatatattatcttttgtttcttataataaccttatggaatagatagaggtgatattaaatatacactgctaacaaatctagtatctgagaacccttctacttagtgaatattttaagaacagtggtaaaaaattaatggaaagcagggcattggggaaccattgaaacattttaaaaggggagtgatgtagtcagaagatagccaaaagaatgtatctaaaggtcaaagtggggtgaggaacactgttatagtgaatctttatgaaagaaaaactttccagtgctggtcactggttgatttgtttcaaatagtattgaatgtaacccaactcaagtgaattgaaagaactttcagtagtctcttttagagctttactaattcagtgtgttttatgggcttagcacgcttttgttatgccactctgctaacttactcagcttattttaaaggcaggtagtatcagttcctctgggaaactattacaaatgcagaatcctgagtcccacgccagagtactggataagaatgtacattttaacaagactccaaaatgatttgtatggccgttaaattttgagaagcagtgtttggtttctttagtatattttatttggatttgattaacagatggaatttatctttaaaatttagagattaacaattggggggaaaactttgaaaatataaacatgtacagtgcaaaagggctaaatgaaggccactggtttacatactgggtgagaattagttaaatggtatagatattttgtttcagaggcctagagaatgtctaaaattaatataaggatttaaataataaagatattatagcgaaaattaatggtgaaatgaaaccttttactacagatggaggtgttctgtgctacaaataggacactatttatagtggaatgtgaaaccatttgaatatcctatatcttcgtttgacagtttagcagacttgcttatagctgactttatcccttagatgctatacaatgattaatttctaggtgtgtagcatggtttctttatatatacagagagagatatgtatatatgtgtatatatagtctctttatatgtatctatatatctctctatataatagtctatatatatgtacatttcctttgaatagatagtgcatacacatggttaaaaaatcaaaatactgtaaaaaggtatacaatgaaaagtctggttcacattccttcatcatttttgctttctattagtagctccttttcctgttttgaatgcaaataagtagttatattagttttcatcgaatttctttattcaaatacaaatacaaaagatagcataaataacactatattctgtaccttgctttttttctttaaacaacgtatctgtcagatcttcccatatgaggaggctttctttgtgatgatattttaatggctgtataatatcctattgtaggattactaaaattcatttaaccaatcctctactgatggatatttgtgatttttcagtcttttgatttgaaccactatgtatataagacattttcataatgtgtgcagatatatctattaaatccccagaaatgggattctgggtcaaagggcaaatgtacgtggttaggtattcccaaaatgctctctaagagcattttgccattgtgaaagatgaaaagtgataccttgttggaatttttaactttccatatgttaaagggccttttgtatttacattttgtgaactgtttgttcataatctttgtctatttaaaaaattggattatttggtcttatatttagtgatctctaagagctcaatattattttggagaaaatgagctttttgttatacacagaagtactttttactcagttattttcattgctttttcttttcaatatgtagattttggatctgtcaatctttaattttatgtcttctgcattttgagccatgaataaaaagttctttcttacctcagagttttaaagggaagctcatgttttcttcaagtatttcatatatatctatatatctatatctatatctatatcatctatatctatatctatatctatatactcaagtcttgattcatttggtgtttgtcttggtgtataatgtaacatatggtttcaactttttatttttttttttccaggtggctactcaatcttcctaacattttttaagaaatctatttcgtccctaatgttaagacatgatttatcatctgctactgcatttctaaatgtatttgggtctacttattgattttctgttttgttccattggtttgtctgtccataggcctatgctactctgatttaattattaagatttttaatgtctggtaaggttagtaattctttactaatttttttgcagagttttcctggatattcttgttcatttttcatattaactccagaatcaacttgtctggttcaaaataaaaccctgttggtattttcattgagatcacattaaattaataaaatttgttattttaatgatgctggggaggaatagattgcaattttagatggagtgtctaggggggccttattgagaatgtaatagggtaaagatcagaaggaagtaagggaatgaactgtgaggatattagagtgtaagcattttgaacagaaagaacaagaaatacaaaagtcctgaggtaggagtatgcccgtgtgttcagggaacagtgcagaggccagagcagtaagtgaggaaaaataaaggattttgtagtccattgtaaggactttagtttttggatgggaagtcattggagagtttcgacaagagaaatgacatctgatttatgtttttagcagacactctgggtatcctgtttatagtagactgaagtgggtgttgtcagggaacaagggtaaaaacaggaactagttatgaggctattgtattgacctgggcaagagaagatgatggctgagataagagtaacagtagtggaagtggtagaagtttttggaatatgaatatgttttgtaggtagaactaacacttactgatggatctggatatgggatgtaagtagcaagcataaagaatacctctaagatttttgacttgagctcttagaagaataagtggtcatttcccagtgagatggggaagattgtgaggtttggggaagacagtataagtgtcatagttgtaaactctgagatgggtgtgtgtgtgtgtgtgtgtgtgtgtgtgtgtaatacacagtctttaatattttttctggagttttaaaaaatctaatatgcaatagttttattaaatactttttcaacacaattagaggtgattatatgatttgtcagtaactgaagtaatatgatttttatattaataagttcctaacattgaactattgttgtatatctagaaaaaatatagtcactagataaaggtaccacaattagttgttgcttctgttgttctcctaatgctgcttatattttattacctgtgctgagtttgggatgtttgttgtcaccgttgtattcccgagagatttttaagacacgtgcaagtgactgtgcaagacaatttgggaataaaactcagaaaaaatttattaggactttaaaacccccccacaaaaataggggtttatcctgtgtgttttcttatgcttcacaaaatgcatctgaataccagtcacagcctttgttcttggatttgactatttgtagtcaacaactaggtttaaattttactcttgatctcagatcatatattcctagggcttttaaatagtcacttgcagtttacttagaggtagcaatgattttatggcttgttacctcttgaagtattaaaatttcttattttttattgtgtctgtgtctaggctgatttatggaatctagaaaacagccagcagagtcttacagattataagctgtatattctgaccttgttcagtgctttattgggactttcttcctcatgatgaagtatcactttttcatttctgataatattggctacatcttccctgtttattcctttgcagacatactggactctgtgctgttcttgaacaatccaggcatgcccctctttaggactgttcacttctattccttttatctggaatgctcctgagtaaatatctgccttgctttactccttaccttcttcaagtttttgctcaagtgtcacctcaaatgacagcttaatattctacataatttacttatgtattaggtttctgtccttccctattaaaatgtaaactcttaaaaggcagggattttttttggttttacatatacaggatgtgtgtttttatatataatatatacagtatagaaatatatgtatcttaaactaatatatttccagtgcctaaaacagtgtctaacacataggaactcaaatgtttatggaataaacaaactatcttgaggagattttaattttaaggcactcacatttcgggtgagaataatcccatttactgtagcagagaaatgcaggtgatcctttaacttgtaaaattaattaatgtaaactacttttctccctccagattcatcgaagcaagaacaaatggaaattctatttgaaagatggtgttatgtgttttggagggagagactatgtatttgcaaaagccattggtgatgcagagtggtaaaccttgtgagctcagtacatctattttgtgaacatcagttggattatattgcatattgtgaattcatttttattttgaatatagtccagcacagagctgttcaaatttttagttcactgtatggaatttaataaaattataattcagatgcagatacaattacacaattttatatgtattttgttttatgtcttaacagggttttttaaaactctcattctataccattacaaagcatagatgcatcaggataatggaacatgaagaagtatcacatttcttttttcttgaagtaaaatttaaatcacacttcagttccccttcatggtaaagtcagtatcagttattagattgggatcagcattcctcccacctctcaccaaaccatgttatagaacgtccttgggagtcttttaagtagtgggatattcaagaaggcgtctttgggttttaattctgtactgatcactggaagtatgttgactgtttaagcccagatagtcccctggaggcaggcgcctatactattatctgaacatgaaaatctttgctgaggctaggatccctgtagctaaggatcagcctctctggacttatcatttggctaggccattcttctttatatttctggggaattgtgaggaagtaggttaggttcctgttctacttcttgaaatttcatatgtctgtatttttcctaatcatggtgcgttttttttctctctccctactttttctgtttttcgtgcggtggaagacccctttgcaaaccctttcctcttcaaaggcagtacctcactctctttttcttaacagggatctccttcattgattttaggctttctgaaacaaaagtcaagaagagatgttctcttcaggaatttctgctttggcagtctcatttgagatacggaggactggataactgtcttgaaatcacagagagaaaacaaaacatcagataaatagccctcattttcctgtggcaataaaaaccaaagcaaattaatattccgataagttattctataatactcttttccttagtagattcacgtctctcaaagaaatattttccccatcactctgctgctcttaacaggtggggcacatatggtctgtaagtctaggagctctgtttttatccctgaatggtgtttttaaggacagtaactgtcataaaaagagcagtgcagggatgagtaggttatggcctattaaagctccttaaggattcgatgcctggatctgactggttacagggcaaattccctgtatctttttggaaagcaaccctattggggagtttaatttttttccaacacttttctgtcctacccaggaggctcagctattggtatatcttcttgaaatctggatggatctcctctgggtcctgggcaatgtggatggggtattgtctccagcctaaagtaggcagctgcatgaggattcagttagtactagtgagtgggctggtcccctaactgtattctcccactaggccctcttcatccttagagtgattgaccttttccttattaccagtgctattctagatccttctctggatcttgagaactcccaggagctgtgggttcttttcaagggtgttgccttccatgaaatgtctgtattctctacatggaaagcaaaaagagagccctttgcatctgtctctgaaatgtacccactccagggctgaggagtgtactttcttcttcctgttttctttcaggcccacccagtcattctgtattttccccaggcaaattttattgcaaattaagggctgaatttattgataaggtgtacacacctgggaactgggaattaatgtgttggttcaagtgcctgggggaggcaataatatttgtttctaaaattcttttcctctttttcactgtgaactttaaaatctcattttactttagtgattttttaaatggtatattacaaatactgttatgatattgggcctctttatttgtgtagtatactttatcattaaagaattagtcatggttgttccatttgtgtttctgcttgccctcatgcccctcatcttttaaaaatgcaaaaaatcaatttaaatgtacgcttatcacaaaacaataataataattttccttgcatgctaacataaaccaattacatagtttcactggtgactacagagagaattaagagatcaccaaattattttggatctgttacctttttattggtctcagataatgctaggaaaaatcctagttcttgagaagtcatctgaacagtgactttaacattttttggccagaatctaccctaagaaatacagtttagcaactcagtatatatttgcatgtctactgacacacataacacaaatgaaacaaaagtttcagaaaatcatgctgcctttagcatatgatagccttcccgacatcatctatttgattctgttttgtttcattaaaaaaattgatggtgttgacccactaaattgatttcactacctacatttttaacctgtgtagtaaagatagggtgagacactagttaattttaaaagagaaaattattctttaaaagccctgtaagtcaggagagtttacctgagacttggctttgatatcatattacttttactttcaggaacctctttattatgtccgaggtaaacatttcctattgcatttttataacaaaatactctaagtttcttaagttcttataaagacagtctcttggcaaatgtcatttctaagctcttttataggtagagaaatttctatgtcagtatgctttgagaatttctcaagtatttttgttagcatgctgtagttctttcttccctccctgtcttcctccttcttttcctcctctcctctcctctcctctcccctcccctcccctctgtttctcctcccttccctttctcctcccttccctttctcctccccttctcctcccctccctttctcctcctcttctcttttttgagacaaggtctggctctatcacccaggctggagtgcagtggtgctatcttggcttactgcaacctccacttcccaggctcaagagatcctcatgcctcagcctcccaagtagttgggattacaggcatgcactaccatgcccggctaatttttgtattttttgtagagacagggttttgccatgttgcccaggcctgtcttgaacttgggagctcaagtgatttgcctgccttggcctcccaaggtaccaggattacaggtgtgagccaccacacctggcctatgctatagctctttcctacatactttcttcttttctctgtagactaagaagatcttgctgagttcgtacagttagtctcttagggactgaccaactgaccttgtctggtacatttacctattttattcgatgtgcagaacacctcagtcatggctataatatatgtaaataatcacctctgtagctcagtctccatagagcagcaagaaatctattgacacactcagtttcagtcacttaggttgtgtaggaaaaagaataacttttagagtgaatagcatcagttaattgtcgtgggtaaaaagggaggggatttagtgggagattttattttgactcatattagtaggttaatattatcctggttttcatgtaaatacacactaagccaggtgagaatgttgtgatttataactagaaagctaaattataagtagaaagccctaggtaataactcttagggggaaaaagataaaaatattgctcattttgaggaaaacattatttctaattataaacacatttattgaaatatttgtgacagagattcttaatttacatgtggacccactacaatttgaggaaaccaaaatcatgccttttacagcaaatgttataaatggaggaaaaaataccattgccctttaaaatcattttgtaaatttagatgagttattccagatgaattaacccctcttagccattttgcaacctactagtgataatatcaaatgttggttaaaaaatacaaaatagaaatataaatttatcaagtattgcatttttatgatttaggtatgagagattatacagaataaggatacacgttttctatgagaccatctcatataggaaatgcttcttaactaggacaattttattttcagttataaaagtgaatcagctaaaaaattattaatcatctatgatgtgtaagactctagatatagttggaaacagagatgagtgtatcactaaaaaaactcctatcataggtgaataagtggtgtgcttgtaaagataattaataatacccagcagtgtagggtaagagacaaatgagtgatgcagaggacaaatgctaaagaagtccaaagagagagaccactgtgggttatacattatttatgccctactttattttggataaaggaagagtcctgactatagtagattaaggagaaagtaaagagagtttaattttttaaaaataaaaaaggccgggcacggtggctcatgcctgtaatctcagcactttgggaagacaaggtaggaggatttcttgaagactggagttcaagaccagcctgggcaatatggctaaaccccatctgtacaagaaaaaaaaaaagccaggcatggtggtgcatgcctgtatttccagctacttgggaggccaaggagggaggatcacttgagcccaggaggtagaggctgcagtgagccttaatcacaccactgtcctccagcctggcttacagagtgagactctggttgttttgttttgttttgtttttctttaagaaaaaagataaaaaagatgaacctatggttgttttagggccttaaaggatgcagggaaggacaggtaaggggtaagatattcagacagtgagaatggcatgggctccagcatggatattcatagggcatggctagggaaaagtgattagaacagtttgtttcatgtagaaaatcagcaggaaataaagttagtagatttaaagtagatcagtagaattaaagttagagctctctgaatgttaggctaagctctgaaatttaaatttataggtctgatgaattgctcaggattttttttgcaggtatataataaggtgaaataggattttatgacaattaatcagtggtagtgggtatgagagtatggacatgggaaagattggataggaataaaaattagggagatactccaggagtaaggggaaaatgatctgagatgtgggtgtggcaataggaatacaatatttttttcagtttacatttacatgggaagtttttttttcttttttgagacagggtctcactttgttgcccaggctagagtacaatgacatgatcatagctcactgcaacctcgaattcctgggtttatgtgattctcctgcctcagcctcccaagtagctggtactacaggcatgttgccaccacacctggctaattttttaattttaatttttgtagagatggggtctcgctatgttgtccaggctgatcttgaacttttggcctcaagtgatcctcctgccttgtcctctcaaagtgctgggattacaggcatgagccaccatgcctggccctggaatattaactggtgtagaagacaattcaaaagaataactggtagatcttagcaactgaagaatatgggaatatgggaatgagaatgagggagacaataaactgtaactccatgtgttaaaacttataatgtagaaaataaacatcagtttttgtgcaaaggtcatgaaagttattgagagtatgcgtacaagtagcttggtctcaaactgcatttgagtgtgtaatttaaagtttctccacaagaatagattttatttcccttttttcctttgtgctttttttgcttacttagctgttttggttctgggatttatatatgaaacagaaagtttgtgttaggtatacagcaacatgactaattagtattctgttatattgctgagacaaattttagaacactagcttatgagagaggcctgcatctgaataaagacaagtaacttgttatgcagcagaaaaatcagaaatgtgaaaaacacagtacagagaacagattttataaaatttataatgttatgatctctttgaatcactttgcacagtggcataaggattgaaaacagattggatgtgtagagtgtctagttatgtctatacatttatataataaaatctcaaagctaaaaattggaaataacacagatattcattaatagaagaatagaaacaatattctattcatacaatgtaatattaatcagcaatattcaagcagtaacatggataagtagcaaacacattgggttgagtcaagccttatacaaaagagtatatactatatgattctgtttatatgaagttctagaacagacaaactaattggtgggagaaaaataaaaaaccatccttccctgtggggctgggggtcaggaattaactgggaaggggcatgagggaactttctgagggtgatgatattatattactatgccttgatagaagtttgggtcagaagtttgggtcacatggtgtatgcatttctcaaaactcattaaatggtatgcttaagattcgtccatttcattatatataaattttatctagaaatgtaaatatcttggttagtaataaaagtgccaaaatgtttagggctaagtactgatgtctacaaattactctgaaatgcatcaaaaataagatgaattgataaataatgaataattatatacatatgtaatgaagctaatgtggtaaaatattgttgaacctaagtggtgctctatgggtgttcactgcacaattctttcaatttttctgcacatttgaaaagataataaaacgttggggaaaatttaaggaactttgaatgcatattaaacctttagatgactgttttaccaatatgggagtcagtaaaatacagtgattaagaggctggggtcctgaatcagagctttgagtttaaattctattagttggatcttttattcgttttgagaactttgacaaattgtaggttttgctctcctataaaatgtgaatagtatctacatcatagagttttatgaagattaaatgggttaaattatataacgtttttcaagatgtttggtatagaattagctttcaataagagttactttaaaaaagtcaaaggagcatataaaaaacactgtagttaaaaccatagttttgttgtcctataagagacaattctagtaagtaaaaatatcttccagcaaatattgaatgtcttttcctatactctccaaaggatagaaatgatgaaacttaattatttttaaatatttaaacattttatttcattcaaataaaaatataagctctagaaaaaattgttttcattatatgtttcataacttcagagtaattctaactcagcacatttgtagtgtaccattgccaagatcttgaggtaggaagcaggaaaacaaaatgcactgagacagggttcctactcacgaggagtttacagtctacagcttaatgtttcactaagcaaataggctgaaatgtgctttcagatgtttaccttaaattataaataagtagaatccagatagggcatagataaaagtctctataatagaacagatagaactttctgtggtgatgaaaatattctgtgtctgtgctgtccagtatggtaagcactagtcacacgtagccattgagaacttgaaacgtggctagtgcaactgagaaactacatttctcattttatttaattttaatttagccacatgtggctagtggctaccggattggacagtgcatctctagagtgtgtttttcaaactacctgaggaaaaaggccagttattttaaatttctgatctgttatgaactaatatttttatagaatgcaatacaaattacgaaaatgaaaaaaaagatatgcaaaatacctcctcagttttttaaaagattcatcaaacaaaattactgtgtcaaaatttctataaaaatttctaaacactctcaacttcagtatttatgccatgtaacaatgacaaatagtttttagtgtggcagtggtcatagactacactttctactaggtagaggtctcttgcctaatgtacctaaaaataaataatttcctaaatccaaccctttatgttaaaattactggtacaggtaatttttttttacaggtttaagaacaattcaataatgcagttactgatgtaacagttaacactctgtgtagcgagtcttgtctaggagagctgtaccttgacagtgcaatgtggacaacttcaaggtggattgagaaggcttatttgatccagtgaagccatttttgcagttggaggtgtaagctgaaaaatctttccttctataaagttcagcccgacgtttacagcagccaaatttgctcagcaaaagaaagaaatctctttggaatgtcttagtgaatattgcatacagaaatggattggcacaagaattgatgggataaaaaagaaccagtaaaactttagagttggttactgtgataagaggtactttgaaggcagctgagatggcaaaaaaagagataggtgccatgcaggtgaaatcggtgaagatgaggattgccattttcttagcaatctttgtatctttattggtagccattaattctgggtttcgaactgcaaaataaattttaatgtagcaagcacaaattatgaagaaggccaccacattgagaatcaggatggttaatatatagacttgtgagagagtggtttccacatccatggggaagcaaatactgaccttcatgtaattgctgacaccgacaaggggcaacatagcaattagagaagaaaagagccatcctccaagcataatcagaatggcatgtcttaatcgcagcttttggtccaggtgaatagcataggtgatggtgtgccatctttctagagtgatgacggtgagggtgtagacagaaagttcacttgcgaatacagtgaaaaagccagcagtgctgcacccactccctgtctgccagtctatggcatggttatagtactggcccttggtttgggaatcaactgaggctatgagcagcagatagagccccatgcaaaagtctgcaaaggagagattgcacatgagaaaacgaggcactgtaagtttgtaacgacttgtcaggagaacaaaaagaacagtcatgtttcccatgatggctagaatattaatcagccaaatcaggaccctaaggaagtcatagcccataatatcttcacagggattaaaagcatctggttcaggagcacatcggggtgtcttgggtaagcagaaaccatattcatagtcccagccactcagttcactctcagcaagcatggaagaataactgtaagaagaattattggcttgaggtaagggattttctctgagtattaaaaaattcaagaattatgtttctttaaaggcaaagaaacaaaaggaaacaaagccataatagcctcagccttacatttatttgttaaattatttgagaactctgatttgatgtaggagtaccttaagaagggaatgaaaagccatttagactatatatacacacacatatatacacacatatatacacacatatatatacatatatacacatatatacatatatacacatatatacatatgtacacacatatacatatatacacacatatatacatatatacacacatatatatactatacatacatacatatatatataacattgatacaaaaacttaatgaagctctttacaaaggatgactttctttggaaaacaagtttagaaagacaatctatgcttggtaaatctaaaataatcctttcttggcattttcttaactatttatctctcatttagttgccaaccaaactgctaccaagctgttcgtatgtagtagaacacaaatggaattggaaggctcatgttgttgaaagtcattagctactggtggacttgtttgcacttaagtccctagctaatcaaatagtccaacagagaaatagaaaccaaggatagattattagaaatttaggagcagaggaagaatatagttgtggacaataggaagagatggtgaaaacattgctctttaggggtatgagtcaaagacagagggaggcttaagaggtactttgtccctagtgaaagaacagtccttcctttgccactcctttccaaccccactgatacttcctgagtttagggtcttttcctctctctctcttttttttttgagacggagtcttgctctgtcaccaggctggagtgcagtggcacaatcttggctcactgcaacctctgcctcccaggttcaaacgattcccctgcctcagcctcctgagtagctgggactacaggcgcatgccaccgcacccagctaattttttgcatttttagtagaaacggggtttcaccgtgttggccaggttggtctccatctcctgacctcgtgatctgcccgcctcggcctccaaagtgctggcattacaggcatgagccaccacgcccggcccaggtttttgtcctctcttatggagcaattagttttcttcctgatatcctttctccaattttagctctctccctagtccattctgtatgttccttctagaatggcctttcccaaatacaaagttactaatttcacttatcgaattcaaacctgccccaggctcttactggctatgagataaaatccaaactcattgtgatgacttccaaggccctccttggtctgggttctgcctatctctccaacctcatctctaagaagcagtagtgctgcagaattcagagaatgggctctggagcaagattgccaggatccattcctagcatggctcgtacaggctgtgtaatcccaggagagttaattaatatccgtgtgcctcaagttctttatttgccaagtagggataataatcataccttctatgttagagttgtgctaagagttgaatgcattcatacatgtagaatgtttagaataattcttgaagcaatcaatattagggattcttaaaattagctcttgcagatcccttgggcaaccttccctttggtcacataaaatgactcgtagttctctgaataagttctactgtttcactcctctgtctttgtacgtacttctgcctagaattttcttcttttcctcatctctctggtgaattcctcctcatctgtaaagataagctcttctatgaaggctttcttgattatagtacccaagtattatttatcctcctgccagagctgcacttaatacaattgcaattatcaaaacctattgcaattaagtgatgatgcatgtctatcttctttaattgtctaatcacttcttgaaaacagaggactaggttttacttatttctgaaatcccagtgcctagcacagttttggctcagagtgttcattcaatacatgtttgtagagtgaataattctaaaccaggatgattctagctctgaaaggaactgagaggatacagggacaatgagcacacagcatgatgcatgtaggctcaacaaacatttttgtttttacccatcttctgctaatacaatcttaggaactggagaaatgggcataatttttgtgtcaaggccattacatatatgtatttataatacatttttgtataatacatgaggagccttatggttcctacatattattaaaagcatatttttctctgctttcgaaagctaacttcccatgttttgtattttaagtgcatacctagttcagtgagtggaggagataataaattggaagaatacaatactgaagggaaagaacacagatttttaaaaagaaaatatgttagagtattgtggagcccagtttggaactagagaagggctgctgctatgtacagaagaccgcataggaacctctcgtgttttattattaaatattgttataaccagcacatttgtttgtcctcttctcacagacatcaatataattatcattttttaatctttaaagggaggagatggttataaagaactattaaagaaaatagatcataaatttcttagcattagaaaggttttaaggccgggcgcggtggctcatgcctgtaatcccagcactttaggaggctgaggctggcagatcacctgaggtcaggagtttgagaccagcctggccaatatggcaaaaccctgtctctactaaaaatacaaaaattagccaggcgtggtggtatgcccctgtaatcccagctacttgggaggttgaggcaggagaatcgcttgaactcgggaggtggaggttgcagtgagctgagatcgtgccactgcactccaacctaagtgacagactgagattctgtctcaaaaaaaaaaaaaaaaaaagggttttaaaggccatctgattgaatcctttcattttattggtaacgaaaccaagattaaaggaggtaagtgacttgtccaaggtctcttggggatagtgacagtggcagcatgaggtcttcataatcacagttcagagacctttcccctaacttcactctctctcattgtttttcaaagtgtggtccttggatcagctccatcagaatcaccatggtgtttgttaaaatgcagacccctggctttaccccaaaccctgaataaaaaatctatagagacaccgcccaagaatttgcattttaagtaagttctctggatgattcatacaaaataatagcctttgttaaattagatgaaaacagtccagctattcctgatttcctttactcctttccccttatcaaaactacttcagctgttagaagcactattgtaaaacttctaaaaattctgccatgatttctggttaaatttatatcaacaagaggtcaaacatgttttctcacttcctctcgctgtctggtcctttgtcctttctttttttgcccttctgggcatatgtctagcaatttttctccctggtgatttatctttggactaaatgcccacctgctgttactggtatttgtgtcctgggatggctcctgagggcagcatcatgcttattgacaaagcccagcacagagctgtctttagtattagaggctatgtggggagtatgaatggactcacatgggcttagtaatattgaatcagaggaaggagagctgtagcaccgctgctccagtcacaagaaagaaaggagaaaagatgggaattttaggaggacaatagggccaaccatagaggtaaggacacattatcttggggagaatacgtaagccttagtggctggctctagaatttctaaactctagggactgaggaatggctatctggtgggaagtaggaggtaggagatttatcataaaatgctttcacaagaagaatgctctttttacttagattttatgttaatttcagttagttttggagatgctagagattagggacttgtcttaaagcagtgatagcatagcaaacttaaggttgtatatgctcatttgagaaggtttatggtgaggactggtgaggattatattgaggatggtttaaagtcttccttcccctcaaaccactccttggtgctattattaactatatccataaatgttttcttgatgataagaataaagtcatgtggttgcaaaagagttacacagaaggttgctgatagaatactgagcaagaagagagggaagggtgaagaaaaggccactggaggatatgggtgccagacctactgcgagaaaaggaaaagaagagacagtaatacttatttacccttggtgttgtcgcattgcttagcaacttccttcattctcatggttctgaaagccaaatggtatttctgctgttccttacagatgaggagaaaggtctcaaaagggataaattttgccagcgatactctgttacaggaaggttacttccaaagattcatatacttggaatggaaccccaaagtccagggtcattccaccgtaccaacctgaagcatctgtctaacttggagattgataggaaaagaaaagaagagaaaatttcagaaagagattggcaaagtatcttagagggacatctagttttgtagtctggaggactcatgggggcataataaaacttctaaatcttagtaaatgtgccatagggacactgggattatcttttgaggcatgctcttttacagttgaagataagtgaaatgccaaggcagccagcatttatagcagaaaagtgttaaaagttagtcagtaaaacagagatgtagcttccatccagtgtatgtggtagcgatagcattaagactcattttaagctcaggagcatagttgtcgaggtagcctaagtctcctttaagggaagtggctacttttaagctacgtttgcaattagttaatctttgtggaatgttgaccatgtgactagggaaaattcttacaaatgaaggtatcagttgtatcagcctttggtgacatcaacatacctgcaaaattttaatttttgaggaggctttaatacaattgtagaataaatattaaggaacattttaaaatagtttttttaaacagttgaaagacatacctgatcaacttgatgccaattgcaaagaaaaaattcccattttaaaactattaaaagttgctttgcaacagctccgtaaccaagacttgtatcaaaagaaaataattgatgctgataataaggtgcacacagaacaagatacgacttctgagtttccttgcatgcaaatacttacagtgttttgttattcactttccttactgtgctttcacattgtttggaaaagttttcagaaatggaatgtgaaaaattctgtctgaaagagaagaggttaaaaaaagcatttgagcttttggacttcaggctaaacctgactgtgcgtctatttatgctttgttcatgcaaattctttacctattacaccagcatctcgttctgcaccattgtcctaactgaaatgcttcctgaggagagagtaaaggcttctgaattgtcattagagtgcttccagcttagataaaatgcttctgaatactaagcattttgtgtgggcactagagatgaaaaaacttaaatttgtcatattgaatcaaggattttccaatgattactaaaagctacttttatgatatattaaggtttgctccttaccactctcctttccacattggccttaacaaatagtcattctgtgttcatggttttgaattgtaactgggcatcttttttgtaaggatttgaagatgctggacctgacattatgatgtgaatttcaggttattttttcttatgtgcagaaacatacgtgggtgctccctactcctccatctttccctctaagaagtttagcctgtggaaagaagagaaataccaataaaataaaatgaggcctgttctcacctgggggagcacttacctagagatgaaatttaagggagatacaaatgaataaagaaatagggtataagcattcccttttcttccacagccttgccagcatctgttgtttttctcattgtggttttgatttgcatttctctgatgattagtgatgatgagcattttttctttagaagacatacaagcagccaataagcatatgaaaaaatgctgttctattcatgccctttgcccattttttaatgggattatttatttttttgcttgttgatgcatttaatttcattatagattctggatattagacctttgtcaaatgcatagtttgtgaatattgtttcccatcctgtaggttgtctgtttactctgttgatagtttcttttgccgtgtggaagctctgtagtctaattaggtcccactcatcaatttatgtttttgttgcaattgcttttgaggacttagctaaaaattctttgccaaggctgatgtcaagaagggtatttcctaggttttcatttaggacttttacagtctgagaaaagggaattctcatacactgttggtgggagtgtaaattagttcatccactgtggaaatcagtttggagatttctaaaagaacttaaaacagagctactattcaactcagcaatctcattactcggtatatacccaatgaaatagatcattacaccaaaaagacatgtgcacttatatggtcattgctatgctattcacaaaaacaaagacatagaatcaacctgggtgcctggattggataaagaaaatgtggtacatatatacaatgtaattctatgcagccataaaaaatcatgtcttttgcagtaacatggatggagctggaagccataatcttaagtaaatttattcaagattaaaaaaccaaatactgcatcttctcacttaaaagagggagctaaacactgggaacatatgaacataactgggaacatatgaacaggcactgcagaatactagaggggtcagggaaggagggaggcatgggttgaaaactatctatcgagtattatgctcacttcctggatgcaatatactcatgtaacaaactggtacatgtaccccctgtatctaaaataaaagttgaatcaaaaaaatagtggttgtccacagaggaggtctacagaaaaaaaaaaacagtggtttcttcataattacaaatgcccctgattgtctcttatttcttctctcctcatattcagtgccctgatggcattctcatgacagtccatctttgttttcatagagaatgaaatttgcatcttctctgatgagacaatgcattgtttctacacagttcatgcatattctatgaaagaagtatcatgctgttgacacattattacaaggtttatcaactgcattcattaagaatttggacattatggaaaaggacaggctcagaagggactacttccaaaaggttgcttggtgaagtcagatcaagtttccctgagggcagtagggtgcaaggccgcaaccagaaaagatatgtgacatttgcctattttccttttcataagtttcaaatagacttatattgtaatagcaatttgtaaaacatcagaaaattgaattgtaacacacagaaagcaggtaaaacatgaatgtatagctcaatgatttctcacagaatgatcacctacgtacccattagtcaggtcaataaatgaaaataagccacacctcctccctgcccccgccaagaaaaaagaaaaatgggaaaagagagcaggctgtgagggcctcaacttttactgatgaggaaggataaatgaggcaattcaaattggacatttctatgtattattcttctacaatacttatgagacaattccttgcaggaatactttgtctctttcacctactggaataaaaatccctgaactaaaattttcacatgccagtgatttcagaaggggtgtgatttctttgccaaaaaatgtgggtatccagaatcagctctatcataaaccagtatctctgtcattttcctaattgttctctcaccagctttgctcacccccaaaccatcctctaccttgctgcaaagtggtattttataaaagcaaatttgagtcatcttgcttaaaagtcttcatggctccccatcctctaaacaaccgggcctggcactcagaccatcatggcccacatctccttggcttcctcttctgactcatcttcttccatgtgtccatgtttcaatttttctgagtgagtttcatctactgtctcttgcctttttgtcttcacatgagctattctatcttctttgctttttctcactctgtctagacaactcctgcctgttcttcaagactcagcataaatcacttccctcaggaagccttccataatccctgctgccattaacaaactcttgttcagtgctcccagaacactctgctctgttctcagatctgtcataacatttgccgtgttggacttaaatattggctctcttgtgtgttgctcccatacagctgtctgtgacttatctttgtaacctcaggctttcacacagtatttgaaacatagtaagtgctcagttaatgttttggaagatcagttaatggcacatgactctgtgaatacagcaagtgttttgtcttctcagctacccaaaaagcctcaggtggagctgaacctcctatatgcaaggtacaaataatgcatactggttgattaattataaataattcattttggttgattccaaacaaagacagcagcatctggtgtcactctctcagtgccttatctaagtaattgaatggatcctatctccttaggctgcaataataaccctttagggcagtgttgttccaactgtgagttgtgtgacccattggtgggtcatgaaagcaatagagtgcatcaagactggcattaaaaataaaaaaagcataaaataaaatagagtaaaataagaaaatatcagcatattacatattaaaaagttaagtatcactcagctttatttctgttacatatgtgacatgtactgggttgcaataccaaagtatttgttactgtgcatctcagtcaaaaaagtctggaaaacagtgctctgaggaaagaacgaaattctgccaccgtgtcccccaccctggactgaacggaatcagatacccactactggatgcaaaccatgcaggagctccttcccttcctgttcccatgctaagcttatctttagctgtaattctgttctgaaatagaagatgctcgtctactaggagagaaatagttttgaaaactttctgtaatattttgtgtccatttttaaatcaaagatttaaacattaggtaaattttgccctcctgaggcttcttccttcacttaaaaaaatgatgctctctgataaggattagaacaaatcctttgagatgccagttttgtactccattctgcaaatgctaaaatggcctctaattcagtttacccagaattggctacaaaggtcttctagctgcagggtgaatcaactatttggtagcagtttccacaaggaaacagaacagtttgttttcttcttgtctatttgaaagtgaccccatgtctacggagctggccaagaaggtagggagtgaaggggagtggagctgtctactcattgactattttgaaatctgaatttctgccacagcttgggtaggctttaccttttggtttctacttactcttttgttggcaagtttctaaaagcacagcagtggctggggtaagtcaacgtggcctccaggagattgacaaatgtttctcttgatggcaatttttttagagaataggatgacgtggcaattagcctctgaatggactctaggccatagctcggcagggcctgcaatttggtggaagaaatatccctgaacaataaaggggagaaatgctttttatttatttattttatacattttttttttttgagacggagtcttgctccgtcgcccaggctggagtgcagtggcacgacctcggctcactgcaagctccgcctcctgggttcacgccattctcctgcctcagcctcccgagtcgctgggactacaggcgcccgctaccacgcccggctaagagaccggggtttcaccgtgttagccaggatggtgtcgatcttctgacctcgtgatccgcccacctcggcccctcaaagtgctgggattacaggcatgagccactgcgcccggccatattttatacattttattcagagaatgaaacctcccctcaacaatattatcattataggctctgaggaatcttttctccatcttgctttccccttaattctccatttcaattactctcactaagatctgaattcagaaaagcgagtctgtattttttctcatgtgcgcctcattattcttttcaaggttaagtataactccttgcacctaccatacatttattagcatttctctctctctcccctcttccaactccttttccctaccctctctcttcctccccaccctctctcttcctccacttctctctacttagcagaagtgaaataaccacttgctttatgcgacagccagcacatgcagttacatcagcttttgtgctctaccccaggggaaattattcagggcttcagatgcctcagtctttgattgattaagccctgcaggagaggttttcatgaagcacagcctggttacttattaagagcttctgtgtggcattagccatcatctacctaggaagcagaatgcatgttctctaatgcatgttctctaatgcattctctaatgcagaatgcatgttctctaatgattcatctgttcaaagcaagcgaacactcagccttgcaagctgaactgtgtgaaaagctcaggctttgtcaacaaggtcctgaactctttggttttactagacttgaggcaatgcccaagaaaattccaaacacattaagtgttaggagaaaagagtcaatgggaattaaacaattctgcttatcttctaagtggctgctgctggtgcctcacaaaacttttccaagcagcacagctcccctcagcaatcattcccaagacttggtgttcagcacatgggaggggaccaataggtgatagatggaagatgaacttgacaacatggaatgatgatggtgtaggccctcagtggaaaaattaaggcagcaaaatttgtctcaggggcttcagaatttcctgcttttgtgtccctgttgatttaggtaaccagggttctcattctgctttatagggtttttatctcagacatgttagggattgagctctttgaagatctggtggcttttttgtttgtcttttgagtgggtacatttaaaattaggttcttagaaacagtaaggcctcgttacaaggcagtgaacctctgatagtgggttttcagtcttagtaacagactagtgggagaaatgctttttgagtaagggtggagtggatgcttttagatacgattcaagtcctaggggtataatgagaacaaccccttgggaaggaagagacctaggtctggtgctagtgttttggacatgagagtgtaggggtctgtagtgcccacagtcacttctaaggagctaaccaagcagctcttcaagcaaatactgtcatgcaggagtcttgggaacacagtgggttggttgtgttttgcacctgagccagaggcagctctctttgtttgcctagtgaccaagtagatggccagcttgctgtaacagctctgcctacaggatgtgctaaactggagagtattcagccaacttacaagattcggagtctggtatgctttgcatatgagacatgcagaaaaagacccctaggataaggttgccagaagttgagagcagagaaagcagtgggcaggagccacaaggtagtggaagtcataagtaaacagaagttatggggttgagtggatattagagggagttaggattgacaacgacagaagttaggaagcagaaagatctaggaattttagtggtgggagttaggaagtagagtcagaagtcgatagtggcaggacttacgaagtagacagagtgagaactggacagtggcaggagctaggaaataggtgaagtcaggagttgacagtgggagctaggaactagcacagtcagggctcaacagtggcaggaatgggaagtagagagtcaaaagtggatagcaggaaggagttaggaaatagagagtgaggggctgaggggcaggagctaggaagtagacagactttgggttttataatggtggaaacagaaattagacagagccatgagttgatcttggcgggatctacagtacgaagaataacaaggacagctcatttccttcccttgctcaaaaccccaaagcctccccatctcattaaaaaaagacaaagtctatataagtgaccacaggccccgccatgatccagctctctgccacgtctctgtccttatattctgtgattcccttctttgctccctctgccatattggcctccttgctgttcttcaaatacacaaggcaagattctgtctcaggcctttgcttttgctgttccccctcctggaacacttttcctgcagataatcacgtaacttgctctcttagttcctttaggtgttcgttcaaacgacactttttcaggatagtcttccctcaccatcccctttaaaatagtaattccccctctccagaactcctttccccccaaccaaatgagttttctcctctacaaccaatagcatttggacaactacatattttatttacttattcaatccttgtctgtcttccccatcctatgaaggcagaagtgtttgtctcttcttattctctgccatttccctgatgcctaatccagtgactaccacatagtatgggttcataagagttagtgaataaacggatgaataaacaaacaaatgaactgggttaccctgctcaccatttttctagaacttttctcattgtaaaatgacatgcctgtttattgctttgcgtttgttgttgtctcccttatgtgactgtcatctcactaagggcaaggaccagggctattttacttactactgtctgttcaccacggtgcctggtacacaggataggttcaatcaatgtttgttgaataaataacatctgctagagtagggtgtcgtggactgccacctctatgatgggataactggtcgccgtgtgtgagagcagcacagtatctggaactctgttgcatttctccctgaagcctgactgcagcttcagctctctgcaggatgttggatgtttcatgttggatgtttcaggctttgtcagattcaatgttctattcctcctaactttctcatgtatcttttttttttttttaaatactttaagttctagggtacatgtgcaaaacgtgcaggtttgttacataggtatacatatgccacgttggtttgctgcacccatcaacttgtcatttacattaggtatttctgctaatgctatccctcccccagctgcccacccgccgacaggccctggtgtgtgatgttccccctccgtgtcgatgtgttctcattgatcaactcccacttatgagtgagaacatgcggtgtttagttttctgtccttgtgatagtttgttgagaatgatgctttccagcttcatccatgtccctgcaaaggacatgaacttatccttttttatggctgcatagtatttcatggtgtatatgtgccacattttctttatccagtctattattgatggacatttgggttggttccaagtctttgctattgtgaatagtgccgcaataaacatacgtgtgcatgtgtctttatagcagcatgatcctttaatagtacaatcctttgggtatatacccagtaatgggatcgctcggtcaaatggtatttctagttctagatccttgaggaatcaccacactgtcctccacaatgattgaactaatttacagtcccaccaacagtgtaaaagtgttcctattcctccacatcctctccagcatctgttgtgtcctgactttttaatgattgccattctaactggcatgagatggtatctcattgtggttttgatttgcatttctctcatgaccagtgatgatgaggattttttcacaggtctgttggctgaacaaatgtcttcttttgagaagtgtctgttcatatccttcgcccattttttgatgggtttgtttgtgtttttcttgtaaatttgtttaagttctttgtagattctggatattagccctttgtcaagatggatagattacaaaaattttctcccattctctaggttgcctgtttactctgctgatagtttcttttgctgtgcagaagctctttagtttaattagatctcatttgtcaattttggcttttgttgccattgcttttggtgttttagtcatgtagtctttgcccatgcctatgtcctgaacggtaatgcctaggttttcttctaggtttttatgtttttaggtcttacatttaagtctttaatccatcttgagttaatttttgtataagggtttaaggaagggatccagtttcagctttctgcatatggctagcgagttttcctgacaccatttattaaatggggaatgccatttgtttgtgtcctcttttattttgttgagcagtggtttgtagttctccttgaagaggtccttcatatcctttgtaagctggattcccaggtattttattctctttgtagtaattgtgaatgggagttcactcatgatttggctctccgttaatttcttattggtgaataggaatgcttgcgatttttgcacattgatcttgtatcccaagacttcgctgaagttgcttatcagcttaaggagattttgggcggagacgatagggttttctaaatatacaatgatgtcatctgcaaacagagacaatttgacttcctcttttcctaaatgaataccctttatttccttctctcgcctgattgccctggccagaacttccaatactatgttgaataggagtggtgagagagggcatccttgtcttgtgccagttttcaaagggaatgcttccagtttttgcccatttggtatgatattggctgtgggtttgtcatagatagctcttattattttgagatacattccataaatacctagtttattgagtgtttttagcatgaagcactgttgaattttgtcgaaggccttttctgcatctattgagataatcatgtgtttttttgtcattggttctgtttatgtgatggattacatttattgatttgcatatgttgaaccagcgttgcatcccagggatgaagccgacttgattgtggtggataagctttttcatgtgctgctggatttggtttgccagtattttatggaggattttcgcatcgatgttcatcagggatattggcttaaaattccctctttttgtggtgtactctgccaggtttagtatcaggatgatgctggcctcatagaatgagttagggaggattccctctctttctattgattggaatagtttcagaaggaatggtaccagctcctctttgtacctctggtagaattcagctgtgaatctgcctggtcctggactctttttggttggtaggctattaactattgcctcaatttcaggacctgttattggtctattcagagatttgacttcttcctggtttagtcttgggagggtgtatgtgtccaggaatttatccatttcttctagattttctagtttatttgcatagaggtgtttatagtattctctgatggtagtttgtatttctgtgggatcagtggtaatatcccctttatcattttttattgcgtctatttgattcttctctcttttcttctttattagtcttgctagcagtgtatctattttgttaatctattcaaaaaaccagctcctggattcattgattttttgaagggttttttgtctctctatctccttcagttctgctctgatcctagttatttcttgccttctgctagcttttgaatgtgtttgctcttgcttctctagttcttttaattgtgatgttagggtgtcaattttagatctttcctgcctttccttgtgggcatttagtgctataaatttccctctacatactgctttaaatgtgtcccagagattctggtacattatgtctttgttctcattggtttcaaagaacatttttatttttgccttcatttcgttatgtacccagtagtcattcaggagcaggttgttcagtttctatgtagttgtgcggttttgagtgagtttcttaatcctgagttctaatttgatggcactgtggtctgagagacagtttgttgtgatttctgttcttttacatttggtgaggagtgttttatttccaattatgtggtcagttttagaataaatgcgatatggtgctgagaagaatgtatattctgctgatttggggtggagagttctgtagatgtctattaggtcttcttggtccatagctgagttcaagtcctggatatccttgttaattttgtgtctcattgatctgcctagtattgacagttggatgttaaagtctcccattattattgtgtgggagtctaagtctcttcgtagttctctaagaactggctttatgaatctggatgctcctgtgttgggtgcatatatatttaggagagttagctcttcttattgaattgatccctttaccattatgtaatggccttctttgtctcttttgatctttgttggtttaaagtctattttatcagagactaggattgcaatccctgctttttttttttgctttccctttgcttggtagatcatcctccagccctttagtttgagcctatgtgtgtctttgcatgtgagatgggtctcctgaatacagcacactgatgggtcttgactcgttatccaattttccagtctgtgtcttttatttggggcatttagcccgtttacatttaagattaatattgttatgtgtgaatttgattctgtcattatgatgctagctggttattttgcctgttagttgatgcagtttcttcatagcattgatggcctttacaatttggtatgtttttgcagtggctggcactggttgttcctttccatgtttagtgcttcctttaggaggtcttgtatggcaggcctggtggtgacaaaatctctcagcatttgcttgtctgtaaaggattttatttctccttcacttaagaagcttaatttggctggatatgaaattctgtgttgaaaattcttttctttaagaatgttgaatattggcccccactctcttctggcttgtagggtttctgctgacagatcagctgttagtctggtgggcttccctctgtgggtaacccaacccttctctctggctgcccttaacattttttccttcatttcaaccttggtgaatctgacagttatgtgtcttgggatggctcctctggaggagtatctttgtggtgttctctgtatttcctgaatttgaatgttggcctgccttgctaggttggggaagttctggataatattcaggagtgttttctaacttggttccattctccccatcactttcaggtacaccaatcaaacgtagatatggtcttttaacatagtcccatatttcttgagaccttgttcgtttgttttcacttttttttctctaatcttgtcttcttgctttatttcattaatttgatcttcaatgactgatatcatttcttccacttgatctaattggctattgaagcttgtgtatgcttcacgaagttctcatgctgtgtttttcagctccgtcacgtcatttatgttcttttctacactgatttttctagttagccattcgcctaaccttttttcatggttttttagcttccttgtgatgggttagaacatgctcctttggcttggagaagtttgttattacccaccttctgaagcctacttctgtcagctcatcaaactcattctccgaccagttttgttcccttgctggtgaggagtggtgatcctttggaggagaagcgatgttctggtttttggaattttcagcctttctgctctggtttctccccatctttgtggttttatctacctttggtcattggtgttggtgagctacagatggggttttggtatggatgccctttttgttgatgttgatgctattcctttctgtttgtgagttttccttctaacagtcaggcccgtcagctgcaggtctgttggagtttgctggagatccactccggactctgtttgcctggatatcaccagcagaggctgcaggacagcaagtattgctgactgatccttcctcttgaagctttgttccagaggggcacctgccagatgctggccagagctctcctgtgtgaggtggttgtcagcccctactgggatgcgtctcccagtcaagctacatgggggtcagggaccccttgaggaggcagtctgtctgttatcagagcttgaacactgtgctgggagaaccactgctctcttcagagctgtcaggcagggacgtttaagtctgcagaagttgtgcccacagctgccccttcccctaggtgctctgtcccagagagatgagggttttctctgtaattccctgactgtggctgctgcctttgttcagatatgtcctgcccacagaggtggaatttagagaggcagtcagccttgctgagctgtattgggctccgcccagttcgaacttcctggcagctttgtttacacagtgtgcataaaaccacctactcaagcctcagcaatggcggatgtcccttccagcatctcaggtctatcttagactgctctactagcagcaagaacttcaagccaatggatcttagcttgctgggctctgtgagcatgggacccagcgagccaggcacgggagggaatctcctggtctgctggttgtgaagaccatgggaaaagcacagtatttggtcaggagtgtatcgttcctccaggtacagtctctcacagcttcccttgcctaggaaagggaaatccctggaccccttgtgctccctgggtgaggtgacgccctgccctgcttcagctggccctctgtgggctgtacccactgtccagccagtcccaatgagatgaaccaggtacctcagttggaaatgcagaaatcacccgtcttctgcatcgatctcgctgagagctgcagactggatctgttcctattcggccgtcttggaaacaatttcccatgtatcctttaaaacccctttaactgagagagcctggccctaatccttgcaccctcagagagtctgacagcagctcagccccgtccaaccaagtgccaggggcatgccagatctttggccttagattcccatgagtggattccaggtgggtagccagcctctttgccagcacatgaggccacccctcatatttggtgttaggggttgaattgtatcctccagctaaaattcatatcttgacgttcccagtacctcagaccttatttagagatagggtctttacagaggtaatgaagttaaaatgagtttattagggtgggctctaatccaatatgactgctattcttattaaaaggggcaatttggagatacccacccacacacacacacacacacacacatgcacacacatacacaatgtaccatgtgaagactggaattatgctgccacaaccagaaagaactagcacaagctaggagaggcctggaatagatgctttcttcacagccctcagagggagccaacccctgctgacactttgattttggacatctagcttccagaaccataagacaaaatttctgttgtctaagcctctcggtttggggtactttattatggcagctgtgatacactttgtctttccaacagcagccttttcaggtgtagaggctgatgtctcacatatcagcttggggatgatgtggagggacaccctaagcagtcctgttggggtacactgggcagggaggggaggcagcaccattctactcacaaggttttcggccctgtggccccacggaaggctccattgtgcatcttctccagatgtacgttttcctttagctccctgtggggaaggatattgcccttagtggagtttgtacctcatgtgtaagcattcgtagctccatatacacatgtttagaccaagctatgtgcatgatgtatagggttaaaagggggaaaaagggtaagtggagggaaagtgggaaaaagacaagctagttcttaatgaaattatgaaattactggcatgtgtgttggccacaccttttttcttccattccccccttcacttggtagaactctgtcctacagcttaaagtactcaccccctcctgtcctggagttatgaaagtttaccaccagacagctggataaggatgagattgctgctccaagaggccaagactgaacggctgaagtgcagcctactctttgttagcctctcagtcattgtgaccgtggaggtctcagagtgtgctaatagtaatttattgaagtttgcaaatacttgaaaaagtagggtccattcaaagttatcccttttgtagtgtaatttgcattctttttctttcagatatgcatttctctgtgggtgagaaagaggaggacttacagcctctgtagaaaattgccccatggggctgtgcagtgtaaatgatcatcgccaggtgtatgtgtgtgtcatggaaaaagtgttgagggcctctactctcaaggctgtggaagaagccaaaagctgttatggaagtagctccctgagggctctgctgccttgagctcaaagtcattcaggctaaactccttaggagcagcacaatctggtcctcctaggcagcctcctttctgggccctgacactggtatctctaagcacaggcccttctttgagtagtcgagggagctagaagaggaatccctgggctcaagtctgccagccttcttttgagcacttcctctctataagagaatggttgtgattcagagcatctggaaaaccgtggatggtgggaacagtgtgcatctaccgttgatgtgatgatttcaagcgtgggaacatgattctcttaccacattacagtgtacacagcaaaacaaacatactaacacccattccccgccttcattgctgtttaagaactgcaaaaacccctgcatctcactctgggtggctgttttccacatttctactaagcattttctttggaaaccctcagccctttcatcagaatccacctgtcaatctcacatcgtcccatcccctgggtatatttctactttcaaagagatgagattgtcagaatcaactgctgtttaaaatataaatcaaaagaaatttttcttcctaaacctccatggctcttcttcctgattccgtttgttttaattatgttcagttatagttataaatcattgaaactgggctctgtgagcaaattattcttgtgtcagcccagtcagattaattgttcaaatttcgtgacagagcatttcacacgttttattaaaactcagatctttctgtatactgataactctgtattatgcaacttggtcaaaaaataaatcaatttcccacattttcctgggggtcacttttgagaattctcccaatgatgtgaccttgcggtgtgagaagcacaggcaggatgaccttttgaagcacaggggaagaacccacaagctccgccaaagttttcccagcttgggtgctctgggaacagtatggactgactcctagacccctcaggtgcctcagggccaccttctgcggctgcccctgtctttcctgtgctgccttagtaagtcaggtgtttgcgaactttgcaggacttcagtatcgttgtgttctgaacaactttggacaggtctatttatgaggaagggttgaatgtatcgtttgaaaattttgcttgacagttttgaaaactgctcctcccctgctacttaaactctttaatgggtgaccttgcccttagaagagaattcagactcctttcccatggctgctcagtcctgctccatctccttcatctccagtctcccccttgctaaagaccctccagccacactggcctcccctcaattcctgggacttaccaacttagttccttttccagctcaggacctttgcatatctgctccctctttctgtaacgtgcttccctcactgttgacacagtggaatccttgtcatccttcaggctcagcctaaatatcacgtcctcagtgaggccatcctggataccttgcctaaatcgttcacccctcatactctctcagatctcagtaacaggttatttccttcatagtatatattacccttgtaataattttatctgttatttgcttttttttgtctgtcttttctgatagaacagaaactacataagggcagggactgtgacctctctaccattgcagactcagtacctaacacggtgcttagtatatcagtggtgcttaataaatgtttgttgaatgaaattaagtttgttcttggcaaactgactcatgttcttgatttcctctttcttgcaacagtgagatacagggtatacaggacgttgactaattgaacttttcatagttcacgtccattttggcatctctgtaacagctgatatgctgctgaccatctgaaatcttccctcctaaatttctgtttttcctgacctcacacagacatactgtgttggtttttctcccgtctgttttattttgctcttgcttctcttgctcatcttgtttccctttaatttaatattcagttcttttatttttccccctgttcaggtgacctcagccacacaggacttcagctatcccctctattcagatgatcctggcatttgtgtctctagccctgccctaccccttccagccttccgtccttcctgctaacagatgaaccttctttaagcactcatctcatacttccatctcagaactttcaatggcttctcattttctggagaagagagtctaaactctttactatggcatctaaggcccttcctgttttgtccctaactcgtatctagaaagtactatctgctggtctatgaacacatcttataattcctcctctggaccattcttctggctgtcctctgcttggaaggcatttttcctctctttttgcctaagttatgcccagctcaaagcccacctttctcagaggctttctatactttcttttcctgctgcctttgaaatcccagaggactttacctctctctggggaggcttcatgctttgccttctgttttagttagtagtcaatgtgcagtttatacactatttggagatgcttcttcctatgctgtaagctcctgtagggcgacactaggacttaatcatcttcattccccctcaaaatacagcatgtttcttcaaacacagctgatgcttggtaaacatttgtagagtgaataatggaatgaggcatctgagagaactgtgccaggagatgatataaatgcctctgatttaagtttgtcagaaatcgatttaattggccagagtgaacacttcattaacttaagggtttttgttaatgaacctttcattaagtcatcaagtcaaaaagaacatgagagcaaattcaccccatgataggagaacaacttaaaaaattctacaatttcttgaacacttagtatgtgcaactatgctgtgctaagcacacaaaagtataatcttgttgaattgtttacttataattaattatattatatattatataataaataagcacctactctatgccaggcacagcgttaagtactgaggatatgacattttcaaaacaagcctattattggatccattttatgaatgaagacactgtggcttagatcggttaagtaacttgcttaaggtcataccagctgttaaatagtgggactggagtttgagtcccactcactctgaagtctattcttttagccaccaaacgatatagcacatatcaatataatagaggctttggttacatatctataattaaaaataaatagcatattgtacagaattttgctacccaacattagactgtgctacccaacttcagactgacagcatcagcatctcctgaagcttgttaaaattgcaaattctcaggccctacctagatccactgaatccaagtttctgggggtagggcccaggaatctgtgttttaacaatctgcagattcttcgtaggtgtgtaaaaatttgagaagcattagtatagatcatggtttatacaacttattgattttaaaagccttttttgtttattttccataattttggctttaatcgaacttttcatgtgctcttagtttttattatgcacaaattgcagggtgactgtgacctcaccctgtacttgctatggttcaaatgtccccagccccacaaactttgtgaatatgccactcttttagaagaggagccatagaaggaaagagaggttgagaacagtgagggaaacagtagcgatgctcttcttgagttaaaggctgttaacatcaagaactgggtagggtgtggtgaaaacacaaagctccctaccttgtggaaaatgagcttcctcccacactagcagtacagagatgggactctctgagtgggtctgttgtggctgacaagactggtaaatggtggtgttatctgatttctctgcagtggggccaggagaagaatttctttctgaaattctgcttcctctaacacaccatcaacctgagtgagggggctagagagggaggcattgagttgcaggaggcataaagtagggtgttgaatattgcagtaaactgtcaacttcaatgtatccaggctgcatctgtctttgaaatcagggtgctctggggtttctagccagccagttgcctagtaacatgcatgaaacactgagggctagccacttgaaagtttatttttgccctgagttagttgctgaagattgaatgtgatcttgtagccagagtaatatttcatttttattcctgagctggggaaataagcaaatacttacagtgaagtcagtgtcgtcccattgaatgcatgactttgtacttcttcaaatccatttccatatagtttgctgaaggagggaggagagggtttaggaatgggaagaaactgaaagaaacagtttggaaacacatttttcctcctgtaacatatattactaaggttattacaggcattcataatatctagttctccatcatcaccaccaccatcaatttattaagtgtctattaagtgctagatacttcatcagccactctatgtttattttatgatttaatcctcatcatcatttccattataccgacaagaagcctaaccctcagtgtggttatgtagcttgcttaatgtcaaaggaaaacagtggcatagctgggatccaaggccagagatgtttaacacttaagcctttcctctggttttgcaggccggtgtgggcatatgggttttctgggtgttgaaagctgagggcagaggaagcctccagcactgagcccacttttttttttttttttcttggatgagtatgtggttttgctgatgtcagatttggctccacaaccaagaagatttcaatgtctgtaaacagtcctttaagaccattagtgcatagtgaatcaatttacttgggcataaccagcatttaaaaaatctacatagaaaaaataaaaagtattagagcattttgcaagtgattagggtattaatgtttatgaaactttatcccaccattttttatggtatatacctataaatacacacacacacaaacacacacacatacatgtatacttctacccagaataagacataagaggatccttagaacacagatatggggaaatgtttgagccacaaaggagtctagagggaatcaagcagcacattgtcattttgcaaagaaggaaataggctcagtgagggaaagtgacttgtctaaagcctacaactggcataaatgggactaggatatgctttgtctggggctacatccagcacatcaattttgctgattctttttacttttcctccactgatatcctcatgggctacccatcctcttcctgcaggattgtatttcgtgtcgtgttctcagtggggcctttactggctgccctatttaaaacaccaatttcctgtttccccctactttccctatactccttccctgatttgctttgcctccgttgctttatcatcatctgacccatgattacattttatgtttttattgtttacctcctccgtgagaacatatcctcctgtatctagaacagtgcgtggcacctgggagtattacagtaaatatatattaaataaattggatgaccaaatgggaatttcttaccataaatcatagccaaacaagtttgaaagctactgccttagatggaaatatttgtataaattctttgtgaatgatgatgtaaaacccacgtgagaaagggctgtggtgtgatgtaaagttaaactccttatatctgccaacaccctaacttccctttgcaggattgctggaagctggccagggacaggctgtggggtgtgacttgagaaatggttcagaaacatgcttcacttgttcctgctccaggtagctgttgtctgcaaggcctctctagtctttgttaaacaaaatgagcatggagcttcactttgtggggtgtgagtatgtgtgtaacatcaacagcatgtatgtactctgtgtgtatgtatgtgtggtctccttccaccaacccacaacacagctgagacaaaccaacatataaataaaggtgtgactcatgttgaagtataatatttaagctctgaaattcagaaaatataactagagattacaaaataattcttaagtctcctcgttagagtcagttcaaagagggcaggggagaatatttaattcatttcttaaactcctggggcctcacagaatgcctggtgcctagctcagtcaatagcctgagtaaagcagcagctttgcccttccccgggaaggggaggcttccatggtttcccaggctctcatatgctttcttctgagattcttcagagtttacagcttcacatactagctctcccatattggattactggatgccactttcaatagttttcatccctttctatattgcagaatctgaagcatgtttctgaaccatttctcaagttacaccccacagcttgtccctggccagcttccagcaaccctgcaaagagaagctagggtcttggcagatacaaggagcttaactttacatcacaccacaggcctttctcaaataacttatatttccatctaagtcagtagccttcaaaattgtttggttatgatttatggtaagaaattcatcttacatattctcatttggtcatcccattcatttaatgtatatttactgtaatactcccaggtgccaggcactgttctagatacaggaggatatgtttctctggaggaggcaaacaataaaaacataaaatataatcatgggtcagatgatgataaagcaatggaggcaaagccaatcatcagtttcacatactagctctaccatgttggattactggatgccactctcagtagttttcttccccttctatattgtggaatctgagaacataggtacagggttgatgcctgttgtcttgcataattatacacaaccttgttgtttccttagaagctcaatttcaccagaattttttaaaattttgcacctaggatgttagtctttggcagtctcctgtcattttaggggttgaattcctttatagcagtctcttttagataaaggaatcacactctttttctgaacttccttaagtttgatttcttagactcttgcccggtatttgtcaaaactttctcctccatccactgaattagaatcacctggagttgcttgtcaaaaatgcagactcagacctattaaatcagaaactaatagtggtatccaaaaatatgcacttttataacaagctctcctagtgagccttcagtatgccagtttgagaacctttgccctagggtatgtcataggatgatactgttctcatcattcccatggggcaaatcagatggtcattggcttggaattgtgtccagagtctagtccctggattgctttctctaccttctaagtgatgatcgcactacacatggagtagatgaagaaaagatagcccttgctttgttttcaccaaagctgctaacagttgtctagatgcccattattcatcacagctgcatgctgccctgatccttgtttgatacatgttaggattttatgcttttctgttagactcacagtgtcacaggtgtacccttgtggttaagtctgcaggcactgaacccaattgcttgaatcccagctctgctgcttacaatctgaattactttgggcaagttacttaccatctctctacattagtttcctaatctgaaagtatgataatagtatcaacctcataaagctattgtaaggactgaaaatgtaaatatatgttaaacatttataagtaggttctggaatacaataaatgcttaatgtgttgatcttattattattattattatatttttcagtagcctctagccttctgacaagaacagaggtaaacgatctccctttccatgctctggacaggatttctgtgaaatacaagcattttgtttaattgcactatcatccttctccaatgaagtagggggtctttctcttcctgggcagagcaagtcaggtcagtggcctgggctgcactaaatgtactcacgtgctgaaggctctcaaacacctttggtctgtactagcgtcatggacttttttgcctttagacattttccatgtctttttttttttttttttttttttctgaatagcctcagtcctgcttgtctcaactttctaaacaacgtggcccactgtttcagttgctcttgtctcttttcttaccggtcacacacaatagaatgtgctgccttgttgtgattaaaagagaagcttccttactttggagaaattacaaatgtgagtgggagacctcatgctgtcagtcttgcacaatgcttttaatgcccttaaaaaaacatctggagagtcacttcagataacttttttccaaaacatcatggtgtcagaattaaatgaggaaggcttcctttgctttactttgaggattttgtcacaggcacaaaaatgaagatttttcgcctcccccaacttctctattacaatagctgtacctaactttaaagcattgtctaggttctctactcaaatgtcagtaattgtgaatcacacagaatggcacctttttgttcaaaataagatttgggctttagatattaatcacagatgatactctaattctgaatgctgctttataatgaaccccaaatattcctggggctctaaaagcacttctgggattctaatattaacagtattagacattcttctatagtttccttttggatcacctggtttctggatgattttgaagaagaaagcttaatttatgtttacagatactcagggtctcaaaaaagtggacccattgctaaaaggcaaagcataccgttttagaagatatcttttagaaaatatggtggtatatttgtaagcaattttttttttcaaatgactatacaaacagaattctaaagaaaagaaaaggaagtcctaaattcaccactttcttccctatgtggaactttgctgaagtccttttatagctgaataattccttacgtatgaagacacttctctagtggatgtgccggcagtggttagatgggtaactgtgacctggttactactatgtgctgctgtaactctagttatgaatcagggtccccccatttctgggggttcatagtctctatagcaatggatccctctccctgtattgctgtgcctcctgcctctcagcagcactgagttttcatgtttccttctacctcagccatgttcatgtcaacttatatgtctttactatatgtaataataaaaagggtgacaggcatcagaaagaatgataacaataaaggattctaggccgggcatggtggctcacgcctgtaatcccagcactttgggaggctgaggcgggcggatcacgaggtcaggagatcaagaccatcctggctaacacagtgaaactccatctctattaaaaatacaaaaaattagccgggcatggtggtgggcgcctgtggtcccagctacttgggaggctgaggcaggagaatcgcttgaacccagtgagctatgtcaaagtgggatgacctgactaaggctgcttggctggttagacacagagccaggactgaagcccagactccctatttcaacacagtagagagacccagcagtctctctactgtggcttgtcatgggtgcagcctggaatcatcatgcctttccagacatcacttctctgtagggtcttagaaaattaattgctatgacctttccatttctttgtggagttaagatgtgaatcaagattgtctctttttttgagactggtgtgaccaatcacctagaatattttgaaggtggcacagctaaattctgcttatttgggaaggaggggcatttcaaggtggcctcttgaggagatttaatgaacaaccaaagtggctataaagggacataaaagcataatgcatagttttagcattagccccactgagtttctccagcatcaagtgaagtgttttgttttcattaaatgagctcacagttggtaaagatttgggtagggggagggcaagacaggttctacaaaaagcaaaatctcaaataccactaataatgaaaagagaaggcttgctttcattattttctaattagagagttgaactttatagctgagaaaataaggctttcctctttaagcgtaatgccctttttccagcaggctgctccacacgatcctttgcttacagaggggcccattcagcagagaacaagtgccaggcaaataaatgactaatcactccccttccagatgaagggccaagaatgagaagggggatggaactacaatgtcccacaggctctctgggagagacggagcctcaatctttattaacttcagagtggggaaattacaccctactggcatgcactctttttcttaaaatcatgagcaacataagttaatgtccctgtcattagaaaaccatgaagctctctgtgcacatactgaagtatgatgtgtgagaaggaatctttggttactctttgagtctcgtggggtggcccagtcttgtgagctcatagttacctatggattatcccaacattggttttcttcttcaccctcctccatgtcttctgccttttcgttcctacttcactccactcccatcattgtacatttacctcggaggaatacctattggtctctgattatttttagatttagatcaaagttgaagggagtcatggatatttgtgatctttgaataaagcctactctattgaatagattattttattactttttccagagttacctccaagcctgtctccttgtcctggcacttaagggtctctgcaattcagtgtcctctccatctcagccagttatctaaactcactttccattccttaaacagcatgtttactcccaagtagtagcctcatcctgttctcctcctgccatgcttttgctcctgccatctcttcacttggattccttactctgcctttctctgtatgttgtggtaccgcataacggttaagaacatgactctggagccatactgtctgggaccaaatcttgacctgagatagagatacttaacctcttgatgccttggtctcctcatctaaaagtagggttgatagttcctatctcataaggttgctatgggacttaaaaagtacttaaaaacagtgcaggtatttaataagggctacatacatattagctgctattttcacatttacccatataaacgttactgattccatgaggtctaattcaaatctgttagctctaccataaagcctctctgacttccccagcccaaaaggacttctctaagatcttatttctaggtaccacacactctcatagtgaatatctactagcttgtattattattttattattttatgttttccccctcattgagactatgaacttctcgaggacatgaatctaatcctgtgtcttttgtgttcttgatatagacatgtggggagaccccaaatcctaaggcatgtgatatcacctcattcggaatttgtttgttgaataccttgtttttggtgggggacatgatgaatgagtagttccagatccattatgcaatggtgagttgaaaacactttataagcagccggtagagctgtggtgtgtgagggaagtggcaggagtggagagactgttgagaaatatttctaggatcaacagaatctctttcctggtgtttgagagttgcaagtaaagagtatgggttatttttgaaattatttttggttgctgctctgtattcttttgattgcattaatctgagatgaagctacatggtcacagctttgtaacatgacaattatacatgtaaaattacatctacacaaagtaaaagtactatacaaaggcagtgcaccaaggataccaatttttagaatccagtgatataaaagagagtcctctgagatgatctcttcttttgcttcacatctatctcttcatttcagagtcattccaatccatgttttctcttttttctttaagggtgagctcctttattgcctcatcacaattttgccatgggctgtaaccaaagcagaaagagtgagagggatatggattttaggagcagaattaaatcagggtcactgggctttaggtataaagaaatgaggccggggggtggtgactcatgcctgttttcccagcactttgggaggccgaggagggcaggtcatgaggtcaagagatggagacaatcctgtccaacatggtgaaatcctgtctctactaaaaatacaaaaattagctgggtgtggtggcacacgcctgtagtcccagctactcaggaggctgaggcaggagaatcacttgaacccaggaggcagaggttgcagtgagccaagattgcgccactgcactccagcctggtgacagagcgagactcagttgcaataaaataaaatatgctgcccaggatgctgcttctgaatggtacggcagtggagggctcccatgtgaagatgtatggcagggattccagagggaaggaagtctggcaagtgtcctgtgaagaacatgggttgagttatcttagtggagtgctcctcaaactttaatgtacatgtgaatcacttgggatcttgtaaaaagcatattctgagttagtaggtctgcggtgagctatttctaactagaggatatggtttagatctgtgtttccacaaaattgcattacaaattataatccccagtgttggaggtggggcctggtgggaggtgactggatcatgggggtggtttctcatggatggtttagcaccatccccctagtgctgttcttgtgatagagttctcatgagatctgattgtttaaaagtgcgtgacatctccctgctctctctcttcctactgctcctggccatgtgaggtgctggctcacccttcaccttccatcagtattgtaagtttcctgagacctccccagaagctgagcagatgccagaatcatgcttcctgcaaagcctgcagaattgtgagccaattaaaacctcttttctttataaattacccagtctcaggtagttctttatagcaatgtgagaatggacttatacaccagctctcagaagatgctgaagatcatggctcatagtttgaatagtgaggccttaggaaacaccatgaaagggatagcctggtaacctgacgagtaactgtcaaataaaaacacattatttttaagcattaaggaatagagagaatgagtatagatagtgttgcttcagaagcaaagtgagagggacccaagaggaaggcgaaaatgagagagacagagcaaggtccattgatcaactacttttcctacttggagaatatccttccaaactcttctctgttgaaatcttgaaatttctatgctctttttaagccaggaaagccactcctctctagactgtgtcttcccagccttagagcattctccattaatgcagtgaacaatttcataagtttgagactcagtcactaaaaatcctcagggcctgtttggttaaactgaattggttggttggttgtcatgtgaacatatgacccagctgtgatcttacacaactcccttcacccttagcattttaggttaagaagaatgtcaccagtgagtgaggaatgtggtaaaacatgagaaaaagctcaccccaacctagtagtgagactagcaggaggctgtatggcagaacacaaatctgggagtttactcacagtgttacagattcattattcatcccttgaaaagcatttcctggtatggtggttatgtgtaagttatcacaaatttcccttgaggaaagaaatgagaaatatttactttctaaattttagctgcaaataggaaactgttatgcatagcaatcagcctggtacttacagaatgaaatttgattcagaggagaagaccttcgtaacatctggaaactttctgatgcctgtgttacagatgctcctgtgattagggacaggatagtggtgtgggcagagagtgggtaaaagtgattgtcattaagacataaagataaaaagagagtacaaaggcattttgcaaatacaactttcacattaaatttaaaaatattgagtttggtgttatcaggactacttttagctgagaaagattgttgcaatttagaagtccctcatgctgtgggagaagatgctttaatgactgctatttagagacctggggactggggccaaatttaaaggtctttttcatttatatttgtagcctgtcttttcttattaaatcaatcacattttcccgtattgcattccactttcttttggtaattagtttattacaagctcttgatagttcgagaaagcatccttaaattttggagcaggttttgattcaaatacttcaagaaaattaatcttttatgataaatccatattgctcattattaaaaatcttcccttatttagctatcttgcaattcaggaagttcttctttgcatctcattgaaatcactaaacattgttttggtgtttgggactattcaaggctcttcttttcttcccaccttttatttagcctctgaagaggagagaggcttaagtgataggtgaaattgaagagtattttattacaagaatggggctccctcagagtctaggcatctggatttccccactggagttttagattcaccagtcatgggatctggacaactaatatgaactgtctgtcaccctcgtgacaatgaaacaaagccaggtttctcttctggctctctctggttctccttcttatccaaaagcccaggtcacactggatctctgctctgtctacagctggggatagcagtgtgggattagactgcaacgtgtacttgggttgggtgaatatcacagttttggatgaaaatactatttaataaagacaatgattcttagataataagaggctgcagtggtcaaatttggttctgggagtttcttatgttttttcaaagtagttgatgctaccgtatgcttatgtgccctatagacaccctggaggtttggaaaaacagaacacctgagtttggaattgttcagtgttagagttaacaaaggagctatgccagttccagtagcagctcttatagaaggccccagagcaagactgatgacgtgaagtaccagagagatgtcccttctctctgttttcctttttttgggcagtgatgggaggtgggctttacattctctgaggagtttatgaaatttaaagaaaaaagagggatgtctgttttagggagacgcaaatttttctttgtgaatagggatgacttgatatgtgaaaagatccatagtgataaattcatagttttcaggaattttggtattgctgacaaggcaatgattgtggcaggctacagtggtactcaatttctaatgctaactgacagacttagttagaattaatgggaagtggaaaataatgatttagtttatatggcacagtgtctaccttaaggcaatacttaaaaagttttcatttaatgaacaaatgaaaaaaatgagataaaggagatcagaaactcttaacccgtgatgagagtcagaccagaattgccactctcactttcacctactctctattcacttcagagattctgatttaccctttttaaagtgttatgacctccatctcccatacccattgtcaaccttgaaaatcactacagaggggtgacgttcttcccaggtgtttaggactgataaaatgttgggaaccacttacatgtatgtaaaagcacccagctcggtggctgacaagaaatgacaattaaatttaaatcagaaggctgaagaggaacatgcaaatagtgccatgtatatggttaaacaaaatctttccaaccttttccttgttttgattttcatcagatgcccatcttcccctccccaattgcttaaaaaggaaaatttctcacaagtattttaatcggggaagatttataaatgctccgggctcaatgtatctcagatttttggtgttctggatcagtctgtaaagagagagggaaaaaaaaagctgctgtttaatagatgtgtattgtttgaaatgtgtgagatcatggtcaccagaagttgctggctgaaaatggcatcagcaaaagcaggcgaccttcatatgcttgggaggacccctagcgactctggggatggaaatggcttggtgagagccagttccctatttccaggaagcactgctctcaagcttctaaagaggtgggtataaggatcagagcagggagtctgtctctgcaccctcccacccctctcccccaccacagacagcaccgacatccagggctcctggccaagcagattctgccccactgtggaccctgtacactgagggtgatgagagactcctctcaggagagatgagcaaattacctactctcccttgtaagcaaactcgtcctcttcatattggccggcaatcacatgagcagttataccgaggggcaccagtctgtggaatggcacagggcaaaagccagaggcttgaatttgggggattttatactcatgctgaagataatttgctgtgtcatgatgtccagcctcctaacttccctgagctagtgtctcttctgtaaaatttgtataataatattacatagtcttcctgcctcacaggttagtaggttttaagtaatagaacaggtagagataatatgaggcagggtttggcaaagtataaaagtacagccatacaccactgtgatgttattgccctccccgcccaactccctcattcccctaattactgtgactctacaaaaagtagtcaccattgctaagtcctgtctactttgtattaaataaaaggccagtaaatgcctttgggtttcttaatccaggtgacagccacctgaggaaataataattaccttgttctatagagagaatgtagtatattggttaggagcatgggctctggagtcaacttggtttttcattctgattttactaatcgtatgaccttagatatatcactttaagttctctgtgtcttggtttccttatagtgttgtttttgaggaataaatatatgtgtctggttcacagtaaggcctcaaccagtgttaacaatagttataatagttgctgaaattaggaagttgaatgatttgtcttcggtcacacagctgagaagtagcagaacttggatgtgacccagtttttctgaccctcagtttagtgcttgttccaccacactacagttacccaccacttgtgcctgtttccatcttctcagcccttttgattcttcagatgtgagtgatattttgttgtaattatttctacaacaactgagtcaaacaatcataggccatatagagccttatgtgggtgggatggaagggacttttatctctaaaggtcttttgggctgggtgtggtggcgtgcatctgtagtcccatctacttggcaaggaggtgggaggatcacttgagcccaggaatttgaggtcggtctgggcaacacagtgagaccctgtataaaaaaaaaaagattaaaagaaatttaataaaagaattttggggcctgaccttagcccagtcattcattcatttaacaaacatttattgggcacctacatgtggcaagcatcgttctatgtgctgggaatacagctgtgaacaaagcaaaaaaagccttcatggagctagcatgctagtcttaggaccttctttgggaatccataaactttccctgagagtgctttatgtttctttctgttgatgaatgttgctttgcatcacgggaagctttatttatcattagctgccctggtggttctcaatataagctgtgttttagcattacctgggaagtctgttaaaactgcagctttccaggtctgggataggactgtcgtctgtaattgtaatgagcccaatgtgtgattctgcttctcagctaagtccagactatgtcttttgcacttactcattattttggatttctctgtaattggtgagtagtctcacttccctggctacactgtcatctcatggtggacatttatattttatctcttctgtattccaacagcatttggccctgtattggacacatggtagttgctcacgtacttaccaattaattattctcttcaggtaattattcattgggtcatttatagggggaccctgtggtatagtggaaaatctggagctttgaagaaagacagtctgggattgaaccccagtcctgccatggtctaaagcaagcttgtccaacccacagtctgcatgccacatgtggcccaggatggctttgaatgcgacccaatagaagtttgtaaactttcttaaaacattatgagtttttttttttttttaaactcatcagctattgttagtgtaagtgtattttatgtgtgacccaagacaattctttttccagtgtggcctagggaagccaaaagattggatacccctggtctgaagtgtcacatcggtcaagtttctgtgcctttccaagcctccattccttcccctggacgaaagggataattacccccactctgcatggtagctgtgaggattaaatgacacaacatagaagaaatgccaagcacagagctcaaaaaatgtttgatgctaatacttttccccttccctaacttttgaaactccaaagtaggtaaagtttgagtgctcttctggaaactcaggtttgcgcctgagtaaaagcagcagtagggggcctggtgtagaagtcacatgcattgatttctaatttcagctctggcactaacttgcggtgtgatgtcaggcaaataggttaacctcttcaggccacagattcatcacttgaaaactgaattgaaccagtcttttcctatcctttttgtgattttttggggaaatgatactttggcaagggttgtttctaagagttaattccaaaacatcacaataacaacaacaaaacccaacaaacccaacacacacatgcctatcacacagcttttacactgtaggtattcaagaaacattcactgaatgagtgaatgtgccaaaacagcccccaatgaaccaatttatgatctctaagctcttttccaaattttcccactatcccaagtactccataccctccataggcaagagctacttggcaggagttcataatgtcaattttaatttctatctttgtgttgtgatgtttcagagtttatacagctcccagggagaagcagttgtcaccatagcaacctacaggccactgcagtgagaaaaattagtgcctgcccagacctagtaattgctgtagtcttttccttttggattcctagcagtggatgcttgaatacaaataccaagtgggctccagccagtgagggtaatagtgtacagcagtaaactgtctgttagctgatgcttacatttcagacaaattgaggaggttgtcaaaggcattagcttctatcctttccagggaatcaatctgagagatttcactagggaagagaggagggggaaaaagagaaagaaacatgaaagaaatgaccgtgtctgcatgattatgagctatgtgtgtgacccaacaactggggacaccactgtgtccccctgaaaagaacaaagatgtgcaagttgtccccaaatcatacagtgctaacatctccctttaggagcactgatgggcacctacaacccaagtgcagttgaaatgcaagttttagtagcccctgtttatgtgacaagtttttctcttatttatctctgactcagagccacagattgttagaattgcataggccctttgagaaaatctagtcagattcccttgttttacagctctggaaattaaggccctgagaggagaggcaaatagtatttgtattaaggttcaagactaggatatggatctctgggtcccaattctgtcactctagtgaggctttaatatggattgaattgtttcataactcttaacccttagtttcccaaaatctcgtgctgaggccgttgcaaggtggtcaactcctgcacatggtatccatcctgaattacaattacctacttccttgactgtttttctcacttgtgagcaaactgaggacaaagagtatattctattcacttctgaatccttggtggcttcatgttgcttggcacagcgttaagagtacaaaatgaatgaataagtgaatgcagtagtgaataattgaattttttgaaaacaatacaaaaataaagaaaccagttttgtcatatatgattcgcaagcatgtaagtcatgccaatgttaccctaaaatcccaacatacgctaccatttcctgccagttgaaaaaaaagtctcaaattcacaaactgtacatttgcttatttctaaggttaaggctcactgaaggcttcagactgatgagagcattagcccacagaaaggcagagcctaaggtagctaatgtcttttcttaacaacacaggaatggattattcttggctgattcatcttattcctacctattggtttgcttatttaactgtagctccttttctcagtaggaggtcttaatgcattaaaggttatcaaaactcaacattccaacttgagagcagaagagtgtgggttaagctcaagtaaaccgacaagtccgtaacctgcagggaatttcctataatatgcagtaattcttgaggaattattttaaatattctaattgcttactaataccctaaagggcaatagaggttcccaaaggagctaagatcaatgctgtagcatcttctttagagatgcaaatctgcttccaaagtccagtggattgttaagattggagatgcactgtgagaactcaatggccatgaggtcctttgactcaggctaatattaagaaagatgctggaatactgggcccttgagaacattctctctccaagtatgggaactttggtcctagaagctgaaacccagaaacaaatgatcgaagttatgtctgacaaacatgagatcatactgcattatccaggtgctttacacttttgataaatgcctttcatcaatatagttataaatactgtgtttttgtcatatacttatattttagatataaagattatcttctgatgcacaataaatttccaacacattttttttcctatgtgggtgttatctaaaaatgtgacacaagggaatagctgctctagcagaaggagaatttttatgattggaatctatctttttttctccttaaaaggtatatcatcacttataaaatgcattcagtcatttgaagcaaggttaattatctgtattttaatgactcttaaaaatcataccttttcttcaaaggtctctagttattatttgtattacaaagataaaaatatgtgagtatcctaaacacaatttctttcctagaaaaattatcccctttcaaatgtgttttctcttagaaaaaattcattattccaattacgaatgtcttttgatatgcagtaacttacttacatttttatgacctcattaagtcctctgaaagcttgagatgggatcactttgacagggaggtaggcaagtgatctagaaaagaaaaaaggaaatccaagagtttaagatttatgatagggtgccttttaagttcatgaataaaatgggtatgtgtatgtgtgtgagagacagagacttcagagttcccaagaactggattcaggctgaggattctaacttaaatcaatgaagagatgtgccatgacttattcttggtctttatcaaagagtgtataattttgcggttaagactgtgaacgttgagattaggcatacctggacgcaaatcttcgctgtcccactacttggctatgtgattctaagcatgttatttaagccctccagctcagtttctttgtctgtaaaattgcaataataattcctacttcacagggtcattgtgataattaatcaggataatccatgtaaagaacagggcttggcaccaagtatatagttaaatagttgtagagtgatcctatagacttgattgggaagatggacaaaaactatgttgagtagagtggagacattaatgatgaaaatacaactggaaatcatgcaggcaggaaaacagaagattcattaagaacatgctcccatcttgatctctactgtctttcccaggtagcctatttcaatattattccaaagagacaactttgatcctatggttaactcacatgggcatctcatgtcatttgcggggaatgtctatgagatcatttccttcaggcattcacttatacccacaggaaaaatctaaatattcttgaaattgaaataaaatctatgctgtacttaagatttgagaaaagagtgacactcagaaatgcaaaaccagtataggatgatgtgtgaatgctaaaggaactggaggttaagataactcaggagaaagcaactgcaaggcagggacgaacatgcagccaacatttattgagtatctacaatggtttaatgttttggcccaaggactggcagagaggaagggagtgggcaaggatatttcaggtgggaagtgagtatgtgagtatcaggaatatgagaacaaaggtgaaagatgctgtcttgtttttaacatgtctatgcagcagagactgctttaagcttctaggaaagaacacctccatgatgggcagatgaaagtaagatttcttacagtcccagaagggacttgctacagttgtaagctactatgtgagttatacacacccatttgtgaccttcttttactcactcaacaatggtgtgaggtgggaatttctcttacatagcagaagaaattgggtcacaaagagactaagtaacctgaacaaggttacaacgaggcagaatgactccagacatcctttccctgtgcaatactggccaaagcatgtcactcttaatcccatgtcttggtgagcaaggtggagggacagacattgcaaccttgcttctcctgagaggaagcatgtcacattcgctctatttcttctgcaaagcggtttaccagccgttcctccctaggtgctaatagggaggaaatttcatttcagaaaaatattttcactcaataatctcttagaaatgatataacctagagaaagtaatccaactttggtctctgattctattcccgaaggcattcccaagaaggacatcgtttaacacctaaactcatttaacaaaggatccgagaagaacagggacagtgtgggaagaaatcttcttgtgatggcatatttgcttcctatatttcttctggaatcatgttcgcttggcttcctgattaaaaacacagttttattgctctctgcactgccaaaccaataaatttacagaagagaaagctgtattccactgtaccccttgcagcatcaataaaactgacagccaaattctgattccagaatctttattgctggggataatgcagtgcagaacatattttggagagtgtttacataaaagcttcagcagaacacttcagagctgtttattcatgcaaatggagcccagaagctgaagtctctcagcaggcagcctcctcctccaaatgggagcatggtgtgactcccagaggagcagtttggttcagatttgatcagggaggttgcctgagcttttgattgatgtagggaggagggatgaggagcaaaggtcggacagaagtgcaagaagctgtagatcatgcaatggcagtctccagtggctacagaagcagccctggtgcaagctgaaattttgcagcgttgatgttgatgctgcagagcaggaaaggcagcagtggggagagtgaaactagagcctcccctataaaagagacaccaagtgaacagcaggtgactttgtggatatggctgggtcaagaaagagtcctgggggccagggaatggggagagaggtggggttaggcaggtgcactgtgcttttcacaacagatgtgttcccatgaggcaacacagagaatgtggtcctgtgaatcgaaaaccattttccctacagacttatatgttttttttttcagaaatgtcacatcttcatttctgattcgtctttgatgggtagcagttcctaagcattcaagtatctgtctccagaatttattaataaagtttatgatttgttgataactgtttgaatgtactccctttgaaggtgtcccactctctattggatgcatctatgattctttccatgatgccagaaacttttagcaatgtgaacaatgatcttaataaccctgcaattccactcctgtatacattgagaaaaattctcaaattgatacttaaaggaatcttgtacaaacgttttcttcacagcattgtggcatcaggggcttggaggcaacctgggtgtccattactaggtgagggagtatgtaaaatttggaccgtacacacctaactgaataggagagcctgtagaagtgagagtctaaaggcacacagagtagcatgggtggatcttcaaatcatggaactgagagaaacaagaaattacggagatataatatactgtttgcagaattaaaatatatgtaaacgaaacactagacattaacctcctcctgcacatgaacatacactaggattgttatctaaggtgagttgagaggaacagaagtgggagaaggagataaaataaataactaaaaacagagagggactttgaatggactagtgataatgttacttgaatgaagaaatatgaccaacttaaccctctgtactagagagacaaatggaaaataaaaaaggtttattttgatgtattggcagcctgcttgcttacctttcttcctcctccttcctcctctctcccttcttccctccttcctttcctttccttcatatttttttggagttaggcatacttgtattccaatagttttgtgaactattgtggaaaggtctagtcggtatcatttgatatagagcagaagccaaggagaactgagggcaaaaatgcctaaggcaaggacagttcagcagctctgctgtccagggtcaaaaaaggaatgaaagctatgcataaagcaaagaaaataaaggaaggacagagccctttctgtctcagcaaaagagggtgatacaccacaactatgcacctcagatgggtggtaaagaattagggttactgggaaaatatgaggttgaacttgcagggtggagattctctcttgaaaggtgagacggctgtggaaaaatatggctgtagaactatgcagctacttaaatttattatattttcacagtcttttttgcagttttgaacttttgtttttaaataaattgatgaggcaacgcaggtggcaccttgcccaagtgcctttgccacagatgttgaaacaaatgcttcaattggattacaaagtctgcgttagcttcatcagcttggaacttccatctactcattaatctcatctgcaggtccccaacccttctagttgtgtgttaaagttgaaatcgaaacagtctgtcctccttagggctggaattaagtcattcatcctagtactgggatcttgtgattggtcatgactctggcgaggcttgtgcatcgtctaaactggacccaataatattaatatttgggggcaggagtgcacctgcagtgccttcccacatgctatgctggtgtttgtttttgtctcgatttcttattctgtagcttgcttggtctccccagaatccatctaggagtagggcttctcttagttcctgccttctctttttctcaatcaccagatcctgatccctgtatctctaccccttagggaacactgctgccctagaacagttcctggttgctgtctggttagggtcaagctagtatctcttactgcttagttctgactttcaaactgggccccttggcacagacggtgaccctgtgttaggactacccagtggagttgggttactttctgtagtggatactgtggtgggctacccaagtcactctttagtactgacgcaccaatttcgccaactgctaggaaagagtgggtggctgaagctctcagctgagttgctctcctagaattatgcttatagactgatgtggtttgggtctgtgtccacccaaatctcgtgtcaaattgtaattcccagtgttggaggtggggcttggttggaggtgattggatcaagggggcagatttcccctttgctgctgctcttatgagagtgagtgagttatcatgagatctggttgtttaaaagtgtgtagcacctctcctctctctcttcctcctgctctggctacatgaaaatgtgcttgcttcccttttgccttctgccatgattgtaagtttcctgaggcctccctagccatgcttcctgtacagcctgcagaactgtgagccaactaaacctcttttctttgtaaattacccagtcttgggtatttctttatagcagtgtgagaatggaccaatacacagaccaagattgctacctcacccaggattatgtcttctcttttgggcagccctcatccagtgactggacaatgtatagaataaaggcccagcccccttgcctccgggtgggactactcagaaggaccatcctatctttagaccttcttcctatcaattcttacctgggccctgacttgatccccttcccagccaaatccaattgccaagcactcagtgcagctgtgtcagagtccagtgacaggaaaatttacagcatccagataaatctaattaccttaaagaagataacgccaccttatcatgtcctccctggtggtttctaatgtctcctgggtacccaggattggggcttgggcccctcttcttttttcttttgagtttaatgacacagatggccttggaaggagccaatttgtccagtttaatttttgttaactaatcctcaaagtaatgttacctggagagcttcagtcaggtgggctctagtgtccccctttaagaaaatagaagatttgttttgtatgttatatatattaaaaattttaaaaaaatctggaaatccttgcttataaaaacctatcaattgggagacatatgcactatcaaatatttctttgttctatagatggatttactgcagggttgctttaaatagcaaactccctgggtgaatggaaaatagagttcaattgacacactctctctttttaaggacaggtattgcataaagcaaattataactgtaggtttctcacctccccttggtttttcagagcttgaatacaagatgtttcccagggcagggaagccttctgatgccctcaggctgaggaggtgcagagggagagaagagccagggaagaaatgcagcaccaatctggagtctccaaagactgtataggctctttggtcacttgccagagcttttacttttccttctgcccaacacatggcagaagtgaagtgtttttattcactaccttctaattgttgttaaaaatgccaactatattattgatttaagaaagctacaaacatccattcattttccacagataatgagtttattgctagagctatatcctgaattctaaaacactacaaaatcagatgaagggaaaaaagagagaaatcagagagttaaagcttttttgcctaatgaacttgttgaaatgggaagaggtttatttaattatttaaattcaaaagaatttggtgtttttgtatttattaagatcttgttctacacttaacagtgtcttaagaagttctgtgttcttttcaaagctgctcacaatgataataaacttgctttcatcttagaataaaataaaaatagctttcctcttttgaaatgattttaaatctttgagctgtcaaaggcatcggactatttggtggcttcattacagggaatgtcttcacttattggcctattgtcttcagcatttacctagagggagctgaggcttcagtgttaactgaaatatgaagtcagtatagatgaacatccaatatgttacgctttacaccagaaaactttggaacagtctttaaaaatacatccaggtggttttgattattgttgattgctccctgcagttactgtactaggctcaaggagtcagagtgaaagggttgcttacaagtcatttggtccaacccctcactttacagagaaagaatcttaggaaaagagaaatgacttttttgaaaccacatggcaattcagaggcagatctggactaaagcattggtttcttccttcctggcttggtgctgttgtcctccaacaatcaagtcacatcagtactgttcatttggatgtttgtcgatacactctactacatgatcctctgctttttgtgtgtgaaaacttagcctcctgaaaagagccatcagcttcttgaggacatagctcagtttcaaaatgcagctcaaatccctgcttctccatgaagctttggagcctaccagaatgttttttctcttcctctatcctcctctacacttaattactacactattttttttcccttcagtattatttgagaatttaccagatgccatgcgtgaacatttcctctgttctcccatcgaacacccagtctctggtagattctgctttccacattgtctcttgcttccagcccctttactccttacacactgctactcttggccattcttttctccacctggactattctagagtcccctaattggtttcctgtcactccatcgttgctttcccctgaccaatctagattactcttcctgacaactcctgctatgtcattctcatgtcaagcagcttctttgccaccccctcagccaacctatctacaaatgtctcagcctggcattcaaggctcaatctttattcaccagttgtatcacccactcttgccctcatgtaaccaatacactagacttgcaccgtctcatatggcagccattagccatatgtggccactgggcagttgaaatataggccagtctgaattgagatgagctgtaagtataaaatgcataccaggttttgaagacttggtaagaaaaaagaatgtaaaatatctcagtaatttttgtattgataacatattgaaatgagaatattttatacatactagactaaattaaatgttttattcaagttaatttcacattttgaaaactttttaaatgtgggcactagaaaattgaaaattactcgtgtgactcacattatgtttctactgaacagcacctccctaggcaaatcaaactatttgtacttcctgaacttgactcacactttcctgatgtcattcatggttcctactgtttggcacatctcccttctctgctggtcaaattctaccctggattaaaggtccatctcagaatgcaaatcaaaaccacaatgagataccatctcataccagttagaatggcgatcattaaaaagtcaggaaacaacagatgctggagaggatgtggagaaataggaacacttttacactgttggtgggactgtgaactagttcaaccattgtggaagtcagtgtggcgattcctcagggatctagaactagaaataccatttgagccagccatcccattactgggtatatacccaaaggattataaaacatgctgctataaagacacatgcacacgtgtatttattgcggcactattcacaatagcaaagacttggaaccaagccaaatgtccaacaatgatagactggattaagaaaatgtggcacatatacaccatggaatactatgcagccataaaaaatgatgagttcatgtcctttgtagggacatggataaagctggaaagcatcattctcagcaaactatcacaaggacaaaaaaccaaacactgcatgttctcgctcataggtgggaattgaacaatgagaacacatggacacaggaaggggaacatcacacactggggcctgttgtggggtggggggagtggggagggatagcattaggagatatacctaatgttaaatgacgagttaatgggcacagcacaccaacatggcacatgtatacatatgtaacaaacctgcatgttgtgtacatgtaccctaaaacttaaagtataattaaaaaaaaaggtccgacaatttgagaaagatggccgaataggaacagctccagtctacagctcccagcgtgagcaacgcagaagatgggtgatttctgcatttccatctgaggtaccaggttcatctcactagggagtgccagacagtgggcgcaggtcagtgggtgcgtgcaccatgcgcgagctgaagcagggcgaggcatcacctcactcgggaagcgcgaggggtcagggagttccctttcctagtcaaagaaaggggtgacagatggcacctggaaaatcgggtcactcccacccgaatactgctcttttccaatgggcttaaaaaacggtgcacgaggagattatatcccgcacctggctcggagggtcttacgcccatggagtctcacttgttgctagcacagcagtctgagatcaaactgcaaggtggcagcgaggctgggggaggggcgcctgccattgcccaggcttgcttaggtaaacaaagcagccaggaagctcgaactgggtggagcccaccacagctcaagaaggcctgcctgcctctgtaggctccacctctgggggcagggcacagacaaacaaaaagacagcagtaacctctgcagacttaaatgtccctgtctgacagctttgaagagagcagtggttctcacagcacgcagctggagatctgagaacaggcagactgcctcctcaagtgggtccctgacccctgacccctgagcagcctaactgggaggcaccccccagtaggggcagactgacacctcacatggccgggtactccaacagacctgcagctgagggtcctgtctgttagaaggaaaactaacaaacagaaaggacatccacaccaaaaacccatctgtacatcaccatcatcaaagaccaaaagtagataaaaccacaaagatggggaaaaaacagagcagaaaaactggaaactcaaaaaagcagagtgcctctcctcctccaaaggaacgcagtttctcaccagcaacggaacaaagctgacagagaatgactttgacgagctgagagaagaaggcttcagacaatcaaattactccgagctacgggaggacattcaaaccaaaggcaaagaagttgaaaactttgaaaaaaatttagaagaatgtataactagaataaccgatacagagaagtgcttaaaagagctgatggagctgaaaaccaaggctcgagaactacatgaagaatgcagaagcctcaggagctgatgcgatcaactggaagaaagggtatcagcgatggaagatgaaatgaatgaaatgaagtgagaagggaagtttagagaaaaaagaataaaaagaaacgagcaaagcctccaagaaatatgggactatgtgaaaagaccaaatctacgtctgattggtgtacctgaaagtgacggggagaatggaaccaagttggaaaacactctgcaggttattatccaggagaacttccccagtcgagcaaggcaggccaacattcagattcaggaaatacagagaatgccacaaagatactcctcgagaagagcaactccaagacacataattgtcagattcaccaaagttgaaatgaaagaaaaaatgttaaggacagccagagagaaaggtcaggttaccctcaaagggaagcccatcagactaacagcagatctctcggcagaaactctacaagccagaagagagtgggggccaatattccacattcttaaagaaaagaattttcaacccagaatttcatatccagccaaactaagcttcttaagtgaaggagaaataaaatactttacagacaagcaaatgctgagagattttgtcaccaccaggcctgccctaaaagagctcctgaaggaagcgctaaacatggaaaggaacaaccggtaccagccgctgcaaaatcatgccaaaatgtaaagaccatcgagactaggaagaaactgcatcaactgaggagcaaaataaccagctaacatcataatgacaggatcaaattcacacataacaatattaactttaaatgtaaatggactaaatgctccaattaaaagacacagactggcaaattggataaagagtcaagacccatcagtgtgctgtattcaggaaacccatgtcacgtgcagagacacacataggttcaaaataaatggatggaggaagatctaccaagccaatggaaaacaaaaaaaggcaggggttgccatcctagtctctgataaaacagactttaaaccaacaaagatcaaaagagacaaaaaaggccattacataatggtaaagggatcaattcaacaagaagagctaactatcctaaatatatatggacccaatacaggagcacccagattcataaagcaagtcctgagtgacctacaaagagacttagactcccacacattaataatgggagactttaacaccccactgtcaacattagacagatcaatgagacagaaagtcagcaaggatgcccaggaattgaactcagctctgcaccaagcggacctaatagacatctacagaactctccaccccaaatcaacagaatatacatttttttcagcaccacaccacacctattccaaaattgaccacatacttggaagtaaagctctcctcagcaaatgtaaaagaacagaaattataacaaactatctctcagaccgcagtgcaatcaaactagaactcaggattaagaatctcactcaaaaccgctcaactacatggaaactgaacaacctgctcctgaatgactactgggtacataacaaaatgaaggcagaaataaagatgttctttgaaaccaacgagaacaaagacacaacataccagaatctctgggacgcattcaaagcagtgtgtagagggaaatttttagcactaaatgcccacaagagacagcaggaaagatccaaaattgacaccctaacatcacaattaaaagaactagaaaagcaagagcaaacacattcaaaagctagcagaaggcaagaaataactaaaatcagagcagaactgaaggacatagagacacaaaaaacccttcaaaaaattaatgaatccaggagctggttttttgaaaggatcaacaaaattgataaactgctagcaagactaataaagaaaaaaagagagaagaatccaatagatgcaataaaaaatgataaaggggatatcaccaccgatcccacagaaatacaaactaccatcagagaatactacaaacacctctatgcaaataaactagaaaatctagaagaaatggataaattccttgacacatacacttttccaagactaaaccaggaagaagctgaatctctgaatagaccaataacaggatctgaaattgtggcaataatcaatagcttaccaaccaaaaagagtccaggaccagatggattcacagccgaattctaccagaggtacaaggaggaactggtaccattccttctgaaactattccaatcaatagaaaaagagggaatcctccctaactcattttatgaggccagcatcatcctgataccaaagctgggcagagacacaaccaaaagagagaattttagaccaatatccttgatgaacattgatacaaaaatcctcaataaaatgctggcaaaccgaatccagcagcacatcaaaaagcttatccaccatgatcaagtgggcttcatccctgggatgcaaggctggttcaacacatgcaaatcaataaatgtaatccagcatataaacagaaccaaagacaaaaaccacatgattatctcaatagatgcagaaaaggactttgacaaaattcaacaacccttcatgctaaaaactctcaataaattaggtattgatgggacgtatctcaaaataataagagctatctatgacaaacccacagccaatatcatactgaatgggcaaaaactggaagcattccctttgaatactggcacaagacagggatgccctctctcaccactcctattcaacatagtggtggaagttctggccagggcaattaggcaggagaaggaaataaagggtattcaattaggaaaagaggaagtcaaattgtccctgtttgcagacgacgtgattgtatatctagaaaaccccattgtctcaggccaaaatctccttaagctgataagcaacttcagcaaagtctcaggatacaaaatcaacgtacaaaaatcacaagcattcttatacaccaacaacagacaaacagagagccaaatcatgagtgaactcccattcacaattgcttcaaagagaataaaatacctaggaatccaacttacaagggatgtgaaggacctcttcaaggagaactacaaaccactgctcaaggaaataaaagaggatacaaacaaatggaagaacattccatgctcatgggtaggaagaatcaatatcgtgaaaatggccatactgcccaaggtaatttacagattcaatgccatccccatcaagctaccaatgactttcttcacagaattggaaaaaactactttaaagttcatatggaaccaaaaaagagcctgcatcgccaagtcaatcctaagccaaaagaacaaagctggaggcatcacactacctgacttcaaactatactacaaggctacagtaaccaaaacagcatggtactggtaccaaaacagagatatagatcaatggaacagaactgagccctcagaaataacaccgcatatctacaactatctgatctttgacaaacctgacaaaaacaagaaatggggaaaggattccctatttaataaatggtgctgggaaaactggctagccatatgtagaaagctgaaactggatcccttccttacaccttatacaaaaatcaattcaagatggattaaagacttaaacgttagacctaaaaccataaaaaccctagaagaaaacccaggcattaccattcaggacataggcatgggcaaggacttcatgtctaaaacaccaaaagcaatggcaacaaaagccaaaattgacaaatgggatccaattaaactaaagagcttctgcacagcaaaagaaactaccatcagagggaacaggcaacctacaaaatgggagaaaattttcacaacctactcatctgacaaagggctaatatccacaatctacaatgaactcaaacaaatttacaagaaaaaaacaaacaaccccatcaaaaagtgggcgaaggacatgaacagacacttctcaaaagaagacatttatgcagccaaaaaacacatgaaaaagtgctcaccatcactggccatcagagaaatgcaaatcaaaaccacaatgagataccatctcacaccagttagaatggcgatcattaaaaagtcaggaaacgacagatgctggagaggatgtggagaaataggaacacttttacactgttggtgggactgtaaactagttcaaccattgtggaagtcagtgtggcgattcctcagggatctagaattagaaataccatttgacctagccatcccattactgggtatatacccaaaggactataaatcatgccgctataaagacacatgcacacatatgtttattgtggcattattcacaatagcaaagacttggaaccaagccaaatgtccaacaatgatagactggattaagaaaatgtggcatatatacaacatggaataccatacagccataaaaaataatgagttcacgtcctttgtagggacatggatgaaattggaaatcatcattctcagtaaactatcgcaagaacaaaaaaccaaacaccgcatattctcactcataggtgggaattgaacagtgagaacacatggacacaggaaggggaacatcacactctggggactgttgtggggtggggggaggggggagggatagcgttgggagatatacctaatgctagatgacgagttagtgggtgcagcgcaccagcatggcacatgtatacatatgtaactaacctgcatgttgtgcacatgtaccctaaaacttaaagtataataataataaataaataaaaaattaaaaattaaaagaaaaaaaaaaggtccgtctcaggtactacatactctatggaaagggttttcatcaccagtggcacttgctttctctcttgaagtcccatagtgtggtagttaagagcgcacactctggagccagcctgggttcaaatcaaaatttcatttcacatctataaagtgtgtataatctaaaaaatctatgtttacataatactaatatagcatgcagtacaatatgaagactcaataagtatttttattaataattcacagctgcttactgtgaaagatttaggccacctaggctacattttatgacatctctatttccttggcagggggtaggggtggataggttccatacttaggaattgattcttctgtttgtcatgggtcagtcacttttaagtctatagcatgcctatggcttattcctaaatcttgactttcctctgattaggacaactgagagggagaataaatactctcaattggtatctttcttttgggctcagatatctcttttaggactcttctgatagcctttttaagaagtgataaagaacaaccttcaattaaatatttcaactctagagagccactctgcagattttgcatttgagcattgattgttttaatgatcagtcagttgaaactttcccattggaaaatgcaatttgagtgactctcctctaagacagccattccgcagcacccaagatggtgtgaggagtttatgtcttatcatgtgaaccaagatgttaagaagattcctggataatggatttttcatgtcatttgtgcaacaagtaaattaaaaatataaagcctcagaggaaaatggtaagtatatctaagcccttactcaaaacccatttaacattttctaaagaaacaaagcaaaataacccaatctctatctccttaaactagaatttgtctagcaataatataacatgacaagaataactctggtaaataaaactacatgttgggttctccctggggaatgtctgcctcacctgtaatgatttcttgaaaatatttttcagaagctgagaatattatgttgccaaggcagtgacattgcagatatgcttcaggaagctctttcattaaaagcgcctctttcccaacacttaaaaactttttttaaagtaactgtgtaaaagttggttgcaactgatatactacatacttttatttattattattttttcttttacttttttttttctttttatgaggcagtctcgctctgttgcagaggctggagggcagtggtgcgatctcggttcactgcaacctctgtctcctggttcaagggattctcctgcctcagcctcccaagtagctgggactacaggcaagcaccaccatgcctggctaattttttggtattttttagtagagacaaggtttcaccatgttggccaggctggtctcaaactcctgacctcaagtgatccacctacctcagcctccagaagtgctgggattacaggcgtgagccactgtgcctgagaatgggtttgaagtgcctgaaattactggcctgtgtgccttcactttttactaacttatcccctctggtagcaaccattatgaggttgcctgtatcaaaaatgcgcccttctctggaagtacctcagaactcgccacattatggtggaagaatcttgctgactgagcagatcgattctatgctgggtgtgcttgggtcagtcagattctctttttgggaattggaaatttataaaagagggacagagaggagtcgtttttggaaccgactccttgtaaatctaggggaaagctccctgagcagcttttgctaagatgccagatattctccttacatcttcacagcatacttctaccttcttatccttctattaagttaatctcttatgattaaaatggtcagaattgatttctggtgcttgcaaatgaaaaaagacttacccagagccccacccaaggtttccaggttgaagtaatccactattctatggacagtccataacacagggcatatgttgttgctcagtgagaggaccgaaggctttgaatagcgattcctcagtggtctctctaagctggccagaactgagcttaggggataaccatgctagtccagctgcctctatagagaatgagccttaaaacactcagaggaagttcaaatgacacttcctctgaggcctctttgttactctggctagaagagatgattccctgctctgaactcctatcttgtttataacctttatctagcatttatcacattctccatttccctgtagtcatttgagaagaggatacctcttctacatctggaagactataagctcctggagggcagagatggtatctttggatcctgcatgctatcttgtacatttcagtacgtatttcctgagtggccaacaagtctcacctgaaggctttctgtgtgtccagtctgaggcttagggatggggaaaggggggaggaaaagatccagaatgggcttggatgctttagctgggcagacaggaccaaaaacagccaataatcaggtattaggaggtatgtgtcaggggcagctaagtttgggctgaaaaggccagaaattagactcaaggcaataatgagctctgctgttttgggattctaacttattcactttccaggttgagaaggcctagtgggtcattttctctaattaacacctcccaggaacaaaactgttccatcaggcttgccccttggatgatagatatttactgttcaacctcacatatgggctgtgggttttttagtcttctctgcatcatcagattattacaataataccttgtagctatgtgaaaactttatttccatacttttggctttttttggtctcatttatcttcactatatctggtcccactcagggacaggaatcatcatgtcccttttacagacagcaaagagatttcatcattgagccaatacctacagtgcaaattagaaaaaggggacctggtgctagaacccagttctgcccagtctgtcctgttgatcagtttgaataatttggggactgcattggaccctaccctgtcacaccacagcatcctcacctctgtgggctcagaaatgctgtctgctgctactcatgaggtgcaattaggaacccaggagtagcgtaacctcattacatcagagtcaaggacaagtgtaacagcagcaaggaattaaatcttcattctgaaagttgagttttgtttataaattgtacttttctgaatttggctgaggtggcattaaggaactgaggttcagggccacatagagagcagctgtgagtggtttgccaggaggtggtgtcatcttccagtgaggcagaagctgggagtacatgaggaccctgtggagaagcagctagaagctgcccaccaagtcagaaagcccacctgcctggtgggagggattattttaattcctttcataagaaaaaaagctgggtgggaatttgctaaaatctgcattaaatatgatttttctgcagccaaggggagctgctggaacaaagcacatatgctcccatggagccagccctctcagctgtggaagtgagcagcagggcttctcttcaccactgtgactcaactggctttaaaacctcaagtataagatcagaattacacatggccaagacaacatttggtgtagccactctgggagattatattttggaaagagacctttgttgcctcatttcaagacatgaaaagaagccaactgaggggcttaggaagaagatagaggtgggcaaaagagcagaactggagccctgaattaatctgatttactgcttttgaaattaaaaaaaaaaaaaaaaaagaagaaaaacccaaggaattactactctccaaggagggagctgggtccaatgccaaagagatctgtgtgtgaaccttttggctctacacttgcgttgagattttgggaactctgttgcttgttttttagtgtcttgctaggggctatcattcactttccccagcagagtgatttttaaacaaataaaatctagtccttcctgagcttctcccgaggagtctgtgtatcagcaaggtcaggtttaagagttgccttgaggcatggctgggagagctgagtcagaactaaggttccagattaacctcaaccttgggcctttgtttctttaggggtggttgtggtggtggtgagggtaggctagggaggtgggacataaactttcttaattctgagattttttggctggcccagatttaggaaagctgagggtagggccaagctgtcttgcttgcaagagtgtggtagtcttctttctgtctgtggattctttcctgggggctgttaccttgtgtgctacaccaggaggccatctgtctcaattcaggctgccttggtggtttttgtttgctttcagtttgtttttattaaggaatcttgggctggggattgattcttccctactgagtctaaaaaaataaaatgaaaacaatctagatggaatatactgatataggtaagcttcaggtcttgcttccctgaagttgatatgtctgctatttcccattcaaatgatagactggaagcctacaaattctgttataggacctggatgctgacataacacaaataactcccttcagaacctatagcattttctcacttccccattttctaaaacagagatttaaaaaatgacatttagctgtaatacatgctagctgatgtagacatgcttcttttctgcatgagttaattgttcctattcagctatctcagtttaatcatgaaactcagtaacactttaattatactacatgtgaaattctgggaaccctgagttgaatgacatttcttcaggtggttcttactctagcacaatgattcaaaaccaaggggtggggaggaatttccccctgccccctccgggggtcatttgccaaatgtctagagatacttttggttgtcacaatttgggaaggcagcgctcctggccagggatgctggaaaacattctacaaggttcaaaacagctcccataacaaagaattatctggccccaattgtcaattgtcaatattgctaagatttagaaacctgctctggcagaagaggcacatgttgaacaaatggctgcattatggtgagatatgtacaaaaatatatgtaagcccaggatattgaagtgagtatgtggatggggaagatggaggtggagtgggggtggggcagtgggcatcagggaaggcttcatggggaagtgactcctaatcatggtttttacttaatgcctttgcaaccaatcatcaaataatggctttaattgaaagcttattagtcaataactacatattgggatttttttttctttttgcacaacgtctgagtaatcaaagctctctaataactttatgtcttctcttaagaaatatttcccccccagcctgggaagaatttattcaaccttcttccttgcttctcagcaacgaatctctagttgattttaacctgtggttcttccaccaggacccctctttccttcttcacagttcagcttcttaacacttggcccatgaagccttcccttggagacttcagttcatagtgattaattcattctgtgaattccttagagccttgttgtctttctctctacacctataccagtctcttgggggtgtgtttccacttacattgtgggcttctcaaagacactacggcactgaacactgttttggaccctgatttacactgcaagtgagaggaagaggaagacactcaagaaaggtgtcaggaaagagtaatgctggatcgatatgaacattgcattaggttggtgcaaaagtaatcatggtttttgccattgaaagtaatggcaattacttttgtaccaagccaatatcttgccaaggcctctggattatgtcttcaacaaaatctaaaagtttaatttctgttcagtaggtacaacatgcaaaaaataaattgccataattattattagcattttcttactaacagatttttcaaaagctgtttccatatcaagcagatcaacctttctgttgtcatagagacaaagatctttatatagccatgggcaaggtgagatttttttctcctctttccagttgcctagaactaataagaaaggaaaggaaattttttaaatcagttttttctttcattttttccccaattaaagtgagtgaaatgtgggaggttatattttgtatcacattttagattttaaatacctatgtttttcataaaatatgaaaggggaggaaaaatttgaacgatgccattttcaaaatttgtaagcagcaggcttgtcagtgataagcagctataatccatgtaccttgttttttttcttcttcttaaaccaaatagtgaactttggatggaggtcttagaaggtaaggttactaggaccccaaatgactaaagcataaattaacatctattgagggactaatgctgaatcctaaggtgctctgcagtacttgcctcctccaaccctgagaacttggagtgctccccttctctctgcagaggcaaagtctatgataatgtagtgcaagaccacatcctctcctcctggaagacttacctcataatttaagctttctttttttttttttttatgaactgataacttgccatcatagcagttttctgtctcataattactgtttatcatttcatgcattcatcatcaagaaaagaggatttcagtatgaacctgtccacttttcctgtcctttgtcttaatattgagttattcctttacccataggtcttcttacctcaggactcaaaacttcttattctttctaaggttaatctttcccccatgttgttagactgatgctctcctcctacccccattgagatctgacaattaacattcctccctcattccctgtatcttcagtctgtcctccatggattccttcctgcagtcctctttgaggaaaaaaaaaacttccctcaattctgcttattttccgtctgcctctgggtttaggattttgattttatgcctttttgcaataaataggtgttatgccggattttggcgggggggggggggggtggggaagggaagtgtatggcacaaggacttttaaaatatactttttcctctctaagatgatacctccctggagagctgtgccttggttctcaaactttagtatgcatcagaatcacctgaggagcttgttaatctgtagcctgctggaccccacccctggagtttctgattcagtaggttggggctgaggcctgagaatatgcagtctaacatttcccaggtgatgttcatactgctgagctaagaccatactttgagaaatattgccttgaagtaacaaccctccctttgcttaacatgcacctctcttgtcatatggatgttggtgtcactatgttgtgccaaaagttaccctgttttggcctgcataggctcaacctccacagagtgacaagggcatctcttgaaagatgagggcatctctcaaccatctggtgctcaggaaatgaaaccttgtgagggtcaccacgcttggctaaggaggctaaatgactggcagaggatgttcctggtggtggatgctcagggtctctacccccaaacctagtcagccctatcagatatttttgaggggttctaggattcttgaaaccctgctgaaaggcagcaggagaaagtgggatttttaaaaaaaatttacttcagccttttccagggaagggggtcccctcctgagaacagcacgtggcagcaggagcccttgagagatcttactgaaaagctgaattgaaaaggaactgggacttggcccacccattcatgcccccagtgggagttctttgctcagtactaattttggagaaactgagtgtgtgtgtgtgtgtgtgtgtgttttattaagaaagcagtagtttttcttacaaagatgagcaaatttaaaaagataattaatagataaaatcctgaattgctattcaatagctgtgagaccttgagcaagttattccttctccttggatctcagtttcttctaatctgtatgataagtagcaggcaagtgagaaagtctgttagtagtacagtcattcttaagagcaacatggcatgcttgtcagggacggaccagggctggaacttggaaggcctgttgcatggatttgtggattgattgaaacaaattctatcagcatggtccattccttcagggaatggacctgacaagataattaatggaaactaattaatataaacccctcaaccctttaactgtatctctcaaccacaattattcccagaaggcctttaacttttccacatgaagaagcctggcctggcagggagggtgagtctcctctatgaaacagcccgtgacagactgttgggggctcaaaggaaatggcagagggggtggtctccttccttccccagcacagaattccatcatctctaattgttaggacatgatcaagacctctaccagccttttagatactcttgtcttttgtctttttttccctttcttttctttccttttctcttttcacagctgtattgagatgtaaatcctacactatagaatttaaagtggacaatgcaattgtttttaatatgttcacacgcaactgtctctacaatctaattttacaaaaatttcaccacccccccgccccaagcccatacccactgattagtagtcacctactgtccctcccatccgcttccccagccctggtaactactaatctactttcagtttatctggacatttcatgtaaatagtattataaaatatgtggtacttttttttctaaataggagaaaggagacctgatgacaccctgatagtctagtactaaaggctccccttctcctctttaccccattactccagaaacaacgccctcccccaggttgctgatgtatacaatccctcaatcaggcctgtgagtgtggaggtggtgcgcgggtgccagcggcagggcacagggcctttggtccattagaccatgagactgaagttcaagcacatctgggcacggtggagcagcggcttgtgtgctcactaagatgcccgtgtgactgccagcagtcagttgacagattaggtcacccttggccatagggcctgagcactccattcctagaggaccacagggtgccagagctcacattcaccttccctgacgtggctggcccaaggctcaaaggcctgtaagacttctctggcagagacccctgccagaggagttgaggagcgtcacacccatattcccttcaagcagcggcagagagcaggccttcccctgaggttcctgaatagttctactcccccggccacagccccaaccaggggtaaagaatggggctggggctctcagaggcatggggtggtaaaaacaaccaccaagttttgggttctcatcaccctaaaacgtgggggaaatttgatagggcaaagcgtttttctccaagcttccagggaaagggggccaaaggagtagggagggaaggtggcatagagcgatggagggtcctgcatcaagggcgccgcgacgggagcgctgtgtactcacagtcgagtgagaccggccgtggggccggggcagcgcagggcgccgtcgggcacgcagttgcagggctcagggcagagcgcctcgcgcagcgctcgtggcagcggcggctgcagcagcagcagcagcttcagcagctgcagcgccgagaaccgctgcttcatggccggcgaactgggcttctgcggcttgccagtgtcttggacggcctctgagtgcggcccgcacccctctccccgccccttggctgcccttccacacacccttccctgccggcccgcccctgccctccccctcttaccgcgcaccccgctgagtctgctctgccttgacctgcgacagtgcccagtgacccaataacctccttcctgctactttcccctgtcttgtcccctaccatctgcaaatggccctagctataggaggtaaagagatttaatggcaaatgttttggattagaggtggggagttctgaattgagtgagttgtgacgcttcccggaaccccttttatttcatttgtgaaagggtccgatggatactcgctatacccacatcagaaggcgtaagagtgcctggctcagacatttttcctctcttttatcctcaacccctaatcctttccccttctctttcaccaaatccctccactctacaagtaatctttgcccatcctcccaactaccccagtaatttctcttggtggtaaatgctttcttatttatggtatagctatttggcttggtcctgtatctcttctatagattgggaggtccttgagagcaaaatccaattcagatttatttttgtattccttctggcttctacatggtaagtcctcagtaaagatttgttgaatgaatgaatgaaactgcctaatactggtagcagctgccccatagaaggcccaggataggctagaccttgtaacaggtgctctgcctcacatcatgtttaagctccacattgaactagcagggtgtttgcgatgagaaaaatgtcccaagaggtatgtggcttccctgaagtcacacggttttaaagtagtgaaacctggaactcatgtctatcacctaccacctctcaccaatgcaaaaagctgctatgatctacataccaaagaacttaggagacaaaattttacggtaatcatggggatccataatatcccctctttgatttgatcatttcttccttccaaggattctgtttggattctggaaatcctagcagttttgctggaagaggtggactttgaaagctgggaaggcatttaaggctttgaagagaggaaatataagaatagatttctttcactctgaagccagttctcaaggatgggctccttcattcaccattctacagtctgttgctcaaggagggtagattattattattttaaaaacttgtttggctttggccacattgtgctagatggcacaaaaacaatgctcatgtctataatattgtcttctctggatcctctcttcaactgcttatagatgactcctcaccctttaatacctctgcatgggctgtccccactattttctcttctttttccattattccattagataaactcccagttgtccttcaagactcagcccaatgtcatttccactttgattcttctctgagtcatcctagttgagtagttgtggccataacacctggttctacagcaggtaatctaacacactgtaattgtgggtttaattttgctttcccctctctattcatctcaatatcaacagagcatgtcatagcttctagctcctagtaggtgttccatatgtgtctgttgaataatagagtgaataagtgaggcccagatttgtagtagatgctcagtaaactatctgagaagagcttgataccctcacttgctttattctcaaccacgctggatctatctggatatgtaaaaagtaattatacatgacgactttgggtgtcatgttctctgttctcttttagttttgtcagattttggtagggaagttggggtaggcactgggatttttaaaagttttcaccatgtatcttgaatggaaggagagaaagaatgaataactcaaggtgcctgaatggcttttctttcaagtctcatgttttatgtgacttttttctttttttaaccctgtagtgtacctgttatatataaaaaaagtttgctcccacccacccctgaatctttgaaaacaatggatattccagaagaatcatttaattctgtactccagtaggaggactaggcaatcagaacactaggattttccttctgtttctgctgtcaatcatgagatttgcccttcagtctcttcatctgtaagaagaagggttgaagttcactatccctaaggctcttctggctctaaagatgcaaggactttctaagcagctcctacagaattgctagtgggaggaattggattgtatatattgacttcttataacttgtcttggattggaaataaaatcctgtttatgaggagttgaggttgttcgtttggaagaaagctaacaactgtaatgagttttcataaaattttactatctagattaatttcagttggatcttaattatcacatcagttcttgcaatgtaactattataataaaatcatattgattcatttgttataatcacaaaagtttgttacaatggaatttacctatcttattcattaatactcattatgagtgagtatttttaaatccaaaggactttgtttcattaactatgcttatagctactttgtcagagaacttcaaaccaacatgacccacaaagattgctgattacattttaatgacaaaataaagttcacagaattcacaaatattttatcctactttagagatagaaaaacatactgacaccgtaactcagaaattgcaattaaaactctccaaagttttagaatggagcttctcatattttagggtgcagaaataccatttgcaaagctttaaatacgaagattcctagaactttccctatgagattctgattccatagatatagagtggggtccaataatctgcattttaacaagctttctcgtgtaattttgatgcatgtagtcctagagcacaatttgaggaatacaaaaatggtaatcctagaattaaatttgcctgaagaaaacaaagctcaagaatctttattaaggactttgagtgaagcctaataattttgatgcatcttaaaagaaaccttgatatgtataagcatagaaatagtatattctgtatacctgtgtttaaatgtctaaaattatttaattggttatattgctgaaatttatttatttatttatggaatgagccatgttgcaaaatcatggaatctattttctttatgccaccctaggtcaaaactcaatagcatctgaagttacattaacacattggagttgaaagacattagcaaagtaatttttaaaaaaatttttactttaagttctgggatacatgtgcagaacgtgcaggtttgttacatggacatacctgggccatggtggtttgctgcacctatcaacccgccatctaggttttaaaccccgcatgcattaggtatttgtcctaatgctctccctccccttgccccccatcccccaacaggccccagtgtgtgatgttcccctccctgtgtccatgtgttttcattgttcaactcccacttatgagtgagaacatgtggtgtttggttttctgttcctgtgttagcttgctgagaatgatggcttccagcttcatccatgtccctgcaaaggacataaactcttttttatggctgcatagtattccatggtgtatatgagccacattttctttatccagtctatcattgatgggcatttgggttggttccaagtctttgctcttgtaaatagtgctgcaataaacatacatgtgcatgtgtctttatagtagaacgattcataatcctttgggtattcccagtaatgggattagcaaagtaatttttaaaaccttaagtagaataggcaaggttttttgattattgaacacataccctgttagtataataactggtatttcttctcacttaaaagcagtggttttacctttcccttggaagaaaaggtgaatgtaggcagaggaagaaaaaattgcttaagaagagaaaaatacagttacatctctgagctgttcacctttttacctggggtaaaaaaactaaacaaaacaaaataaggagaataaaaaagacagtccatgaaagttacactccaaaatttcatgcaaattctttattgcttgtttagaattttcatctccatttcactgtctacataatgtaaaatcagagctgcgatcatctgtgccacctcccacacagccctggggttcttgtgggcctcagcaggagtttgaagctgcaggatgataggaagctgggctggtaattggaatgtgatgattggtctggggcatgagaatcctactctaaggctgatggagagagagagttggagaaggggccttgcctttttggtcatgttgctggaaggatgtgaatgaattaggggctgctgtccttcttgtctcatggaaaaagcctgtttgtgctggcaacaactagaggaaagtagagatgagaaatagatgggggcaagcagtcttgttaatgtcctttgacttcatggaactggtcatgcctgaggccagctctacccttggacttcctaagtaatgagctaacacactcccctcctgcttagtctagttggagttgagtctctctcacttgcaaccaaaattcttcatctctactatcagccttgctgtgaactttatttaacctgccaacttccctcatcccttcccagttaggagagaaatagggcttttctattcttatctctgtcacaggactcattatagtcatagtgaatttttctcctttgcattgacagcctttatcatcgtacttctaggaataaacaagtcaaatgagtgaatgaacaaatgaatgagtgcacaaagaagtagtgtagtagaatcacgttattcctctttgtagagaaactgcattttgttacataatttacctaacatcatttttcttttagggaaggcctcttactgaaaacttggtttagcaattaaacttcaagctaaaatattagacagaggcaacacaaggaaagtgagaaagttttctgaaatgatgatataaatcaacaaagaaacaagatttgattgtttaaaatcagtgtcgaattaattaaagtgtgtgctacagcagctttccccaacctttttggcaccagggactggttttgtggaagacagtttttccacggatggtgtgggtggctggtttcatgttgaaattctttcatctcagatcatcaggcattatgttctcataaggagcatgcaacttagatcccttgcatgtgcagttcatgatgggttcatgctcctatgagaatctaatgccgccgctgatctgacaggaggtagagctcaggcagtaatgcttgtttggccattgctcacctcctgctgtgcagcctgattcctaacaggccaggccctgggggttagggaatccttgtaccacaggatactgtttttctgccaggctaattagcagtatttaggggaaagggaccaaaactcaagaaatttgaggaaaattgggttaaaaaagttaaacaaggttctttactaaagagttttccagaacattttttattttcatttttactttagagttggggtctcactctgtcacccaggctagagtgcagtggcatgatcatacctcattgaagcctcagcctccttagtagctgggaccacacctgactaactttcttagtttttttatttttttgtagagatgagggttttgcttgttgcccttgtgggtcttgaactcctgatctcaagcgaccctcttgccttgacctctgaaagtgttggtattgcaggtgtgagccactgtgactggcctctgagaacttttaacatgcattctggatctccaagagggccacagtatatgcaggagactggtgtttcttttctctttcttttttttttttatactttaagttctggggtacatgtgcagaacgtgcaggtttgttacgcaggtatacacgtgccatggtggtttgctgcacccatcaacccatcatctacattaggtatttctcctaatactatctctccccatgccctccacccccacaaaaggtctgggtgtgtgatgttcccctccctatgtccatgtgttctcattgttcaactcccactaatgagtgagaacatgcagtgtttggttttctgttcttgtgatagtttgctgagaatgatggtttccagcttcgttgatgtccctgcaaaggacatgaactcatccttttttatggctgcctagtattccatggtgtatatgtgtcacattttctttatccagtctatcattgatgggcatttgggttggttctgagtctttgctattgtgaacagtgccacaataaacatatgtgtgcatgtgtctttatagtagcatgatttataatcctttgggtatatacccagtaatggtattgctgggtcaaatgatatttctagttctagaactttgaggaatctccacagtcctccacaatgggtgaactaatttacactcccaccaacaaagtaaaagtgttcctatttctccacaacttctccagcatctgttgtttcttgactttttaatgattgccattctaactggcataagatagtatctcattgtggttttgatttgcatttctctgatgaccagcattttttcatgtttgttggctgcatacatgtcttcttttgagaagtgtctgttcatatcttttgcccactttttgatggggttgtttttttcttgtaaatttgtttacgttctttgtagattctggatattagccctttttcagatggttagattgcaaaaattttctcccattctgtaggttgcctgttcactgtgatgatagtttcttttgctgtgcaaaagctctttagtttaattagattccatttgtcaattttggcttttgttgccgttgcttttagtgttttagtcatgaagtctttgcccatgcctatgtcctggatggtattgcctaggttttcttctagggtttttatgtttttaggtcttacctttaagcctttaatccatcttgagttaatttttgtataaggaagggatccagttttgtaaggaagggatccagtttcagctttccagatagggctagccagttttcccagcaccgtttattaaatagggaatcctttccccattgcttgttttcctcaggtttgtcaaagatcagatggttgtagatgtgtggtgttatttctgaggcctctgttctgttccattggtctatatctctgttttggtaccagtaccatgctgttttggttactgtagccttgtaatatagtttgaagtcaggtagcatgatgcctccagctttgctctttttacttaggattgtcttggctatgcaggctcttttttggttccatataaaatataaagtagtttttccaattctgtgaagaaagtcaatggtagtttgatagaaataacattgaatgtacaaattattttgggcagtatggccattttcacgatattgattcttcctatccataagcatggaatgtttttccatttgtttgtgtcctcttttatttccttgagcagtggtttgtagttctccttgaagaggtccttcacatcccttgtaagttggattcctaggtatttaattctctttgaagaaattgtgagtgggagttcactcatgatttggctctttggttgttattggtgtataggaatgcttgtgatttttgcacagtgattttgtatcctgagactttgctgaagttgcttattagcttaaagggattttgggctgagatgatggggttttctaaatatgcaatgatgtcatctgcaaacagagacaatttgacttcctcttttcctaattgaatactctttatttctttctcttgcctgattgccctggcctgaatttccaatactgtgttgaataggagtggtgagagagggcatccttttcttgtgccggttttcaaagggaatgcttccagtttttgcccattcagtatgatattggctgtgggtttgtcataaatagctcttattattttgagatacattccataaatacctacttattgagagtttttagcatgaaaggcaattttgttgaaggccttttctgcatctattgagataatcatgtggtttttgtcattggttctgtttatgtgatggattacatttattgatttgtatatgttgaaccaggcttacatcccagggatgaaggtgacttgatcatgatgcacaagctttttgatgtgccgctggatttggcttaccagtattttattgaggatttttgcattgatgttcttcagggatattggcctaaaattttatttttttgttgtgtctctgccagattttggtgtcaggatgatgctagccccataaaatgagttagggaggattccctctttttcttttgtttggaatagtttcagaaggaatagtaccatctcgtcttaaaatttggctgtgaatccgtctggtcctgaggtttttttggttgataggctattaattactgcctcaatttcagaacttgttattggtctcttcagggatttggcttcttcctggtctagtcttgggagggtgtatgtgtccaggaatttatccattttttctagattttctagtttatttgcatagaggtgtttatagtattctctgatggtagtttgtatttctgtgggatcggtggtgacatcccttttatcattttttattacatctatttgattcttctctcttttcttctttattagtcttgctagtggtgtatctattttgttgatcttttcaaaaaacaagctgctggattcattgattttttgaagtgtttttgtgtctctatctccttcagttctgctgtgatcttaattttttttcttgtcttctgctagcttttgaatttgtttgctcttgcttctctagttctttccattgtgatggtagggtgtcgattttagatcctttctgctttctcttgtgggcatttagtgctataaatttccctctacacactgctttaaatgtgtcccagagattctggtacattgtatctttgttctcattggtttcaaagaacatctttatttctgccttcattttgttatttgcccagtagtcattcaggagcaggctgttcagtttccatgcagttgtgtggttttgagtgagtttcttaatcctgagttctaatttgattacactgtggtctgagagacagtttgttgtgatttctgttcttttacatttgctgaggagtgttttacttccaattatgtggtcaattttagaataaatgtgatgtggtgctgagaagaatgtatattctgttgatttggggtggagagttctgtagatgtctattaggtctgcttggtccatagctgagttcaagtcctggatatccttggtcattttctgtctcgttgttgtgtctaatattgacagtgaggtgttaaagtctcccactgttactgtgtgggagtctaagtctctttgtaggtctctaagaacttgctttatgaatctgggtgctcctgtattgggtgcatatatgtttaggatagttagctgttcttgttgcattgatccctttaccattatgtgatgcccttctttgtctcttttgatctttgttagtttaaagtctgttttatcagagactaggattgcaacccctgcttttttttttgctttccacttgcttggtaaatcttcctccatccctttattttgagcctatgtgtctctttgcacgtgagatgagtctcatgaatacagcacaccaatgggtcttgattctttatccagtttgccagtctgtgtcttttaattggggcatttagcccatttacatttaaggttaatattgttacgtgtgaatttgattctggtattatgatgctagctggttattatgcccagctagctagttgatgcagtttcttcatagcatcgatggtctttaaaatttggtatgtttttgcagtggctggtactggtttttcctttccatgtttagtgcttccttcaggagctcttgtaaggcaggcctggtggtgacaaaatctctcagcatttgcttgtctgtaaaggattttatttctccacttatgaagcatagtttggctggacatgaaatgctgggttgaaaaatcatttctggctgggcacagtggctcatgcctataatcccagcactttgggaggccaagacaggcagatcacaaggtcaggagatcgagaccatcccaggcaacatggtgaaaccatgtctctactaaaaatacacacagacacacacaaaattagccgggcattgtggcacacacctgtagtcccaggtactagggaggctgaggcaggagaattgcttggacctgggaggcagaggttgcagtgagcaaagatcacaccactgcactccagtctgggctacagagcgagactctgtctcgaacaaaacaaaacaaaaacttattttctttaagaatgttgaatattggcccccactgtcttctggcttgtatggtttctgctgagagatccactgtcagtctgatgggcttctctttgtgggtaacctgacctttctctctggctgcccttaacatttcttccttcgtttcaaccttggtgaatctgacaattatgtgtcttggggttgctgttttcgaggaacatctttgtggtgttctctgtatttcctgaatttgaatgttggcctgccttgctaggttagggaagttcttccggataatatcctgaagagcgatttccaacttggttccattctccccgtccgtttcatgtacaccaatcaaaactagatttggtcttttcacatagtcccatatttcttggagactttgttcatttcttttcagtctttttctctaatattgtcttctcgctttatttccttgagttgatcttcaatctgtgatatcctttcttccgcttgatcaactcagctgttgatacttgtgtgtgtttcacaaagttcttgtgctgtttttcaactctatcagttcatttattttcttctctaagctggttattctagttagcaatttgtctaaccttttttccaggttcttagcttccttgctttgggttagaacatgctcctttagcttggaggagtttgttattacccaccttctgaagcctacttctgtcaattcatcaaactcattctccgtccagttttgttcccttgctggtgaggagttgtggtcctttggagtagaagaggcattctggtttttggaactttcagcttttttgtgctggtttctccccatcttcatggatttatctatctttggtctttgttggtgatattgatcctgttcctttctgtttgttagctttccttctaacagtcaggcccctctgctgcaggtctgctggagtttgctggaggtccactccagaccctgtttgcctgagtatgaccagtggaggctgctgcccaacaaagattgctgcctgttcctacctctggaagcttcgtcccagaggggcacccgccagatgccagccagagctctcctataggaggtatctgtcggcccctactgggaggtgtctcccagtctggatacactgggagtcaggggatcagggacccacttgaggaggcagtctgtcctttatcagaactcgaatgctgtgctgggagaactctgctctctttagatctgtcaggcagggacatttaagactgctgaggctgcacgcacagccacccctcccccagttgctctgtcccagggagctgcagtgggctccgcccggtttgaacttccctgtggctttgtttacactgtgatggtaaaaccacctactcaagcctcagcaatggtggttgcccctccccccaccaagtttgagcatcccaggtcaacctcagactgctatgctagcagcgagaatttcaagccagtggatcttagcttgttgggctccgtaggggtgggacccaccgagccggacactggagagaatctcctggtctgccagttgcgaagaccatgggaaaagcacagaatctgggccagaatgcaccgttcctccctgtacagactttcacgacttcccttggctaggaaagggaaatctcctcaccccttgtgcttcccaggtgaggcaacgccccaccctgcttctgcctgccctctgtgggctgtacccactgtccaaccagtcccagtgagatgaaccatgtacctcagttggaaatgcaggaatcacctgccttctgcattgatcttgttgcgaatggcagaccagagtttttcctattcagccatcttgccagctaccaacctggtgtttctttaagaaacttcaagaatactgacttgggaatacactttgagaaaatgaacttattcacaaattttcaggcacatggattttatggcaaagaaccccttcactgatctggaagccagagctcaccttagtatccatttagcagactaatgtgtgggcctggtgaggacaggaaagatcatccggactcctattcttctcccctccatacctcaatccagatattcaaggtctagaaattccagggttatcaatatattccttgagggcattgccctttccaggctcctttttgaaatgaaaatacaacacagggtgggagcactttgaatcaattgtatcttcatctgaattatttgtttttagaataagtttggaagacctcagggtggtgtgaggatactggatatgtagagcataggaggtgggccctctaaagggaggggaggaatccccataggaagcttccccccatcaaggctgtgccaggaagtagaccctacatacggctttctctcagatgcattcagaacccagagattagggggagtgaaggaaacccatgtttaactcttggcttgctttgagtggatgcaatggccctcttttctcatcctcttcctcagcctgtatagggtcttctttcaggcatgctgagacactgcttgcttggatgccagctctattagagatgcactatccgaaggcctgctgctgataatatctgtcacattgaattatgccttctgggcatgatgtggcatgcagacagagaggccagtcattaccctagggctaataaggcccttatcaaaaggggaatctccttcaaagaatagtttagaaatagcaggcggtactgaattttgcatgtggggctgacagtctgtaagaatactgctcttgttttcaggaaatgagaattctttcggcaaaaggagaagctgatttgcagaagtgctgagcatgcctgagagagatgggagtgatcaagaccaagagtgccatttggatgtgcagagttgaggtgacatctgcctggagagattcaggaggcagctgaaatacactcacgtaaagcaagagaaacactaaaatgggagagacaaatttgggaatcctacatttgtcgttgtcaaagtttaagaatcacttttgagaagttccttaagagatggattgggagggcgcattgggagattctgcttctgtatacttgatgtcaggacaggaaatgtgaatttaaaaagtgtccgaggagacttttatgcagggaggaggggccccaaaggccttctggaaaacacttcttcagattgatagagaaacccatggtgaagaaaaacgggctaaggacagcaccatgggaatgcctgtgcccacaatggggaaaaggaggaatcggaggagccagggaagaagatggagtaggggccatcagagagatatgaggagagtggaacatgcagtgaaatcgaccatccacctaagaaaccatacaaaggacaggcgaaaacaaagtagtttattcctccttgaaattaagacatgaaaattaaaaccctgtgtatgactttactcctaaattagccaagagaaaagtcacttaaaggaagcaccaaatggcagagaaataattataaaacatacactcatgcatttaaaatgatttaagccttttggaaagcaatatggtaattcccatctagagccaggcatatgtgtatatcccacaatccagtgattctagcactgagaactttccaaagaaaataactgaacacagtaaataagccataagaatgaaaacgatcattatagcagtatctatatgataaatttgagataccctgaatactcagcaacattacagtgatataaagacattatgattcacttaatgaagtatgcaataatttaaaatgacaatttggctaatttagagatatagaaaaagttgtatattgaaaaacttagaatacaaagtaaaacttatattgtaaatacaaaaatgtaagtatgttttttgagaaaaaaaggaaagtaattttgtgtcccaattttgtacctttaagtcagttaagtatgtgtaccatttacctggtagcctataaagcaagccatggataccaactggtattcttggcagttataaggtgctcagatagccaaaatagctgtgtaaatatcctaaatcccatcctttccttattgagttggtttccaactcttctttccaactcttctctctttgtctggtttaggatgctgcctatgactctgtactttatactagcatctgttctttcacacttcttttacatgcttctcagattgcttggaccagctctcccagtttcagataatctcagctattgaagcccactctaacagccctgtaataaaagtacttgtgtttaagtttttacttacgaaaaattacattaaagcaatgttcatggtaaaactagccaaatggcttttaaaagctaatattgtcaggtgtggtggctcacacctgtaatcccagcactttgagaggctgaggcaggaggattgcttgagcccaggagtttgagactagcctgggcaacacagggacaccacatctctataaaacattaaaaaattagcttggcctggtggcataagcctgtgttcccaactacttgggaggctgaggtgggagggtcatctgagctggggagatcaagtctgtagtgaaccatgatcatgccactgcactccagcctgggtgacagagtgagaccctgtcttaaaaaaaaaaaaagctaatagtgaaaaatataatacttgcctgcacagtttctgtagatcagaagtttggtgaagcttagctggtggaggatgggcaaggatctggtggtttaacctctctgtatacagactttcaattaatagatctgtttttagctccacactatacccctaccttactgcaataacttgagtctccaagacctgagactttctgctaatccagttcaatgcttatcagatcctacagattctttctgtagggctttcagggtatcctgctacgttgactactgctcatccatctgcgtgccttccaaatatttgttaagatctttcacctacagttgtgcattagttcaggtccttcaagaggcagataccaagacgatattaaatgtacaaggattttgttagggaactgcctctgtgcgagaaaatggtggtgtggggggagccagaaaagacttggaaagtgtcagactgaaatgagaatgaaggagagaagaaaggaatgctgagtggtaatgtcctagaccacagtgcagtctgaggaaagttcaacaaggctgacaagagtatttgagtcaaagctggctgttggaccctgggaatggacctgcctgaatttccctagcatactcattgagtaatgattagctgggagctgccctggggaagcatggcttgggtcaagatcagctgtggatgtagcaggatttcagagcccagcagtggggatccttggtcaattccactcccatggataggggcatgagtagtctcatggcaaccaaagattgtttttttctccctttatcttttgggtgtgttccttttatttgggggaggctatattctttaaagaaaaatattttagtggtgtttaggaaaggaagggaaataaatggttacatttcaacgttcgttttcaaaataaattaaaataataaatatttaaattaattaattcatttactagataaattaaatgtttaataactacttaaataattatttatttaaaataattttcctccaacatttctgtaatatgtttatactttttgaaaaagtttaaaagaagagaaggtaatcagaagtgtcaggcagaaagtcgggggaagatggaggctgagaaagcttgtgtgactagctaattaggaggttggttattggtgaacttattgctgattccactgttatggggtgaaagccagcttgaaagagactgagtagatataaaagagtaagtaggtatagagcagtctgccaagaagtctggtagtaaagggagaacaaggaagacagcattaacttaggggtgtgcttagtactttgaaacatatttcaaaggaaagggtctttttttttaggctaagaagttcctaacagttttattagtggacataaaaaagagccagaatggaggaaaagattgaatatgcaaacaagaaaggacatgattgtaagaacgcggcctaagaggaggcagaagaggaaacggggtcacgaatgcatgcggagagctagttcaaaaagcaggagggccatctctccttcaaacgtaggagaaatgagatgcagacctaaagatgcctcagtggtgtatcaggatatctcttagctgcatgaagcaggaaattgactattgtggcttaaataagtagaggtctaggaggtaggcagtctagcattgatataatggcaataagatactgccaaggattcaagatgcttccatcttttcattctatcatgttccatgaaggaatgaatgaatgagcaaaataatggaagggaactatcatacttccattgagacttttttcctttcagtgaaaaacaatgtgaatgatcaaactgtagcaagttggttaaataatctagcatgttaacaatttgaagatcacattgcttttttaaaatatgtgtatgaagtagggatgtgaaaaaatatagattatgtgatattgagtgaaatagaaccttaaaataatatgggcatgtttattgcaattataaaaaatttgtatcttacaatattaaggcaaggaggaccattgtatcttgattctcatttagcttttgtgttaaggagggttggatttttttcttttttcatttattctgtttatagttcactataaagttgttaaaatatataattacaaaatttaaaagcccatatggaactttctttgagctcatctagaagaaagacactcctaaatgcaagcatggccatcaaaatatcattgcattgtacacacacacacacacacacacacacacacacacatacacggatagtcactacattctgataactaactaacttccaactgtaatattggtgtggttcatgaaggcccctttgccaaatatctctctacctccttcacaggcctgagattctttttctggggagcaatgttttctttgtttgaggagaggcatcatgatcttctcactacatgtaaatgattatgtctttctaaatggagagtgttaatatctctgaaggacaaagggtgcaggaaggagtggctgggtacacttgaaatgtagccccttcttactcatgccaaagttgaatctagattctcaattcaaatgatcttccatccctcacttctgaatgatctcccttccttttattggtgcaaggaattacggggctgggcatggtcttctgtttaccctcctaccctccatcagtgactttaaatcattccaatgaagtaagtatctcctatttttaagcactagaagaggatgttcttcaatatccctcaatcatacattcttttttctgacaaaactcaccctagaaatacttctttaagccaaacttcctaaattccttacttgcagtgttacagcttgtttcttgttggattgccgtccgagattaagaattcttaatcacatcccttcagaacttttatctggaagatctaacatggtgagggattatctgaccctcctttactggtgaggctcagaagtctaacagtgtgctcagacacctagtaactcagaggctgatggatactccttgtaggttttagtttccacatctgaaaaatgaggagagcaatatctaccccctcctcctcacatggactttgtaaaaaccctgtaagataatgtgactaaaagtactctgggaaatataaacaaattcaagttattatttaaatacttctctcttttcctttgagttttgctttgctgcagtttcatcctccttttctacagcactggctttgctgtagaagaggaatggcatggcatgctgtcagaagccacacagccctccagcaccctccctctgcatctagcttgcagctctgttccatcctcagcattaatttttaggtttgaatggatatcctggcttacatgaactcaggttactctcttccttaacctcctggtaacctgctaaatccctgcagacacattgttctcaattgggggcatttctctctccttttctactgacaaggggatatttggcagtatctggagtcatctttggtcatcactgctggtgggtagtgctactggcatgtggtgggtagagtcagggatgctgccaaacatcctaagatgcataggacagctcgcttcccacaacaaagaattatctggtctaaaatgtcagtagtgctgtggttgagaagttctgctatagataaaattcaatgaaatacatattcttctcccttccccttccttccttccttccttccttccttccttccttccttccttccttccttccttccttccctccttccttccttccttctttccctcttccttctttcttcttcctttcctttcttttcctttccattcctttttactttctttcaacagctatatcagatataaaggtataattggtatacaatgacctgtacatacttaaagtgtacagtttgatgatttttgacatctctacatgtaaaaccatcaccataatcaagaaaatgaatctatccatcactcccaaaagattcctcctgcccttttgtaattctgccctccttgggccacccatctcagcttcccagccccaatcaaccactgatttgctttctctcacttgagattagtttgcatagtctagaattttatataatttgaatcatacattatgcactttttttctggcttctttcactcagcataattattttaagatttatctatgtcattgctgaactacttattcttgaggaaagataagctgatggttaagaacaaagggttatgactcctgggtttttgggtcattaatagacactcttttgatgattttacttcttggatggatgcctcacttagctgttccttcccctgcccccacaatcaattttccttatcacagtctttaatacctggccagtgaactacctcagtggtcttctaataggagacttctgtctctaatttctactccccttaacttataaaacttcattcccttttttttctctcaaacagaatattaaagagctaatctgtgggataccagtttgggaaatggtgccctgacatagctattttgtttttaaaactctgcatttcagacttaatccatgtgcagtatacacacacacacagagaaatgaatcttgagacatcatctctaatcagcacagcttacctggtttttgcctactttggtgctaagaatctttcctggaattatatctagttaaggtatccatatttaataataggaagaattctttaaccaggcactttgaagaccataaaaaatagttaacgataattaaacccacacattattatgagaagtatgtagattttactacattgttagcctagacatacttctatacagcaatgacatatggttttgaagtggaattcttgaataaatctcaagttgctcctttcaagataactgagaaaatcttgattcctaagaaaacagtcctctttatcatctgttccacagttttctttcccatttatcttcgttatataggatatggctcattcttttctcttcccacacagtcttctgtggggttggtcatttctttattttaatgcttatatcacttttcttcagtcagttattggtatttgtatctgcaaatgctccaagttcattttaagcatcaaatataattaatattgctgaggatgttttgctcttctcctggcaacttgttacctggaatgctctcttctgtttgtgataggcattggttgtcttgcctacccagtatcctcttcatttggtaatagtactgtgttcttttttggtgtgggaggacgctatgtcccctctttaatgtgtttagttaacgtagcaagatttctgagagggggcgaatggtgaacctagggaggcctaaccttaggtccctgtgttctcaatggtatatatatcttttttatcagcagggagataccagggttcgtcatgggcagcaatgactacgatggacaagaagatagaggccctaatcctaattttctgagcaccatggaagccccctggattctagggagaccttgaggagaaagaagactcctgtaaatgcctgacattgaaattcctgcaagtctaggagcatgtgaactcaaaatggaaattaatttgatttaataaaaataaagaagaagaattgttttggcatatcccagtttgtagactgagattcataatggttgtaggcacttaaaaattatcatccgtagattaatgagtttattgagtgccatctctactccgaacattattagcaagactttttgtgggtaaagcaaagacatatggccctgcctcagtcttctgagaacacgtagcctgcttggagacagaatattcaaataggtaggaggaggttaatttcttacaaggggtaatccatcagggtctgatagcaacttaagagctaccacctgcgggcgcctataatcccagctactcgggaggctgaggcaggagaatggcatgaactcggaaggcggaggttgcagtgagccaagatcgtgccactgcacttcagcctgagggacaaagcgagactccatctccaaaaaaaaaaaaaaaaaaaaaaaaaggaaagaaaaaaagaaaaacaaacaaacgacaaaagcgagctactacctgtacctaattggtaaatgaatggcctggtcaatgagcagtgagttcagctgctatcatattaaagggaattgagagaaaaaagaaaaacagtaagaatttaatgtcttttgttttactaagagtgagtttgcagggctgaatttttttaaatttttttattttttatttttgagatggagtctcgttctgtcgcccaggctggagtgcagtggcacgatctcggctcactgcaagctccgcctcccgggttcacgccattctcctgcctcagcctcccgagtagttgggactacaggcgcccgccaccacgcccggataattttttttgtatttttagtagagacggggtttcaccgtgttagccaggatggtctcaatctcctgacctcgtgatccgcctgcctcggcctcccaaagtgctgggattacaggctgagtcaccggctgattgttttaaggaaaggagcagtttatttctgcagctcaccacttcccagggagcccatgctttgtgagcctgtggtctcaagagttccccatccagagtggggagtcaggccactggaacagcctgcagaaatcaagcaggtgggtaacgtgctcaaagatgttttgtgcttgccttttcctcgtcttcccaaatatgcagcacttgtccaggtcaatgtcagaggagcttatgttcctgttaagcaataagacccagtaggcagagaattgctgtggaattaggggaattcagagtgactttgtatgtcagggacatgagcctctgcttccatgccagtttccagcacaaggttgtttgaaagccttgcttaaaaaaaaatctcgaggtatgcccaacttggagctctcggatctgatgtgggcaaactgaagagatcagatcaagtcccttagttccttagagatctaggctgtgaaactgggtgactagggaagggatttgagtcatgatagtgtggagttagtcttagggcgttcttggacaagacatgaggtctttttggagcttggttt

SEQ ID NO: 593 - DNA, 115366 bp, Homo sapiens
  source 1..115366: mol_type = genomic DNA
ttggagagcagaaggttttgggatgatttgagtgcattacatttactgtgcactttatttcttttattattacattgtaatatataatgaaataaatatacactcaccataatgtggaatcagtgggagccctgagcttgttttcctgcaactagagagtcccatctggaggtgatgggagacagtgatagatcatcaggcattagattctcataaggagcacgcaacccagatccctccaagcatggttcacaatagggttcgtgctcctgtgagaatctaatgcagccactgatctgacaggaggctgaactcaggaggtaatgccagtaagcaatggagagctgttgtaaatacagatgaagcttcaccacccacctcctgctgtgctgcctggttgctaatgggccgaggactagaagctgcacggggtccgtaaatatctgtggggtaggtaaatatccaagcagtccatggcctgggaattggggatccctgctttatacagctagctttctataacttctaaagctgtaatctttctgttcttagcagttctcttacaggaaagaagacattgaactaaaagtgccttctataacttctaaagctgtaatctttctgttcttagcagttctcttacaggaaagaagacattgaactagaagtgcctttcccaattaaaaataaaaaccacagaacattagtgaattggttgacagtaatacattttgattatgtaaatataaattccataggctacttagtgattatttatttatttaccctgggtatcccaagaggtagtacagtggccacaggttatagagggcggtcttgagatctgaatgaggagagctctaattctagattttataatgcctgtggcttaacgccatcctgctctgcctggttcttcaagatagttgctacccccctcaaataattcaagccttggaatagcacagattgtgttagaacttcctgaatcctaaccagctagaatccactggcttgtttttgcgatatcagcctgttagaagcatatccctataaagatttaatatccctgtctctgcatcttggcacctgtgaatatgaaacaacagcataaatatgattttgaacgttgcattgtcacagatgaaaaaatgcaccaacatgtcaaatgcagcgctgaaaaaggaaatcgggcttatttttgtcgttgtttactgtaccaaagcatttttgaaaacccaaatcgaggagataaccgtttttgaatgaacggcagtgcaaagcgtggtcggggttagcagcaacgtggctgggcgcctttaactcggcgtgacctccgggtcccaggcccgcgtcccgggcccagcgcccaggcccgggcggcgcattggcccctcctcccctcgcgcgccgcgcgcattgttgtcctttagcgattggttgttggaccagaaacagctgtgcagagccgtgccatctaaagagctgtggacctgaatgcagcgtagcgggctggcggtgacttacaccgggactccagagggagagaggaagcgctgcaggccacttgcattgcgtcttccaggctgcgtggacccggcgccccggcgtgtgcggttgtgggggagctcgccgtggcctcccctccctctggctttagcttcctttggggttggcgcaggtgggccaggcagcgcaccgcagatctccccgttcccacgaaggctggctcgctgtctctctccgagcgggagggaccatcctaaaaatatgtaaatatccaagcgctggctccaggctggggcagctgccaaggtccccgcgccgccgccgggtgttttacatgaaaatgagaagcctgatgggaaccgcgttctaacttaaggcagcctggtgattagcatgagactgggcggctgtcctgcttcctgcccttcaatagccgttccgcgcgctcgcgccggagcagcgctgccgccgcgcgggggtcgatcgcaggctcggcgtccttggcagccatggctccggcgccgcctcggccagtaagtaggagcatgcatgtgtagggggcacatgcgtgtcggcgcacccacccagccatccacccgcgcgcacgcacagcgcccggagcctcggcaaggggaagattgacgaggcgctgcagtcgcggggacgacgcgggctcttcctggattccgcaggagcccgcccgccgcagctgctgtctgcagagcctgctcggatcctgtgcacacgcgccccccgctcgagcctctgtgatgaagactgtctcccggggactgcagcggaggcagagccagccagcgccggggactgcgggccgtgcggctgataggcccgcggggacacgactcggacactgtcatccccacgcctcgcgctgagctgcccggcgcggagggtctgccgccgcccctccggcctcccgcacgcccgatcccgggtcagccccggaggcctcggctgcctcatttgtttgggtcttttgtgccgtggctcccagttggccaagcactcctgcgctgaatcgggccattgtctgcgctcccattgccttcacgctgcaagtctcggcgcccccaccccgcccgccccctccccgcctcctcccggccggggagcctcctaacgtgcctttccccccaggaatctggaagctataagccgggcggattgcaaatgaagtgtaatgcattgtgggacgtgtgtaaaatcggagccttcgccgtgggggtgtgggggggcgtggggagggccggacccgccgctggcggtgtagacgccgacgaggaggggctgggaaaatgtgcgcagagtccgcccgggtcgtgcccgccgtagacggatgaaggagcgcgctgcgccccggcgctgaggccccgaggatcggggcggcaggtcgccctccccaccatgaagaagacccggagcacaaccttgcggcgagcctggcctagctcggatttctcggaccgggcctcggaccgcatgaggtcccgcagcgagaaggactaccgcctgcacaagcgtttccccgcggccttcgcgccccaggcttcgcggggctacatgacatcaggttggttggtgaccgcgtttctgcccccgggccggggccgcgggacgtgctcggtacgccgcggcccgggtgcttggaggagaggacgggcagtgatggatgcgataagttatggggaaagcaggaaaaaattagctcccatccaccattttgtacctcccaagatccacagcaggccctctcaatatggggttggagagctattagttaggtaaaacgagggaggggggacgagccgggcgttttggctgcagggagataaatgactgcaagccccggcgctgcagcctcctcgagctttgtggaggatcctgcgcccagggttgcctgcagtgccaggcttgctggctgctgcattgtggccggttatctgagtgggtatttccagcagccccctgttctccaaaaggaacaggttccatgcgcagctctggatgggctgagtcaggggagagtcctgcagacatcccaggctggtctgatttgcacgcagagaactgtgttggagcttactgaacgcgttctgtgggggtaatggtgtggatgcggattgaatgctcacatgattctgtgtggatttaacatatgttgctttgaattaggctgtatggaaagaatggaggctgtatcatgtgtttgcatgtcagacaggagggacaaacaaaacggtaaatggaaagggaaggcttcaaaaaagatttccgcttaaaatgcagtgctgtgaaaagccttcctgaaggagccagttctttttttggaaatacaacggaatggctttggtttgatttgggaacccagggatgaaattcttgagggaaatgctgaaggaggaaaagcctggaaaccttccgttgccttctccttacttctccttaaccacttggatgtaatgatgtgtaaggcatcggttcttatttatttttcattcagagaaaaatttagattttcttctaagcacactgtaatggaagaaccgagattttattttaaaccacatactgtaccaaatcactctgagccctgtcttaactgggaagatcattttaagcttgtggttggtacttacagtctagctttactctttttctcctaaaacagcaagtcctttttaactggggtcagcatctcatgcttcaaaaatgccttgcgaccgcatttccacgaacataaagccgaaataaaagaaccatcttttttattgcaaagtcaggcgacataaggatgttgtactattttggcaataaggctcccttgattttccctttcatgaaaagccaaattcgtaaagaaagtgacaactacagtttatacttcagtcatttaagtcgctgctgtggttgctacactcttcagacttgtggcagtaaattttgaaacacacctaaatgcaaacctaacctcaaaacacatatgtacataaacccattgctgcactaagtgttcagataatcctgggtttcatgtacttagggtttgaatgtcttcattccacacttcacagttcccctttcttatgcctcctaaggaaccggtcctgacaccaactgtgaagctataggagggttggtggccatcatttcatcgacaaacctgcaacactctgtttcatgattcaggcacatttccaggcagccagttttttttttttttttttttaatctatcttggcattacctcattatcacatttgcattctttgcaaaagaacttgtctgctattgcaggtgctgcgaggcgtttttgagggcttgaggaagaagcttttaattgtacttgattcccttattttatttcttgatctacaaatggtaagatggtcctatggtgataatgaaggataacctgtttcaggttggcggttttctgttcagattcaatgttaggttactgctgagaaacctgaagaccaaaagatggaagaaaagtgctgtcattcattcagcatttttatggcgtgcccccaaagagcgaagtgccttgctggattctcatggggttatagggttggatataatacggttcttgcccagggagggaggcttatcatttattctttattttaactgttagctaatacatggaataagaagcaggtgttgctgctatggaaggaaatggtaaacatgatgacaaacacctacaatgaagattgggagagtaggtggagtctttctcatgtgcaactcttttgggggttgggttgggaaggatgtgtatcttcatctatttcctttacaaatatggctcctttcaaaatgtgagtattgatagaaatagatgatatactgaaacacttggaaatgatttataagacattctcatccttttaggaaatgtaaaggagatccacttttatcaagttagtgactttggatacaaacagagcctttgtcacataaaatattgagtagaaaatgaaaccacttagaaacacatgaggcctttcatatttcttctttctgtttgttcagccatttggtttaattactactggtatccttatacttgatttttagtaaaaaaggtttttgttgtggggaaattacttgggttcaaaggacaagataagcctttcagagatgtactaaatgacttaaaataacttcagttaagagactatttttagaccccctccctcaacaaatattctgaaaattatgggaaacagtcacttagttttaaacttcaggacatgagagagccttgggaatttcaagaaatagatattaataattttccttttggtctagcatcccgtaccacacagtaggtgcttcaagcaaaattgtaggcttctataatagcaaatgagacagcaccatttcaaacagtcttttctccacgaataagtaattaccagtgtgaaatgtgatttatagcaataggcttgacatttagccttggcctttccgataccttcaggataaactacacttaagctcaagaggttagagcgggcacctataaactagcgagctcttgcaaaaggacagttagagaatgctgaaactttaagtctcgaagactatgccttatgtgactgtttaagctcccaactcatgctaccaaatctgaagaaatcctaagaattcatgagcttcctagcaaccagtaagttcacaggccatgagatgacttcattgttcatcttgaatattaatttcccagtggtggtttctgggcagaaaggggaagatcttgccttttgttcaaatcaagatgaataataaaaagtgcatggcgttatcttaagaagaaaagggattggaccaaatggatgtgggatcattcttgggcattttctaaaagtagaagttacgatattaatgaactagagataaaagcaaaactccccacaaaggagcaaatctgtataatgaacgcttagtactttatgtatgaaaacatgctcatttgtctctgtgaaatgattttcaaggccccaaaccttttgttgatgaagttgtgagagctttctctgttagaattatgtgaactgtaagctcttcacacgaatgatgctgctaacttttaatttccttccctctcccctcccccagccctggggatgggcgcctctttatattccatgtataatgccagcaaagttttgggggacatccttattgatcaagcatggaaagtaattttttcattatacaggttctacagcacatgatccttaaaagctttgtttctgcatgagaaagcgaagtcctggcccatttgagtttgatgcttatcattttgataacatctttaaggagtaaagcgtgcgtttttaatactacggttttaaagcctttgaaaagaaagataaaacaaaagccctaaactgacattgcaagaaatttgaaagcagttttgtctgctggggaagaatggccagctcatcaccttgattagtttattagttttcattttatagaaactaattctggggcacgtttgactgtgtgttccagttccttatgttctgttattttaagagacatgagggttttctgggagtgaaggatggacactggaggttccaatctgggcctgccacaaaccagctgtgtccctggcgagtaatatgacctccctccatctgtaatgagtcccccacttccatgctgccattacagaattgggctgtgcagtggctctgtcttgagcaagtgcaagacttctgaacacttacacataaattgttagacaaaacttctctgccctcttctactttttggagtcaggtgcctcctgtttgtgggaatagtgctcattttgcgatacaatcctattccctatcatcctgaaatgttacattaaaggtatgcgttttaggactcgccctgatgaccagagtaatgaggggggaagaaataaatgaagacctggcaagttataatcatatgcaagttttaataaagagcgtcctgtcacgtccctttccctctttgccgagatccattttcagcctagccgctccaactgtgttttaatttgaaactacctatgttgactcctttcatcaggcgagtggaagtgaggaatattacacttggtggtgaatgactttattctttatttcccaggagaacatgagtgggcttacaaaaggtcacctctcttgatatttcaatatcttttacattctttctaatgtttttatttgaaaaaaaggaatatgagtgtattgtataaaaaccttagcacttctgcacctccagagcaattctggcctgaaattccctacaccccggagaattaggacaattcagacaatggtatactctttggtacacggttgcttaggctgcatgcaggttataactaaaagcaaaatctgcttggacccttgccagtaggtcctatgctaacttttgaatttaggacatgtttttataaatcagtgatagagtgtgtgatgcctaatctataaggtataaagtagaggttcttctagtttgtgagagtatagatatagtctactccaaattgaccttatccacagtaacacaagaaagaaaggacatgggtaattttttaagtagggagtacacttttcctgaagtaggaaaaggctagtcttctttaacatcagaaggcgtgtgcaaccagtcagtcagaagattctatttgttcctcccacttaaatatttctaaaacctgtctcttcctcttcatctctgttgctgaacccttcttctgttctattacactatctaccaaacagacctctcttctggttccatctatcctccttatgtccccagagggctttgatggttttgttttggttttgttattttaaaatctctcctaaagcaaaatcacttgtgttgcttcccttcccagtgttcccatccatcacgcctgtggatgaaatcatagaccagggcacatcacagtataacctccctcacttttccacctcttcttctctttcccccactgttcacctcaccctgtgctctgggctctgggagctctttacctgcatcagcgcctgtcaccttgtgtacctgttgtagtttatgtgactttgcccagaatgcgttctccatccttacaggtctgatagaatcctctttagccttccagaaccagctcctatgcccccttctcttgcatcgtctctcagatcctttccagagtgattcgctcccacgacgtttgttttgtacttgtgttacagcaacacggtcacattgtgccacatcacgagtttacaacccatgtgtgtctccggtctggatggtgaaatcctcactgatagtacctgccttattcacatctctattttgccagcaaccacagagcttggcatgtatccggcacacagtaaatgtgtatgggatgagtgactaaaacatgacttcttagaaagttgaatgaggtctcgaagtcctaatgtgagtcacctttttgtaactgcagaaattataagtatgtatgctaagatcctacttttgaaaagatctcccattgtgattggtagacaggaccaacaagctatgagtggatgattagaaagtactaaataataggatacaatcaagagtcaagttggggtggttgatgtggttgctgcaagtgaaactggagttccgagaacagaaggacgttgcttagaaaaggctgcctggagggaggacttacttgggtcttgaagaagtgggtcgatttgaagagatggagaaggagaaggatttggggaaggttgaggaagcggtacaaaccaaggcatgaagctggaaatgaaaatgggtgtgtgaaatttgtcttactgtaactctgggatgtaaccagaaataatgtgtgggatcttgaaatttgggcggattcagagtttatggggtaggtaacacatttgtgatttggggagagaaatggtggaagcagcctttttaaagaggtgtcagatcgtggcttgcaggatagatgcatgttgtgaacgtctagaggctgggagaccagaggggaggtgtgtgggggttgatgtggtgatcaagcagtaagacgacggccatagaacagtgtgtcctgggccaggcgtggtggttcgcgcctataatcccagcactttgggagggcgaggcgggcagattacagagccaagagttcgagaccagcctggacaacatggtgaaaccccgtctctactaagaatacaaaaattagctgggcatggtggcgcgtgcctgtaatcccagctactcgggaggctgaggcaggagaatctcttgaaccctggaggtggaggttgcagtgagctgagatcgcctcactgcactccagcctgggtgacagagccagactttgtctggagtgtgggggtggaggggtcgagaacaaaacaaacaaaaaaactgtgtgtcccagcactgctaggtattattagcacaccaccctcaagattttaaaaatatgtccacataccacctaacctatttaatacttcgctttaacttgatctacttttgtatttaagtgaattaaagaaacaattttgcatttcctatgaaattatgggtttctctcgataattatatattttttctaatccctagtaaaatggacatttaattagttcagtaaaaaatattcaactaggtactacccagaatgaacccatgtacctgagcggtactcacaccatgtagtggaaaacctgagtaggccaagggaggagggatgggacaaggtggaaagggttatgaagaggaaagggagaatctgggagaacaaaggaactggccgttctttgtaagtggttgggtttaagaggtggaagaaaataaaggtgaacatggcgaaaccccgtctctacaaaagatacaaaaattagccacacttgatggcatgtgcctgtagtcccagctactcgggaggctgagcggaaggatcacctgagcctggggaggttgaggcctcagcgagccgagattgtgccactgcactccagcctggttgacagaaggagaccttgtctcaaaaataaaaataaaaataaaaattaaaaagctgcaactgattttgttgttgttggaagaatgcagtaaatgaccaggaacctgcagaaagtgagcagagaatgagttccattttgggctaatggtttggtattccaactacagagggctttcaggtgaacaataaaggcgtataagttgcaggtcatttgtgcggcagtgttcgttgtgaacacgagaatagcttggctttctgtgctttctgttccccttcttggaggggagcaggtgactgatttttatttccagcagaaggaggttcagttggattccatgaactcagagccctccttgggtttctgaaacctggaaactcgaggttaggattgcttggagattgtccgctttcctgttcctgaaagtaaagtgccctttaattcttggatttgttttattagtgttctcatctattcagaagccattgcattgttgatagaagggatatgtttttgatgtctatagtcaggtctgaaaacagagctctgcaagtagccgcacaaaagactaggccagctatgtaaataatgtatatttcaaacatctgtcatatacctatcccgttgaaaaattacggcttaggtaactcatacacacagtcaaagtctccatttatctttctactttaatccgtgatggcccctccaggccaagttttctttttctgaagataaaagagagagatttggcagatgcctgtgggcagtcggggtagcaggactattgcctggccttatccgtctgatggccgtagtttcagagggaggagccatcctctgcaattaacattgccttctcacccctacagattcctgtctggttggttcccctaagagagctaatatgccatttactgctttcggcatatccaacttttgctttgaaattgtctcgttattagagaaaacgaaggccgccagagtgactgaggtgcatggggtatttgtcttttttttttttcctttttggctgcccagtatctgaacctcttttcgatgtcggtgtcattcctcattgttacgcgtcgaatgtgtccgcccaaaagataggttcaagtcctaacccccggtacctgcgaatatgcccttatttggaaatcaggtcattgtggctgtaaccaagttaagatgcagcagtactggaatagggtgagccctagatccacatgactggtgttcttataagaagaagaaaagagacacagacacaggggagaataccatgtgacgagagaggcagagatgggagtgatgtgtttacaaacgagggaaggcccaggaccgacagccaccaccggaggccgggagagaggcctgggagggcttcaccctcagggtcccggaaggaaacaatcctactgacacctggggtttccacttctagcatcagagctgggagggcacatatttctgttgctttaacccacccactgtgcggtgctagttccagcggccacaggacactagtccgccacctctgagccttggtggcaggcagcgcccgcattctctgtgaagatgctgaaattgctgtgtaggtactttcctggccttccttacatggagggcaggggccagagacctgggttccacccagtggatattcccttcctgacttctaatctggtgctagtaaggtaagatgatggagactgtgagacagagtcccgggacgtggtggtgtggcatgatggcgttcccgggccaggggtggcagccggcaggtggtgccccatgtgccttgctagtggtgccagctgtaggtttgtgcttggtggtggctgtatgtttcaagcctgggtctccagccctccctggaatccttgagttgctcagtgtattttactctatccttttgcctgagaggctgtgtagcatagtgatttagagcagagatgcggacctcatggcttggcttcatagttcaatgttaccatcactagccaggtaaacttggagaaatcacttattttctcaggacctcggcttccttacctgcaacatgggaataataatggtacctaccccttgggctttgggtgaattaatatgtgtaaagctcttagaaccaagcttggtacaatggaagcattatatccctatgactgattttgtcattaaaagtaatggccaaaactgcaatgacttttgcaccaacgtaatattaaaagagccagcatgggtataaaactgtagaatcccatcagacacatatatagaatcacaacaggatctcgatcgttgtcacttcaaagtattgatataaagagtgacttgcacagaagctacacaaaaaagtacagttgagttttactttgcaaccgtgtcgtcttcctacggtgacctttccagaacgcttttgttttcccctttccaataacaccctcttccctctacttcctatctgcttcctcctagagtttagaacttagttccttgaggaaacctgatggagtgtgaccgagccgctccttctctgtgctccggcagcacttcttgcgcacctctgaaataaccgacacatctgccattttcttgtctgaccctctgtctagactggaagctctttcaggccgtggctcgggtctgacgtggctttgtactcccagtgtctagcgagtgccagatgtgtagcaggtacacagcagtttaaatgtatagatacggggacacatggtcttgctggcattcccagtggcttcagtggactctgtatttcacatctttctctaaccatatgcgtggttgatgccccaggggttgatggaaggaagccaccagggtgattgtggtggatcggtaatcgtgacccactcacaggggcccgaaggagcaaactgaaggaaactggggtagtttagctgtaaccaccgggttgtagagatgtgaactttggttttaggatttttaagaattccggcatggatctttggtgaaattataaaacagtgtcttctgaattcaccaaacgtctaagataaaacttccatttagattagatgctagagcttgtgattggaatgtgcgttctgttaacctagtgaactcatttggattttcatttccattggttttcaaataactgaaagaagtatttggacatattttccccacacttgcaaactggctgtttataatgtagacaaggggcagatgtggataactttttaacagtgcttttaaaaagactgcttagccagagagtgaacacgtcccagagagcagaacagtgaagatggccatagtgtcaagtggatttttccttatttgtgagagtggcttctgtctatgttcatcaaatgcctttatgtggtaaggcagcgctgtgatttagggctgtgaaatcagacattcatacattggtgctggcacccacttgctggctgtgaaatcctaacaatctatgttatcagtctatcctctgttttcttatatttaagatgaggataaaatagtatctaatttatagttgttaaacgtggattaaatgagcaaatgcaatcaaaataattagcatagtgcctgacacacagtaagaacctaatacatctttgctactgttatttcttttggaacagaactatacaggattgactggtttctaagtgttttacacctgaggatgcagaagaagagagccagcgggcaacttgtctagtgctacatagagttaaaagcggctttaaatgggattcttcgcctgatatttggtactcatttatcagaaatcaagtattccatttcttactgattttggtatgtgctctgctaaggaaattcacagaattattcatttatccaagtgggctcatttgtccttgaacttccaactaaggaaaaatggtagagaatcaccgtgcagtcagtgtagtcagtgttcccgtggaatataactctaggagaacttggctttacttaaaatcagggaaattgtgccccatataatcagacatagcttactctgagatacttattttgacttttcagttgaaggtaaaggagaaaactccgcttctgagctgcgagttcagctgcgtgtttatgtgtttgcatatgtggtaaaaaccaatcttgcagaagcacagttgagaggggaaagctgtgaagcgaagggacatctttcaaggccagttttgaaagtaaagccagtaggctctctcctgccaaccaagtgcatgttcctccttcggtgagtttataaaagtagtgatgggcccagtggaatctcaggtcagcacggcctctgggttgcttaggaaataaaggagggtgctagaattggaggtccactcttcacatgtgttaatatttcagctgctacgagcagacggtttggcagccaggcctggggctccgggatgacggcctgagctggaggagcagcgtgggttttccctcctgcacacacctcctgtgaacctctgcaccagccaggatctgggagctcaaagctgcccaccttcgctgcatctacccccgagtttccatgttacttattcatttgcaacatatcctttcccttccttcaaatcaagggaaagataactaaagaaaaaccaaaacggtacgaagtaacttgctttctatggttatgcccaactaattgaacttggaaagcctgttctacttatgattccacaagtattggctttctttagtcaaagcatagcttctggagcatgcagatcttgtttttccatatggtgtacgctgcttgatgtgggtgatttaaacacatggagagttacacagaatgtttgtttgggatgccagaggcgtagtgaatagtagtgtaccatcctggcctaagggccagaagtggaggtttccatcgtgagatgcagccatgtgcttgcaaggcttcctctccagggcagcgcggtggagtgtgcttgggctgggactggccgtgggccagctagaggtggggtttatggttccgcagtcgtggagtcaggccccgccgggaggtgtctgttaagctcggcagtggctcaggcctgggatgtaagcacagtctgagagcatgcttcctacgtgatagtggagtgctggtgtgctcctgaaatgtcagtatggaaaaggggcctctttaccctcagctccctttcacctaaggaaggaaaccattgttgttattgggattgttttttaagatggtctcactttgtcacccaggctggagtgcagtggtactatcgtagctcactgcaacctctacctcctgggatcaagcaatcctcccccctcggcctcccaagtagctgggattagagttgtgtaccaccatacctggctatttttaaatttttttgtagactgggtcttgccgtgttacccaggctggtttcaaactcctggggtcaaggagtcctcctgccttggcctcccagtgtgctgggattatggacatgagccactggacctgggtggaaaccgttgtttattgagcatgtacttggtgtgttggtacctgtgtaagtgtcaccttgtttagtcctcacagcaatcctgcaagggtgccactgattaatattttagcaacacaaatgtaaaaaaatttcagaaaactgagatttcacatactcatcggtatacttttaatcatgttcagtgttagtaaaataacttcttatttttatttatttttatttttattttgagacagggtcttgctctgtcacccaggctggagcacagtggcaccatctcggctcactgcaacctccgcctcctgggttcaagcaattctcctgcctccgcctcctgagtagctgggatggcctgccaccacggccagctaatttttgtatttttagtagagatgatttcaccatattggccaggctgatcttgaactcctgacctcaagtgatctgcccgccttggcctcccgaagtgctgggattacaggtgtgagtcaccagacccagccttcttatttttaagtaaagtattgaatactgtttcattcccccagtggttcatcttgcacttcctctaagtggaccccactgtagaagcctgtgctgtaatgagagagcagattttagggctccttgcatattctaacaagtctaaccctaaatatttgggtatgttatttaaaaataatctcttcttagccagctgaggttcttctgagaattatcttgccttacccaaagaacaataaagcctcctaagatctggtaaggggcaggctgggggatttgctgagtgtttccctgctgctatttcttcctcttcctctttttagcaccttagagtgggtttcaaatgccattgtaatgccgttgtgagctccttagtcgtcttaattggcttagtgttatcatgagctgccaatcatgtagtgaacatccctgattcctggagaagatgagatagctgggaccaaacaactcctaggtcttaacgcatttagtgcaaaggtacctgacaacaaaatttgaaacatcaaatgaaaagaagtctcaaacataaacataatttcgttcatttgcaaatcatcttcttttgcttactcattttctcttgtatttttcttgacttttttagttatgaaaaattgctgaagaagcattcggtttagcacagtctaatttctgccatctgttgttgtaagagttagaccgaacattattctgaggatagcaggaggctaggatctatgaggatagcagtaggctaggatccaaataattgaacaatttgacagtacctggcacagtaattcaaaatgacagaactgggggcaaagaagaagttctatgggtttgcatggtgtaagataaaatcaagttcaaggtaatcaagaaagaaattaataaactaggaattttgttgaatatgattaaaaactatagatggttaaaaattgggtaaaccaactgtatctttgataaggatcagtgaactggtttagagtacattagatgtatattacaaatcttccttttgggggaaaacaaaaaaaaagtgtcctgtgactccctgtaggagggtcagtctgagaaaatccgttacaatttcctccagcatttcagtggtccaggaggatgggttcagtaacccatggcaacccagtgaatgtgggtaataggaaaacataagcttcattcagttctgttagtaggaggacttgcaaaatctagcacctacataatccttggaatgtataagatttaatataatacaaataaaggaaaccccagctctttagaacatttaagaacagtcacaaagctttatgaaatacggtatatatttctaaaagaccaaaattgcttttaaacaatatataatagttaaaaatgatatcttttattaactcttactcccgtttcatggctagctaactagctaacacttaaattctctgtatactatactaaagaaatataacacaaagttgtcagcttttaactaaaaatatgatttatagtttctctgtatttttaactttagaatcaatacaccaaacgataaactcgtaaaatgaaaaaggtcaaacacttgtattcagtttcctaagatgagaatttcttaattatttgcatgtctacttaacttcttattgtcttcctctttctaatgatattctgggagagatttgattagtaaactacctctttagagcaaagggttttaacgatttacagcacattaaatgtatagaaattgcattcatctgagctagatgactttcctcaaattcgctgttccctggtgctttgagaagatgaatagtttgttcctcaggtgcaaatattattttaactgtttagattcatgcttagtcatgcatttttttaaacttactttttcaaattgtggtaaaaaaaaaacacataatgcaaaagttaccatcttaacttttttttttttttgagatggagtctcgctctgtcgcccaggctagagtgcagtggcgtgatcttggctcactgcaacctccacctcccgggttcaagcaattctctgcctcagcctcccgagtagctgggattacaggcgccccccaccacgcccggctaatttttgtatttttagtagagacggggtttcaccatcttggccaggctggtcttgaactcctgaccttgtgatccacccacctcggcctcccaaagtgctgggattacagatgtgagccaccgtgcctggcacaaaagttaccatcttaactttttaagggtacagttcagtggtattaagtacattcacattgtcatgaggccaacatcagggtgtatcctgggaactgttttcatcttgcagaactgaaactctgcacctattacacactaactctcggtcctccctaccctcatcccctgcaaccatcattctactgtctgtctctgtgaaattgattaccccacctcatctaagtagaatcataaaatatctgtccttttgtgactggtttatttcacttagcatatcatcaagtttcatccatgttgtagcgtgtgttggaatcttcttccttgttaaggcagaatcgtattccattgcccacgtgtaccatgttttgtttattcattcacctgttgatggacatttgagttcccactattttgctcttgtgaagaatgctgctgtgcacacaggtgtacaaagaactggcaagtccctgcttcagttcctttatgtacatacccagaagtagcattgctggctcacatggtaattctgtttaacttattttgaggaaccaccaaaccgtttttcacagtggttgcaccattttgcatacccaccaacggtgtacaagggttctaatttctccacatccctgacaacacttgttattttctgtttttttccttgatagtagccatcctaatggatgtgtgttcttagtcatgtatgttatgaagtacactcatagctccatgctgtggatgatctgtcttctctgagaagttagaagaaaactggagtgatctctgtgttgtctgctgcacagagaaacatgatcagctggagtctttcttagaaggccgctgtcacttgattaataaccaacacggaaggcagaggcagagcagaccaacaaacgtgctcctggtttcttgtgcttgtatttgaatactgttttcttatttttttccaagcgagggaaatatttaaacacaggcaaagtacacttgtgattctttaagttttatccctgtttgcagtgtgtgctatgaggtagtgctgtgggatgtaaccatatgggcccttcccaagttgcttaaaatgtagtgaagagcttagaatatctttaggggtgagctgcagaaagtgaggtgtcagatgagtccttacctggggctgtgaggggtgtggcatggagttgtcaggctgcattcggcagggtcagcattgagttgactctgtccttgtgttctagatataccctccggaaggtaggaacactctgtagactgtggttcctagacaccatctgtggaccagcattgagttggttccttctgcagaatcatctggggaacttaagcagatacacatgttagcctcattccaaagtatttgtagcttgggatggggtccagaactttatattttcaaagctctcgaggtgattctgatgtacagttaggtttggtagccactgatttggaattgcctgtccaggacagcagcctctcagctccttccttcaaatcctcactgcttcctcacaccttcagcaaaccagcgttgcctgttcgtgtcagggccttgacacgtatgcttgtcttattaaagagtcaggatccattcttgccttgaaggcccccacagttggctggagatatacaggaaaccactgcgggacagtgggatgagggtgatgatgggggctgagtaaggggggctggacccccacagagactaggacatgggaaaggacttctgaggaggcacaggagccccgtgtctgcccttggaggggcaggcagcccagcaggaaaggacaagagaggctggagacaggaggagtcccccaggcagtgccctctctctggaggccagcagatgagagagacaaggcaagagagaggaggggctgggacccaggaggaccttatgtttcgagctgaggagctgtcgggttattctgagcttaatgagtcccagacagacttgaggtaggggagtgacatgttgggatttgcatgagagggagatcgccctggctcagggtggaaaatggattgtagggcctagaggaagaaactgataggccggcagtggatagagataggctcgcaagggtgacagggccagaatgttgaggaattccatgcctggcggtgcctgtctctaccttgaagcaggaagttggctgcaagagttggaagaggtcatgggcaagataccagagtcaagatagctgtgctggcgtcagaaggtacatgcgtagacctcccttagagagtcttagggaggcctgctgaggccggataccgtgaatttgtggtggccttaatttgtatgatgagtgatttttacatgtagcggtctataatctgagtgcaaaagtgggagtaccaaacatttggatttttctaggttttaacactttgccaagtagaaggatctagagtaatgaggaagttgaggtttctttttctccccgtgttttaatcttcgaatgaagccagggctgatgggatgtctcctttgggggtttgttcctagtgaaacagaggtttggtatatgagaaggtgaaagcacaggtttggtatgtgatactccttaatcttctgaatggttctctaatgatggtagtctaaatactcagaaaaggaatccaaattgaaagaggtacaacgggtgaaaatttgaatcttgatcacaaactgtcatttcaaactcacttttttttcggtagagttggggtcttgctatgttgcccaggctggtcttgaactcctgggctcaagagatactcccaccttggcctcccaaagtgctgggattacaggcatgatcccccttccccggcccctcccccggcacacttgcaaagttgcttgaagaataattccagttggagtctattatcatgaagaattatttctgaaggacacttgagctcttcttaagctctagtcaagaaaaattgatcacctaattaagcttttgtcagatatgactttctgtgtatataatgttccactagacaatgtaatacatataactaggactagaattgcactaatttgggataattgggaggaagacctgtctaaataagtaaaagatttaaattttatagaatgtttaatggaatgcagtcttattactttcatgtccttaagctatctaatgaatggataaattatttataattagcatatcaatggttctactaagagattgctccttttagtatttgaaaacagggttttttttttcttcttgaatcattgatatggtgccctgaacttttatttatggcagttatttgtcctagccaaaggaaaggtaacctttaacctggccctatcccatcatcgccaaactccaaattggtaggtttcgaattaacatgaaattttattacatgggagaaccaagtaattctgcatccttaatgacacgagtctttttcgttttaaaaaagaaatctgtatttccatcacctatatgagaacagatgtgtttttaaaattcagaggaaaaatacacaaataaatattcaagataaagaaataaaacagtcaagatacattaaaaagtgcagattttaaaaattaagaaaataagataagggaataataaacataaaaaatataaagcattcaagataaacactcaaaatgataaataagtaaatatccaagaagaaataagtaagaaacacgtcattttccccaaagaatattttagaattcctgataataatgttttccacttattgaggccctcataggagccagtgatattctttcatttaatacaacacccaattctctgaggttggtattataattatatcagtttactgataaagaatttgtggttgaacattactagctaattaatggcagagctaggattcaaatctggatctgctaacttttcttaggacgaacctttagtacttcatcttccaatgtataattagagtaaagcaaaagtgggttttttttttttctttttgagacagagtcttgttctgtcacccaggctggagtgtagtggcacaatattggctcactgaaacctccacctcccgggttcaagcagttctcctggctcagcctcccaagtagctgggacttggcacgcgccaccatgcctggctaatttttgtatttttagtagagacggggtttcgccatgttggccaggctggtctcgaactcctgacctcaggtgatctgcccgcctcggcctcccaaagtgctgagattacaggcgtgagccaccgggcccgaccacaaatagtgttttttaaccagatctgtaaaaagtttaggagatggaaactgggcaaaagtaaagtattaacctactcttaacagaaaggaaaaaatgctattggtgcagaagtggcagcgttcgggaggatcaaaacaacacatcatgatgagtattatttcctcattgactctgattgcttttctagccagttattgattctttgcacacatgtagacttttcagttggttttctgaaagcagagccaacgccaaatagtggcttgaggcccggatgtgggagcaggctggctgagtttgggcacaggctctgcacggaaccagctgtgtagcctggcccccatgcctggcctctgtgtctcatgtgtaaaatgggacaatagcagcacctgcttcatgggattgtttgaggatcaaatgccttcatcaatgtaaaaccttgaggacagcaatctttgatttaatgttatgtgctccataacagtgaacagttattgttattaataagcttatagtgtcagtttagcaagaagcatctttgggcctctaaaaaagggtcatttatttctgagaacttttggggtctttttttttttgaggtgggaaagacttaattgccggtaattacaatctcccctgacctataggagctgttttaaatagtgtgtttaaaatagattggctttgcaggctagacgtggtactttttcagtgcacatattactgagctggaaggacccattaggacttaatggtcaggaggttgccaactgatgtttttgataggaggtaggagggtgtgtgagtgctggtgtggcattctaacaattgccttcttttgccctttctgggacttacccagggctttacatctatgaggagccattgtcagtctgctctctcttcttgcttaggaggagaacagacttaccctgtttctccacttgcaggtaagtgagcacacccctcagcagggcacccaggcatcccaccaagtggccgggaaacaaacctggctctgcgcccctccttgctgtggtcggatggtcttgcagaggctgtgataggaccagcatgatggtcaggctactcaacagagaggatacaactgcagaatctttccagatgaacagaggtgctaaggatccctggtgtattatttcagtggttccattttgcattgtttgcttatgggctttgtggcagctttttttcccaacagattggtgttcagtttaggtcatctgttttaagttcatttgtgtctttcacgtgggtgaggatggggagccctcgggggggggcattttgtatctggtgtacccttctgttcatctctgcacctccccagagctgcccacgaaatgcttatagcccccatggtctcctttctgtgcagaagataataaactgttggatttaaaacaaaatgaaacagcaaaaaaaccacacaaacacaaaagcctacttcaatgtctgcaggagcttggattttgcccccttcaagattcttgagaaacgtatctttcagctggagaatacagtgaagagaataacagaggagagccttggtgttcaaggatttatcagagatttcaattattaacgggtgatcaggatggaggtctaggacaaacttgcaattttgctgaggcacaaaaattttaatcccatgtcctgtgagcgtggacctgaatcagtaacccagtgagccggccgagcctggcactcttgccaacccggtgtatctccacgggcctgttctcaaagttctgagacaggaggggattaacaacttagtgtctcaggaggcagaggttgcagtgagccgagatcacaccactgcactctccagcctggcgacagagcgagactccatctcaggaaaaaacaaacaaaaaaaaaacaacaaaaaaacttggtttctttttggaaatagtcctgaaaagaacaccaacccaccacagctgctggtgataagaaataagagaaaatgacgatgtctgagaaagtcatagctcttactcaaaggaaaagaagctttggataaagtgtgaaatacttgtaacacaagccccgaaagcgtaactcctgtaaccgtctcgagaattcctcagatgagtatgtttcacttgccgtcttaattttaatacaaataatctttaaagatacaaggcagtaacttaaaatttttagttattgggaaaattacatgagatctagtcatgatcaaaaacatggagatttgctgaagtcttggggcctcccattgctcatggctggtttcttttctacagcatacaggatgagaccaaaagagttcagagctgtgccccaaatatcaagtacacagctatcattaaatcagatattttatgctgtttttgattttgtggtggtattggccttcctttgaataatccagtaaagatttagataaacgcgttaggaattcagggaaaagaacggcctaggtctggaggtttggaagtagtacacattttctctttatatgacattacgtgtagtatgttgggtcattgccatacctgagtggagtttggggacataatttataacaataaccgattgattattgggtatatttcaaacaccttaagtgagactgagaaagtgattgaatctctggccatggatcacactgggttcttctgagccttttgtaaacattaaaaccaaatgaacaaagaggctcttgcaggggattcataactctcacttcgcgctgccattccacataaaaccaaaaaaaggaccatttagcagtattgtatgctgaagggccacagcatcgacaagctcccggttaaacgtatttctgaggtacaacagctgttttgttgatgttatgttcactgctctgtgaataattttgtatagcaagaaaatattacaaccaattatcctagctatataacttttttcttcttcttctttgagacggagtctcactctgtcgcccaggctggagtgcagtggcacgatctcggctcactgcaagctccgcctcccgggttcacgccattctcctgcctcagcctcccgagtagctgggactatgggcgcccctcaccacgcctggctaattttttgtatttttagtagagatggagtttcaccgtattagccaggatgggtctcgatctcctgacctcgtgatccacccgcctcggcctcccaaagtgctgggattacaggcgtgagccactgcaccaggccaactttttttttttttttttaagacagggtcttaccctgtcatccaggctggagtgcactggtacagtcatagctcactgcagccacaaactcttgagctcaagtgatcctcccagctcagcctccagagtagctgggactacagacgtgcgccaccaagcccagctaagttttttatttttattttgttattattttttattgtttgagacagggtcttactctgtcacccagtctggagtgcagtggcacgatcatgcctcactcctgggctcaagtgatcctcctgcctcagcctcccaagtagctgggactacaggtgtgtgccaccatgccccttttttttttgttttttgttttttttttgtatttttcctagagacggagtctcattatattgcccaggctagtctccaactcttttgttcaagccatcctcctgcctcagcctcccaaagtgctgagattacaggcgtgagccattgctctggccataacttttgtttcaagaaggaagttagtcttcaatattctgttctaaagcttaatagaataatatgaagctatatttctttccctctgttttggaggaagagctcatattttttggatgctgtaactcagtatttctgaataacttcaatatcagttgaaatactgacctagatctacaaattttctttttttcttgcatgatattcctagaatcttatgtggtttctacagatatcttcaaatcaaagaggctgagcataagccatactggttaaaatagaaatttctattgggggacaatgaaagtgtctttgttagtatcaaaataagtcttaaaaatattcatctagaaactgtcatgtttgttcttgttaagatgattgtgttgaacccaaagcctagcttgttgagtaatttttccttgtaatttctcaaaagatcttcatttatcatctactataatatattaattatggagctactggttgggcacggtggctcacacctgtaatcccagcactttgggaggccgaggcaggcagatcacctgaggtcaggagttcaagaccaggatggccaacatggtgaaaccccgtctttactaaaaatacaaaaattagctgggtatggtggcatgcgcctgtagtctcagctacttgggtggctgaggcgggagaatcgcttgaacccagaatgtggaggttgcagtgagccaagattgtgccaccgtactccagcctgggcgacagagtaagacttcttcccccagcctccccccaccaaaaaaactgtggagctaccatattcctggtattatcttctgttgatttattcagagatatctagtgtctatatgcaagcaatatattagttgcgaagtgtctaggaacagtgaaagacacaagtctcctgtttacttagattatgcagactattgtgaaagaaagggactgaaaggagttcactataccgtaaaggtagtgtggcgcaaggtgaatgtgagtctgtagggtaaggtgagtcaggaagtgccttgtaggttggatgaccttataaactggcatgctggggccagtgaaagagggcactattaataattgcacgagaagagcaggcataagctgcaaccatcccaggcaaatgggaacgtatggttaccctatgcatgagggtaaggaatttgcatgctcttaagaagcagtaaatgagaaactgtagagagtgtttaatctagagagcaatataataaaaatttgcattgtggaaggcagagaaggattggagcgggcaagaagggaggcatggagaccagggaagggctgtttcagggatccaggcctgggaaggagacagcgtggagcaggtgatgatggtggagaggctgagtggtgggcagagctgagaagtgctttggagactcagctgactgacaggtgtcagtgactgtgaggatgtagccgatgagtaggaaggaggagtcaaggtgatacccagtttctgagaaagggagaggtgccatttgcttggatggaaatgcatgaggaggagcagctatggggttggggacgttgatgagttccattttagatatgttgagtttcaggtattgatgcaatatattgatacaatatattaattgtgtcagtgtatacatacagtatatgtatgtatacatacagtatatgtatgtatacatacagtatatgtatgtatacatacagtatatgtatgtatacatacagtatatgtatgtatacatacagtatatgtatgtatacatacagtatatgtatgtatacatacagtatatgtatgtatacatacagtatatgtatgtatcagtatacacattaatggtgtattgatacaatatattatacagtagaaatgtttggcaggcatttttttcctttctgtgttaacctcaacatcagcctgcccataccaatgttgttatttagggcttttaatccctgtgaagatcttgagcacctagacttgctgtgactcacttaagggctcatgtcagccttgaatatgaactgttctgagccttgtgaaaagtagcatggctgctctgttgaagcagctgaagtttggctaggaaatggggaacccgacttcctacaacaacgttgtctcccaactccctgtcagaactgtggaagatgtgggtgtttctgcagctttagaactaaagaaatgtcctacatgacagctcctcctcatctgaacaatatttatagcctcttgcagaatacgacttcaaaaataactagtatttataaggcacttattctgcagagcttgcctctatttttccatttttccttagaatccatacggagttgtcgagaggcagattcacatgctaaatgaccatgaaaaatatataaatatgacattgctttctgaatggtttattagttaatgttcgtattagccagtgtttacatttttaatgtgcatcaatagaaaaatttctctttaagctcctggataatttccgaagcagattatctggctcacgtacaacatttattggagtttgtggacagacacaaataccgtgcctttccccagtatattttaagtgataccgatttactttaatactgcagatttagccaaagacgtaattgggaatggcttttcctaagcctgtctagttcttattgaaattaaagcatttgcataaaaagctatacagtaaaccccagaagttgttgttgttgttgttgttgttgttgagacagtttcactcttgtcgccctggctagagtgcaatggcatgatctcggctcactgcaacctccacctcctgggttcaagggattctccagcctcagcctcctgagtagctgggattacaggcgcccgccaccatgccaggctaacttttgtatttttagtagagacggggtttcgccatgttggccgggctggcctcgaactcctgacctcaggtgatccacccgcctcatcctcccaaagtgctaggattacaggtgtgagccactgcacctggctgaaactcagaagtattaagacattgtaaattatgcccaacttgagtattgctaacaattacatttatgaggtaattagaattgtagtatctcctgttttaaagagcatttattatttatactcagcttcatcctgcctccctgcaaaagtatttaagatgtgttagggagacacatagctatcatgtgatgaaaaaaattaaatagtggaaaaatggacagagagaataaaaataggaaagtaagcagaaggtggggtgttttaagaattaagatgtgctggaagaattaagaaattcagacttgattctatctatttaaagatgtaaatattggccaggtgtggtggctcatgcctgtgatcctagcactttgggaggccgagacgggtggatcacctgaggtcaggagtttgagattagcctggccaacatgcaaaactccgtctgtacttaaaatacaaaaattagccgggcatggtggcaggtgcctgtaatcccagctacctgggaggctgagttaggagtatcgcttgaacccaggaggcggaggttgtagtgagctgaggtcgtgccactgcactcctgcttgggtaacagagtgagactccctctcaaaaaaataaaaaataaaataaaataaaataaagaggtaaatgttgtatttaattgaaaaatttctgtctctctatcctgaatgccttggcccaacccctttgtcttaaatcaggaaatggagaattattcaagcaattggatctaagtatataaaggcctttagaaactttagatagcctaactttcttttacctttatttctatatagcctgtcttttattcttgtctcctttactgacttatccagttgtacagcaattaatgacagaattaattaaaacaaatatccagaatctttcactcaacaattccttgatttagagcagcagttcttggccttgtcagcctcaacgagcctcctttttttttcaaacaacaacaacaaatactttggtaatgcttcttttcttatcctgaaatataatttatctacacacataatttcaaagaatcaatatgcatcttaattgtaaaataaatgagaaataagaagaatgtagcttatagtaaaattaggtgtattttcatatgtacctgcttagataggtcttcaccagaaaatgcaggaagctgccagctgcttcgcctcttgggggtatcgctatgaacgcacaagcaggctgactcctcaggttgcatgggtgcctcaggcacagtcatcgccattgccattggcgacacaattttctgaaacaagaatcaactcagtgcaatatttcaaacaaagcaaagttcagtttgttccatctccagttgtaatcctggaaaactcagcttttattaaagccggggaaacagtttggtgtttttatgtaaaatggagttctgttctaagtgcagataattacacacagatactccccagcatggatgtcccgcaggacagtgggaagcccgctcaggagcgtgcattctggggcgccaccccatgcgtgccctggaacctcatctgctaagtaccagaggcactctctcaagcaaaactgcctcaaacatacctaaaagctccccagagggtatcaccctgttgaccagaaaaaggggaagatgaaaaaaaacaactggaagatcgtatttaggtttgtctttcccttaggcctggaatgcagcattttggggctaacgctctagagaattataagggtgaataagtctatctgcttattccagaaagagtcaaagggaaactgaagtgagagggacagaaggccagggctgaagatcagaggcagggcccaggggcccagcagtttggtagtgtggggaaattgaactgaactttgaattctagccctgtatcaaatgtagctcccatgtagctgtatgatcttggaacaatccttttaaactgagtctttcttcacctgtagaaacaagtacttattcctaatttatagggttgttatgagaattaatattaatgggacagtagtgcattaaagtaactgacattgtgcctgggactaaggagtactcagaaactgctagttttctctgctcccctcttctcatgcagagatttctagtgatggtgtttgcatttcaagaggagggatgtaagagtgataacaaagtgaaatgtttagttcctaagttttaaggtggaaaacctgatatacagtactttatataccctgaagcatcctaaatttttttgttgaaatgaaccctgtgcatttcagatttagattttgtatttcacgacattcgtgggagaaaaagcgttacttctttaaatgacaaaagaaatgctttcctgtaggaacttcaaacaagggacatataaataaatttcaacatgaaatcttcaccacccctaatccaacttcctgagagtaactaactactaatagaatttaaatttaagtacttctgcagtcttcctccaagccttggcaaacgctgttgtttccatctggagttttttttgcagtctgtgtgaaaccttcgctctcatctgtgctggggaagctatagcctcgtgtagcctagcctagcccacctgactctactcagcgtaattgcttcagcaccgcttttctttgtttgtaaggctgtgattgatggatatcaatttttatttctcctgtaaggtttttgcatattttctctcttttttttttttccgcagtggatcatgagtttattggcgtcagtatcttttactttattgtaaggcctgatagtatctttttttttctctataccaaagttgctcaaaattggaatatattgaccaaagcactgaattgtgattatacatgagtattctgtaggcagaactgtgtctgaagagaataaatgaaaaacctagattttaagaaactaataattttttaaaaactaagaacttaatcacaaagaagcttatttaaaggagaggtataggtgcatggaattgttgaatatttaggactgccagcctgcctgtgttctcagaggtataccatgaacaattgtgtgctgagtcacagtttgtcttatttcaaaacttcatcagtactatctgttgtaaccacttctgtgtcttgcaaatgatatgtcacctcactttcattctgattaatgaaacaagggatttgtaggaataaacagttcttaaaatatttggagatataatttggtgggcagagcatggatacttttgcacatcataagttttcattataaagacattatcttactcactttaataaactttgaaatgggcattgtaaataaggagggaaataattatgacagtatcttgaattcacacatgcatatatttttatgcactcagggcagtgtatgcatgtctttgatgtacagctaaagcactctttggtgaggtacattcattgtgcctttcctttcctgtgagtcacggcctacctaagagaaagcttagtaacacgcaaggaaaattcaaaacacattgaggctctttaatgtacgtgatacttcagctgagataacctgtcatttaaaaaatttattatccagaattctcctagttaatgtcagtttcctgtttagacacagctttcctgaaaggctgtaatcaattcttcatccatcctgaaggagagaatttccaatggagagaagacgtgtcttcttcccttatttccgacgctcaggaagccatatgaccttttctttattggatgagaccttggcacttgcttagggaggtcagtgttcgttttagagctgctcagagtggggtcggcagacaggtccacaaggacatatatttagaaattgagagtaggcattgaaacaccaatagcagtttgatatttcaccaacatccaagctcatgatcagtggactcgtctcattgagctcattcaggtgtggtgtgacctgcagaacagtcacgctcaggaccttgttcacaacgtgtggcgttttaaggttagcttctatgatccagaagtatggaaaccattgatttcatcaatagatgatgtaccattaactaacttgactgaaaaaaaatttggaattgattaaagatgaattttgaaaatacagtatctctggctttattttgagtaaaagttaaaaaatcctgagctggctgggtgctcatgcctgtaaatcctagtacttttggagtccaaggtaggtggatggcttgagcccaggagttcaagaccagcctgggcaacatggcaaaaccccttctctacaaaaaaatcagaaaattagccagatgtgggggtgtgtgcctgaggtcccagctccttgggaggctgtggtgggaggatcgcttgagcctggaaggtcgaggctgcagtgagctgtgattgcgccactgcactccatcctgagcgacagaatgagaccctgtctcaagaaacaaaacaaaacagttctgaacttgctgaaattactttaaaatcttcttccattctccttaacataccttttgtgagactggttcctctactgtaactgttattaaaacaaaacataaaagcattttagatacacattattccctgcgaatagcattgccatcatccagtttgtgttagtaaattaacatgcaagaagcaagctcatttgtcactttaaaaaactttattgatggctgagcacggtggctcacgcttgtaatcccagcactttgggaggccaaggtgggcggatcacctcaagtcaggagtttgagaccagcctggccaacatggtgaaaccccgtctctactaaaaatacacaaattagctggatgtggtggtgcacgcctgtaatcccagctactcaggaggcggaggcaggagaattgcttgaacccaggaggcggaggctgcagtgagcggagatggtgccactgcactccaacccgggcaacagagtgagactccgtctccaaaaaaaaaaaaaaaaaaaaaaaaatctattttattcccaaagttcactctttcaaatgccattgctcctgtgtgccaactttgattttcaaagctcaccattaccttggagataacgttgtgcctaatttcaggatgattgttttgaaatgcattttcgaattttttccagccttgcacttgtagcatccgttgctacatttcatcagctctgattaagaatgctcatcttttaatagcctgctaatgaaaataaaaaatttgtaaagtaaaataaaaaatattttattaaatgaatgattttaaaaatgcaggccattaataaaatctatccaaagagtcagctccttgctacatacggaatagaagactgttttcagattttggacttgtaaaagctatcggtagctaaccaggtaatttggatgtttaagtgatttgtaataatcttaatcatttggtgacttggaaccaagggtggcatgttattccctacggctgccatagcaaagtagcacacactgggtggctaacaacccctgaagtgtattctctcacagttctggagcccgaaggctgaaatcaacgtgttggatgtaggggagattccttccctgtcccttccagcttccggtgactccaagtcctccttcgtctgtggctgcatctctccagtgtctgcctctgtcttcacaaagctttttcatcttctctgtgttcccccatcttctgtctctatgaaaacacctgttgttggattgagggctcacccgagtaatccaggatgatcttctcatctcgagttccttaacttcatcatatctgcaaagaccctttcctaagtaaagccacattcacagatgctgggggttaggacttagatgtacgcttttaggggccaccactcagcgactacagatggtcacagattttttttttttcagaatcactatttattgagtgttgtttataatgtgctcaagtggttgctggagagagagggactgtggtaaaatgagagtgacacctttgggttggacggtcccaggcttgatttcaggctctagcgttctcccagctctgggagctgggatgtgcttcttaacttctccgcgtcccagtttcctcatctgcaagatgacataatggcgaagttatgtaaagttcctaaaaattctgaccagtgtgatagatacatcaggagtgatcatagttatggtgttttcttatttaaagatagcatttttttcttttaatggaatctcgctctgtcgctcaggctggagtgcaatggcacgatctcagctcactgcagcctccgcctcccgggttcaagtgattcttctgcctcagcctcctgagtactggaattacaggcgtccgccaccacacccagctaagttttgtatttttagtagattcggggtttcgccatgctggacaggccggcctcgaactcctgacctcaggtgattcacctgccttgacctcccaaagtgctgggattacaggcgtgagccaccgagcccggccagtatttttatcatttctgaaatcaagacgcccgggttccctgatgttgattcatggtatctttcgtgcctcacgaatttttccacaaaactgctagggcaaaagaaacacctagttgttctggttactcattagtgagacccaaacgactaagcaggtgtttatgtcctagcaacttcgtagcaatatgaaaagtgttattttattcttaaataagcccggttactccggggatgtgtgtacatgctgaaaactgcagaacttctcaaacgtgggaattacctggggcatggccacccctcttcctgctccacactgatttttgcacaatcctgctttttatcttggcaaccacgagaaaaccagcttcacaaagatgttgtcatcaaagggaacacagcacggtctaatttgaaactcgaagataagccaagttgattgatcacttgatgtttgacagaggtcaagtattattttctaatttggttgtataaaatttaccccctaatcagcaggatttgaaagcctgacttcctttttctttaaaaacttcctggtcctaattgtactaaatattttatgtatgatagtttattctaaacctactgtttcttctacatttgcaacctctttattttactattttaaagttttattttacaattacagcataaaataattgtccaataaatatttgttgatgaataccgtgtcaaataaaccacttttcattcaggctgccacgaaaatgaaacattcaggagagacaaagcttgctgtaacatgtggtttagatctgtggtgtggccaaccgaccactttttatgaaacaagctcagatctagcttcttttatgtgcaccaaagataaggatgatgaagttagtaaaaacacattaggtcatatttagtttatcttttcaagaaccaaatcagttactcctaagatgagtagactgaattatggattccatgtgctgatggagcctttgagtcgtatgtatttgttcataatattcattcttactcatccttttggttctcctactcttcagttctttcattcattcaaaaaatattttgtggccaggcacggtggctcacacctgtaatcccagcactttgggaggccaaggtgggcagatcacctgaggtcaggagtttgagaccagtctgggtaacatggcaaaactccgtctctactaaaaatacaaaaattagccaggcgtggtggtgggtgcctgtaatcccagctacttgggaggctgaggcaggagaatcacttgaacacgggaggcagaggctgcagtgagctgagatcgcaccactgcactccagcctgggcaacagagcaagactctgtctcaaaaacaaatttcttgagcaccccaatattcatgcatggggtgggggttgtatacctaataagtatactgggggtatggcgatagacaacatggataccatgttatgtgcttaaagtacttaacacgtgcctggcacacagtcattagcaattggtagatggagctaatgttcatattattaagtttatgtgttgtgccttacaaagctccactagaagaaacacagagatgacgtataaatcaatatgttgtgaatattttattgtacactttggttatagagaatctgagattctctaggatgacagacaataatgattctcttattgacatttatcacttcatcatgcctggcaacctacgactcctctttagctattagagggcacatgtgttgaagggtctgtcctcaacccattaaaaagtatggatggtcctcaggggtatttagtacctcagaaggatttaaaactctcaaggattagtaagtaattagccttcatgcctgatgtgtaaacagcaaaggcatctttgattttggctcaatcaatgtaattttaatgttaacagctctgagatcagcagccaacagttaaataaactttgacactgagagcagacatttcagcagaggtacaatccaatttactgttgattgatcaaccagcttatttcctttgactttagacatttgtaaattatcttacaaatttgtaaattatcttacacatttgcattatatatatatatatgtgccaggcttctaggttttttttttttttttttagacaaaaccaaggttaaaaaaaacaaaaacaaaacttggatgaacactcatgactcaccacatgggaccagacttctggttgttggatctgggtttcatctggtactgagggatcactaagaggcttctgattctcctgagctcatccccatttcattttcataatctgtatacaaaaacctgtagtcctccagctcttccttaattatattcttccttttcttaaaaaaaaagtcattccatattgcataatttatatttgtaaactgactttttaggcactccaaaaagagatagaagagctcttgtttgtaaaatatgggctaactactgtttcagcttgagaaaacaaatggcagacaggaactgcaaatctggtatagggtcctaggagaatggaggcaggccatatttataaagattttctatatcatgtgctttaaaaaaaaacttttttaatggtttgaaaccaattcttacggctctgaaataagaagtctttattactgtcttgtcagatgttttcattttgtaaagtaaatggcttttgattttgtattgctacataatcatttcttatcagttcatctaattgctggggctttgaattccaactctggcagtggtgagtttcaacttttctggaagactgtttgaatctgggatacagtcagctttcagaatggcaatagaaaagaaaccttgagattcctaactttaaaagatttattaattcagataaaagtttaggctggaagagaacactgacataattaaatatatttagtcatttaattctcattaattttggggataggatattatgggacagtgaccgtgtgtttgcaacttggcaatccaggaatactctcttctggtagctagttgcccagtgaataaacttaactaaagcagagaattatttgttaaaaatctaaaatactttattttaacagaaaacacctttttcatgtagaggcaaggactatgaatttgcatagtttttctagaataaatcatacctattatgtatccagatgtatgatttccagtttcattttccacagagaaacaaaaatgagttaattcttgaagctgagtgataggtatgtggaggttttaggatactgttctgctaactgttgaatgtatttggaactttccattttaaaatgttttttaaataaaatatagagaaataaagtgatcaagaatttcaaacgtacgagaagaaatagaagtgcagaatcattcttgagttttatgatttaaaaaagaaatctcaggccaaggcaggcaaatcacgaggtcaggagttcgagaccagcctggccaatacagtgaaaccccgtctctactaaaaatacaaaaactagctgggcgtggtggcgtgcgcctgtagtcccagctacgcgggaggctgaggcagaagaattgcttgaatccgggaggcggaggttgcagttggctgagatcgtgccactgccctccagcctggacgacagagcaagactctgtctcaaagaaaaaaagaaaaacccccaaaaaacaaaaaagaaatctccccaggggatgccactctgctgtagccaccactgagcactgtgctaggtgctgtggattcaaagatgtctcaaagtcagtcctgctctggagaaacccatggctcagtacagaagacagacagacaaatgcaagagaatacattctggttgcataaatgttctgagtgtagatagagagaagagaactaattcttcctaggaagttggggacacttcacagagtagctgacaatgtaagtcagggtaaaatagtagttacttatctgttcatcccttttgctaagtgagtgtcttggccctgcggggcttaattaaagccagggctgccctactcctccatgtcctgggaaacatgtcttacttttagcaccactgcttaactggaatagttcacgtggtgctgatatgtgagtcttccagactcaggtgcataatacactcaaatactacattaagaccctgtcattgctcatcagatatttactgagcatgcatttaaaatatatgggtgagagctgggcatggtggctcacgcctgtaatcccagcactttgggaggccaaggtgggtggatcatgaggtcaagagttcgagacctgcctggccaacatgctgaaaccccatctttactaaagctacaaaagttagtcaagcgtggtggcgcatgcctgtaatcccagctacttgggaggctgagccaggagaattgctggagcccaggaggcggaggttgcagtgagccaagatcacaccactgcaccccagcctaggtgacagagactccatctctaaataaaatgaaataaaataaaatggtgagaaagtcatttaagtataaattctttatttgcctttgagcacctcaatatgacaactagtaaagaatgtttggataatttatttatttggcaaatatgaggcttctgtattataagcctatcttttactcattcaacaaattttatctaatgtctaccatgtctagggcacatcagcaaaaaagacacagcttacagaatgatacacaatataacaccatttattgaagtcttttattatgcatgtaaaaataccaaatattgttgtgcattcatttatatatgtaaaagtgtttaaatgtcctgggagaattgatggtcaagttcaaaagagtgcctctgggtatggagtctgtgagtgtatcaccttaccttcaaggtttcattcttttctgtaggaaagattaggacaaaatttcatcaattgtcagttttaggtggtggcaaggcaggtatgtattttacacatctttgagctctttggtattttaaaaatttctccaaaaagggaacgtaggagaatttcagttgcagaattcgggggttggaagtggaagagacacaggaaaaatctgattttaacatgagggtacacagcggagagagagagggtcgtgacagtatacccattccttggtgagagagcaaaagcaaagtgacttaattgattatttattgattagaatgatttaatgagctttctaatcataagtaattttgtttttagattttatagatcatttctagattgcatctgtattttgagcaaaagttagttgtgctcaagatggttttgctgggtacaggttactatgaatgcctgtaggcctgcatttaaaaattaggaacccgtagcagttctacgcagaaaaagaaaaagttctgtgaaaacaaagcaggttccatttgttgagggattacgaatgttgcaaagggctgaggaaatccgtttaccgtgggtacagcaaagttgtttcccatcgttgagcacaccacgaaagaagactgattcaggttctaagacgctgggaaatgctctcttgtcctcagtcggtgtgttcttttaccttcagtttgttttgctgggatacatcatttcctctctccttgcgaagggctgtagccatcgtatcctcctttagaatatatttctttaagctctttagaaaacttcagtcatgaaatgcttaatgttctaaatctgaataaaaccattgtgaatgtagtccgtagctcccttgggactacagtttctaaagggaacaatttaacatattttctatgtcaatgggcacacagggtaaatgattttggaaagaaagcaataatgtttcctaggtctaacaggtcttgttctaaaacaaataaatacgagacgtcggctgaattcagggtcacactttttaattcagatgacctctcagtgtttaataaaatggcaggatagcatcatggttaaaatgatgggctttctaggaagactgacttcatttcaagcgtttatttgctgtgcgacttcaggcaaattacatgccttttcttagtctcagtttcctcactcgcacagtgactgttgtcaggaggattaaatgagcttatgtctgtgacaagagctaagcacacagcaagaacttaataataagtacagtcatgcctcggtgtccatgaggagggggggttgggcctatgaccccatggataccaaaatctgaggatgctcaagttcctagtataaaatgtcctccatatctgtgggttctgcatccttggactcagctaactgtggatcaaaaatatttggaaaaaaaggcgttcgtgctgaacacatatggactttttttcttgttgttattccctaaataacgtaacaactatttacatagttgtggttttttttttttttttgtgatggagtctcgctctgtcgcacaggctagactgcagtggtatgatctcaactcactgcaacctccgcctcccagcttcaagcaattctcctgcttcaccctcctgagtagctgggattacaggtgcgtgccaccacatccagctaatttttgcatttttagtagagttgggggtttcaccatgttggtcaggctggtctcgaactcctgaccttgtgatccaccccctccttggcctcccagagtgctgggattacaggtgtgagccactgtgccctgcctacaactatttacatagtatttacgttgtattatgtcttgtaagtaatctaaagatgatttaaaatatatgtaggatgtgggtaagttctatgcaaacaccacaccactttacatcaaaggtctggaccatccgtggatttcggtatcctggtggggggtggggcaagggggctcctggaaccagctccctaagacagcaagaaataactgtatttgcagtgaactcttgcacatcctcctgtatactttaaattaattctacatgtgcttataatacctcatacagtgtaaatgctctgtgagtagtcattatactgtatttttaaaatttctattattttttgcttaatcgttagttttgattatttttttccgcatagttttgatcgttggttggctggatatggagctcgcagagggctgagtgtaatatttcgttgttggccttggcattctctgctttattagccatctagtttgtggggtggggctgtcctttgcttctcaggcaatacacatctcaaaatatgccctgttgcattggccctttggttctacacagaactccacttttccactagctatatacattatttaatttctttgtgcttctgtttccctagctggaaaaagcaaatcatagtagcactacatcattgccttgctgggaggattaactaaagtaatggttgccttattgctcagtcctcaataaatgttcactctgtgttttgtgttccagaggctgtttcctctgcctggaacacacctccccttcctccttcctgaagactccttccttgtcatcttctctgttgtgtttgtcagggttctcccaagcagagtggaacggtgcctcctctgtgtctcaatacaattttgtacatactaatattactgcagttagcatgtgttagaaccagttggctttttgcttgatgctgtgctatcctaagttgttacaacaaggctccatggtagcaaacttacatttaagagtaagtagaggctgggtgcagtggctcacacctgtaatcctagcactttgggaagctgaggtgggcagatcacctgaggccaggagttcaagaccagcctggccaacatggtgaaaccctgtctctactaaaaatacaaaaagttagctggtcgtggtggctcacgcctgtaatcccagctagtcaggaggctgaggcaggtaaaccacttgaacctggcaggtggaggttgcagtgagccgagatcatgacattgcactccagcctgggcaacaagagcaaaactccatctcaaaaaaaaaaaaaaaaaaaaaaaaaacacgaaaaagagtaagtagagatgtttgacaagtatgtggaggcttatttcctttcaaaaagaagaagccaatagagaatcaatttttaggttgcgcatttattatttgtccttaaactgatacatagcatcttaaaattggcaggtggaatgttttccagtagctccatatttctattagtcaattcaacacctagtttggggaataatcaccaggcagggatccaggtgctcttggggctctttctctaatatgcagcctttggacaagctgttaacttgttaatgccttatccttttttttttttttttttttttgagacagagtttaggctggagtgcagtggcgcgatcttggctcactgcaacctctgcctcccgggttcaagcgattctcctgcctcagcctaccaagtagctgggattacaggcacccaccaccacacctggctaatttttgtacttttagtagagatgggctttcagcatgttagtcaggctggtctcaaactcgtgacctcaggtgattcacccgcctcagcctcccaaagtgctgggattacaggcgtgagccactgtgccgggctgccttattcttaaaatcgcaataatgagacctcacttaccaggttgctattatgattaagtgagagaacatgtgaagtattgtctctgatacttagagggtgctcggcaaatcttagatctttctttctcttggctgtaatctatccattgctgaaacaaggatgctaattcctggagactataagaaaaataataagtgatatccactaagcagaggtccacacagtagtggcattaatagttttcatattttttttttagtcttctcatggagaaattgaagctattggtataataggtggggaaagcagtgttcacaaccactaatcaaacgaagattaggcactaaatgaagaggaagaaacaataagagaggagatctcagaaatgatctcaagttgtaaacactcaggagccaaattacaaaacaaatacacaggctaattttaaatcaatcactgtattaattctttaaacatggaaattcaaaggtagcattttttctctttttgtctttgattttaagaaactgcccttaaaatagtaatagtttggatgtgtaatttgctgtactttcttaatttaggccaggcgtggtggctcatgcctgtaatcccagcacttagggaggccgaggtgggcggattacaaggtcaggagttcgagaccagcctggccaacatgatgaaaccccatctctactaaaaatacaaaaattagctgggcgtggtggcaggtgcctgtaatcccagctactcaggaggctgaggcaggagaatcgcttgaacccgggagatgtaggttgcagtgagcccagatcgtgccattgtactccagcctgggcgacagggcgagactccgtatcaaaatcaaacaaacaaacaaaaactttcttaatttaaataccaatacactttagatttttgcaagatatttttatatttttagatcatatttttttgagtgcttgttgtttcaggctggtggtcttatccgtttagacatttagccaagtcatgcttcccatttttctgctttgatgtgtggatgctccattctctcggcatttgtatccctcctctagcaatgtcacctcttccccacttttctcacaatgtccccctgaggtttgagggttcctactgacagttaacaccatgaattaaaagtcataaagttttcattttaggcatgttcttctcactattgtacagcatttttattgatttgctaactgcattggattaatctgctaactgcattacactcttattaaattacattgctattccagagaagggacagctaaagctgaaatcctttagtttttatttctcttggtagattaagacactttggtcattcattcattgattcatatattcagcacatgttcacagacgcttattgtgtgcctgggtgtggtctaggtgtgggggattatccaaggatatcgggtagtgagcaaagttgaaatggtctccgccttcatggacctacagattagtgggagagagagagagagacagactcagactcaaacatgaaggaaataaaacaggctgctaggaggttcagaagaaggggacctggcctgggcaggatgctcctggggcagggagtgtgaaggccaagggcagcagaaagtaatggggagccagtgtggctggagctcctgggcagatcaggagagacaggatggaaagaagagacagtgccccaggaagccactggaaggcttaatgggggaagtggcatgggcaggccgagtttgtcaaagatcactgtaccgaggggctggaatgacatggagcaggatggttgggcatgcaatagcgcatgaggccggggagccacagaactcacagcctgctggggactccagacaaggaaaagagcagcctcgctgcagccagagaacagcttgcagagagcctgcagggggctgatttcaggagctcacagttttgtgggaacgcaggctggtaggagggagcagctgccaagagatggagttagggatgttcactggggtcagagcagaaagcccccacaacccacgtcatgaagtccctagtttgtttaagaaggacagtagtgcggccgggcgcggtggctcacgcctgtaatcccagcactttgggaggccgaggcgggcggatcacgaggtcaggagatcgagaccatcctggctaacacggtgaaaccccgtctctactaaaaatacaaaaaaattagccgggcgtggtggcgggcgcctgtagtcccagctactcgggaggctgaggcaggagaatgggtgaacccgggaggtggagcttgcagtgagccgagatcgcgccactgcactccagcctgggcgacagagcgagactccgtctcaaaaaaaaagaaaaaaaaaaaaaagacagtagtgcaaaggctttgctcagcagtgacaggatcaccttgaggcactttaggagctcattcttcctgcagtgtggagaaaggatttgggatgacagaggtgggaagaggagcaagactagagagaggaagggaagtccatgttgctgcctgttcatagatattttcatccatgatttagaggacgacagtctctctctctctttttttttttttttttttttttgggacggagcttcgttcttgttgcccaggctggagtgcagtggcgcgatctcagctcactgaaacctccacctcccgggtacaagcgattctcccgcctcagtctctcaagcagctgggattacaggcgtgagccgctgcgctcggcaaggaagacagtctcttatccagttttctaaaagtaggtgagtggtcgggtgcggtggctcacgcctgtaatcccagcactttgggaagccaaggcaggcagatcacaaggtcaggagttcgagaccagcctgggcaacatggtgaaacccccgtctctactcaaaaaatacaaaaaaattagctgggcgtggtggtgcatgcctgtagttccagctactcaggaggctgaggcaggagaatctcttgaacccaggagacagaaggttgcagtgagccgagatagcaccactgcactctggcctgggtgacagagcaagactctgtctctaaataaataaataaaaagtgggtgagcgactctcttcactctccgatgctctctccctctagccttttgtagtttccccacattaaagtggttttgtttgcggtgagataaacaacaccggacttccacactctctttcttggaaaacttcggcacagaaagaatgtatttgtgagttttctcaaaaggcaagagaagcaagtgaatataaaatgatcccagtcatgcatatttcaaaacagggaaactgctgcagaacccacatgctactttttttatggtgttggtttgttctgcgtactttgaaaaccgtaacacatctcatttcacaaattatccaggattcatatactattcttctaaagaaaaaagaaaagaatccatcactgattttacttttgttctaaaaatgttattgaaaccttttcttcattctgaattatttgaactcaactatgtgattcttgtcggaagtatatacagatctcacaaatatatttagattcctttccacaagagtagtttagttaggggagtttcctattaaataatattttcattgtaaacatttgagactttaaaaattgtccaaataattgggggtaaatcaaaaaggaatttgaaaagctatgaaatagaaagaacagaataaaaatttctccatcttgacagccttaaaatcagtggcagtgactgccagaatgtgattgtggagcaccaattttgtgatacttgggcctcttgagtaaaaaaagaggtgcatgtcacattagtttgggaaatgctgaattaaacaaagttgcaccattttctttactgtaggactccttagggtcctacatatgctcatgagtggtgactataccaacgcaggtataaagtgtggtgtttccccatggaatactatgcagccataaaaaaggatgagttcatgtcctttggagggacatggatgaagctggaaaccatctttctcagcaaactaacacaagaacagaaaaccaaacaccacatgttctcactcataagtgggagctgaacaatgagaacacatggacacagggaggggagcatcacacactggggcctgtcagagggtgggaggctgggggagggatagcattaggagaaatacctaatgtagatgatggattgatgggtgcagcaaaccaccgtggcacatgtatacctatgtaacaaacctgcatgttctgcacatgtaccccagaacttaaagtataattttaaaaaaaaaagtgtggtgtttcccagatggattttaccacaaaactttttttttaaagaagtgtattctgggactagtgttttatgggatttccttgggaaaggcagatttttcacacaggggtggtatatgggtcatgaaggcaagggtggtattgggagcatacctcctagccccacacctggttgcccctttaccactttgcattgtcattcattgccaccttcccctcccactagaggtcctggaggcaggggtgccccttgttcctgttgtacccagtggcaagactggggcccattcatagtaggtagcacttaacttgcttgagcattttttctgtgccacacactatttatgaggtatacatgattattatccctgattttttttgagactgagtctggcttaatcgcccagcctggagtgcagtggcaggatctgggctcactgcaacctccgcctcccgagttcaaacaattctcctgcctcagcctcccgagtagctgggattacaggcgtgcaccaccatgcccagctaatttttgtctttttagtagagacgggatttcaccatgttgcccaggctggtcttgaactcctgacctcaagtgatccacctgcctcagcctcccaaagtgctgggattatgggcatgagccaccacactcgaccttacacccattttatagacattaggaggttcaaaacttgcccagagtcctacagctggtgtgtgagggagccggaaagtggttctgaatagatgtatgcgacatgagtgagtgaaatttgctttactcttgcagagctaagactgtgggcctctaattctcattgaaggtggtttcatgtgacaacaccccttccgtcgtcattcgggtaaatttctttagtccttgataaaaactaatttttgtaattaatgcttctttaaaaataacatgaaaaaagaaactaaaagaacatccactgcaccgtggagcacttcttgtcacgttgcagggcccgtgggaggaactcaaaaaggtctcactggcggattgatttctgccctaccaagcctgtgctattcattagggtttttttgttttttgtttttgtttttgtttttttgagatggagtctcactctgtcacccaggctggagtgcagtggcatgatcttggctcgctgcaacctccgcttcccaggttcaagcgattctcttgcctcggactcctgagtagctgggattacaggcgcccaccaccatacctggctaattttttgtatttttagtagagacggggtttcaccatgttggccaggctagtctcgaactcctgacctagtgatccaccctcctcggcctcccaaagtgctgggattacaggcttgagccaccacgccaagcccgcttttgtttttataattaatttttacttttacaaaggtaattatttacataatttaagaagtcaaaaatgcacacacacatcacacacactactgtctagcataatgaaaaataacaattgcctgatcgcttccccaccaatatttatttatttatttatgtatttagagacagagtctcactgtgttgcccaggccgcagtgcagtggtgcgatctcggctcagtgcaacctctgcctgcctggttcaagtgattctcctgcctcagcctcccaagtagctgggattacaggcgtgcaccaccacacccagctgatttttgtatttttagtagagacggagtttcaccatgttggccagactggcctcccaaagtgctgggattacaggcttgaactaccacgcccggccccccaaccaatcctggattctcattctcagaggtaatctcttcagactcctctagttgtttccttggcatgtatctaatttctaaatgtgcttgtaatgctttatcttggtttattactttggattttatcttttctcttcctggtagcctaagggaaatttagcttccttatgtactcacctcacctccctttatcttccgcatgtacaagaacttacagataaatcaataatcagtattggtattaatgatgactacataacttttattctttgaagggccaagtattgtgctatgaatacacttactttccttacacagccattcgttttgtctgcagttaatgattgcctttttaaaaaattgcatagattttaaaaaatagcctttaactttttccccagtgctcatcagaagtgccagattcccaccagaatttttttccccaagtactctagtatctcaggcaatctaggtattcctccctgttcttggagacttagctttgagagcgccctgtcctcctcctctgatcgggactagtagcttttaaggctggctaacagctgatatctgggagttttcttttcaccattcctgtgttggatcctctgtcttctaggccccatgtcttcctgttcctggatttatttcccgattttgctgggccacatctctagtagcttcctgggaatattaattttgggagtttgggagaggattgttctgttctgtgccttgcatccgcttctttaaagtttttttttttctagtttttgctttgttttgatctctggaggcactaaagtgttgcttggaagttctgtgggaggtgggcttatccctcgtgggcctgcctgcagagcgatctgtagaggataatggttgggcttttctcttgcgccagtttccctggaagagtctaccaggctccagagtgtgacagcagtccagagggagagtaaggcatatgatttttcacataaccctatttcattcagtaactgatttctcctttcagctatgcttggtatccctaagttaacaacctgtgggttaacctctccagtatataaaattgctgccgtctgcctaggttgagaggtaactgtattagatgaaggaataggactgagtgtctaaatgctccttagaaagttttgcaaacaatagttctgctttcagtcctgttttacacctcgccgttaacaatacctgaatttgagagactttgcagccttctttcctcccaccagcttttaatttatttcttgtgacagaaaagttacaaagtacatgaaaggaacactagtctgctattcacctagatttactaattgttaacattttgctgcatttgttctatctatctatctatctatctatctatctatctatctatctatcacctatctgtcgatctatcattctatcattcatctatctatctatctatctatctatctatctatctatctatctctagtatctattttctgtacatttgagagtagttgcaagcatcatggcactaatgttttagagctgcatttcctaaatgtttcagaggtacatttcccaagagcaaggacattctcttacacataataagactagaattactgaattcagaaagttgatcattgatatgatactatttctagtgtgcagttaacattcacgttttttctgttgtcccaataatatcgtctataactgttttttaaaattcttatatttaaattccaaactctaaggatcacatgttatattgacttgcatttcttcagcttcttttaatgtcagagttttccaacctccttttgcattttatgaaactgattttttcgagcattacaggccaattgttttgcagaatattcctcagtttgaagtccaattatttctccatggttagatttagattaagcatttttttgcaagaatactgtgtaagttgtgtggtgttctggacacaggaaggggaacatcacacagtgttgtggggtgggggtggggggagggatagcattaggagatatacctaatgtaaatgatgagttaatgggtgcagcacaccaacatggcacatgtatacatatgtaacaaacctgcatgttgtacacatgtaccctaaaacttaaagtataataataataataataataataataataataataaaagaaaaaacactgggaggcacgtggtggctttttgtctcattgatgatactaagtttgatcatttggttatggtggtggcagcctgatttctccattgtctttttctttttgtaattaaaaataatctgttgatattttgaggctgtatgaatagcttgttttccaacagcctttgaccctgtggttttatcatgcatcagtaattcttgctttaatcacttgttgcaatggtggttacaaatgtgatattcgaattcgatagtttcttctaaagttatgaattgatgttcatttgttgaacgaaaataagcactgtcctttctaagcactctataattttttgtttgtttttgtgccataatggactcatggatttctttttattcagtgggttatagtcttttgcaggcatggtattctatgctgaactggttcccgatttgaccacagaaatcctttcaatcttgtccccgtgtcttttgaggtgtcctcatcagtttttgagccttttctgacactaaatgatgttccatgttcacctatgtttttcctgccttggacctatttgtgatgatcaattatttctctaaggcaccgtggtttccttcagggcggatggtagaatggtatttagaacccaatatcgtgaataaggcaccctggtttctttcaggggggatgataaaatggtatttagaacccaagagagtgaataaggcaccctggtttctttcaggggggatggtagaatggtatttagaacccactatcgtgaatgaggcaccctggtttctttcaggggggatggtagaatggtatttagaacccaagatcgtgaatgaggcaccctggtttctttcaggggggatggtagaatggtatttacaacccaagatcgtgaataaggcaccctggtttctttcaggggggatggtagaatagtatttagaacccaagatcatgaataaggcaccctggtttctttcagggggaatggtagaatggtatttacaacccaagatcgtgaatgctatgggagctctttgtactggggtggcgttgcctcctgagcttttcagtggacggagctaggagaaatatacatataaaatcaggagttcatagagatatcactgggctctttgtctcctctcatgattaattttctcagtcacaccatatataccatatatataaaataccatatatataaaatagtaattttagaattactatacccataccaccctctgtggttggcttttcctcttgtatatatatttatactttcttcactcctgtaattcagctacttctcatccatctgcttttccaacttccaaaattatttcatgacttatctgctttcatcttccctctcattctcttctccttttctattccacctactgtcattttggtgagagttggggagacactgtttgcagtctgccatgtttaactgaaaagcccatcttagatcttccgtctgttggttacttgaagtaagaagacagagaataagcagtatttacctttaacaccccaagtagctctgctcatgatgtctgcctcggtgtcccgggcccgcactcctccagtatccctcactggcaattagaactctgtacggcttccttgaagtttctcttcctaactctctcagtgggtgggactccttttcagtgatattgacggtagacctgaaaattcagggatgtgggcagttctggagagaataggccaggctctctgtggatacatttgcactgtgcttgaggactgaatgctacaaatcagacagtcctggattatttcagactgaaaaaaattaggagactaacctgggaagaggcagaaggcacgccagctctctcagcatgtttttgatgtctcggtgttctcatttcattgaaattagtgcagacctctcccctcagctgtaacacttggattttctaagccactttgatgtctcctatctctgcttatttacaatgaacatagcttcgaattttcattttctttctactctgttaaatgtgttatgtggaaatctgaaatctgaagacaaatttttaccttagaattctaagaatgcctttggtatcaacgccagttaggaaggtctaactcagggcggaagggggggttttcaaaaaggtgatattcgtgaggcagccatcgccttcgaaacactttgagaggtttaatttatttctcatgctttggtaaacaaaagctggcattttctttccatggtttttccactgcaaggctgccgttcctccccttcccccgcagtggtgcattttggtgatcaaatctaaaacatgtgtcaggtttgcgggcatgctttttaccaggaacctcctttaatacttgccatattggcagttttcacaagatcttctcgctgtgctttatttatttatttatttactctgcttgcattgtggaattatgggtagagctgttttacatcagaatcatgttaaataaaaatattgaaagaacattttgaccaagaataatgtgaatatttcaacataaatatctatgctgaattggcttctagatttcagaacaggaagaacatcttcagtgatgttcatgatttggatttgctttgctgcggagtaggtttagcgacaaattccatctggctggagctacatgcagtctctctattgattggttatattgggacttcatgggagtgtccttcaatttgcttttcccagcatttttaaaagctccattggaaaaaaaaatagagactagaaaagaaaaaaggaacctgcattgtttcagtttgcatccaacatgcaaaacatagttctaaatttttaattagctaagtgagtggtgaaaaggaaaagtaatataacaagcctccgtgagcagctgggatgtgttgtcatgacgacaagttcagcaggctgccagcaagcatgtcaatgggtaatattgggagagcgctttgaaacagtgcctgctagccacaatgtgattggtcacgcctctgttgtctttgtgtgaaccggtgcatgctgggtaagacctagagtgaatgctcagcttgtctcaaggctgcaatgaggtaatgcttctgaatctttggggatcatgagctcctgcctccaaaagactgcagtctagagtgttttcattccgatttgcgttaattaccgactgtaacatgttaggaagttttacagctgcctttattcaatcttttatatgtgcatgtgtatattatagataacttaacacgtgtgtatgctgcatagagaatctcaagcgtattctaaaaaaagagataaccctccatattagtcattctgctcagagtcaacatttcatttgattgctggcatcagtgacaatatctattggtggataaatgatacattaaagtgcatttacattgggtaagcaaacttgttcatttctagaggatattttggcattgattactttttaaagccttttatctataatgagtcgtaagggccataaagggggatgtaaagagtgtcggatttgcttggtcaggaggtttagttcatttttagattccttgaaattggctggtttatatcctaatattgatattatagtctttcattaattgaccataatatctgattgctccaaaactatctgctgaataatgctctgacagtttcaacttaaagctgtaaagggaagctgtgtttacagacgcaaagatctggaaatgtttatggtggtttgtgaaacaaatacatcaaggtgctgatgtgacagagacacatgagctacacccctcagccctacccctggttctctgtgacacagcgacttggatgctctccagggttttgtcggttggttagagaatgttttatcacattcataaatagtaacccaatgccctggaaaggttaaggcagtgtctccaactaaggtatgtgtcgctaggggggacacataccatagttgagttgggctatctggttcatcgtgtcacaaatgggaagcatgtgagcaagcttttggacagagctcaccgagctgtcatattgccaccccaatgtatttacccctcaaacagttcataaaaatttataagcctttaaaagcataaacaaagaataaaaacacatcgaacgacaagtgatggttgctgctgctgctgctgctgctgctgctgcatagaacggtggactctgccagccaccttgctttatgtgaggtcaggccaccggcatgtgaggaagctggatgatcgtcagcccagctacctccgttcaccaaatacaaggccagctagcaagaatctgtagccagctttgcagcgcttcacccttgctttattcttttatatattcattttttaatgttttagattcagcggtacaagtgcagtacccctaaatcttattgtgttacatgcgtatcttccacagtggtgacgtctgggcttttagtgtgcccatcacccagatagtgtacactgtacccagtaggtagtattcttggcttatttctacccctctatatggtttccgtttatatggctttgtaaagaaagactttaccaaagatacataaatgtgatagcatagctaggtttttaaataattggttcaaaatatttgtagcacaaaaaggatcttgggttgtgacttttaccaagatgttgattctatctcctggcacaaatgccaaagccagacagcttgtgctgagaccacagttggagaggcctttgaagtgggctggagtcctttgtctaaaacaaagcagggtgcggtgaccccatgaagagaaatccacctgttgatgagacaggcactttttctctataaacatttgattgttctgttaccttcatttctctggcagatgggttaattgtgtagtttcaaatttcaaacatgcttttctaattaaacaatttttaggttcattaatgactcagtttgcataagattggatcctctgtagtgcagttccattgttataagcaggatttgttatctttgttgactcgcaggctgtaaagattcccttactttaaaatgtagaaatcacatttcttaatcgtcataggaagacaactttattttgtgtaactatatagtaatcgtttttcttaagtggcaaaattctaatcttttatatttaggtgatttagtatgtctctgtggtcagattatgatatggcaaaatcttcattattaagtcattttaaagcatctaacaaatgcaaaattaatacgttaaagattaagtagaagtgaaaggtaaagtgatgttctgtttaatttactatttcatgagctttttactattttgaaagcccccttgaagaggagcaatggcaagttcaaactagcgtgaatcattatatcctgtgacaggttccacaataaatgacttgtgattgatgtgaagcctgatgcttagagattaatggcagatgcagtattgtagtgtttttctttcatcactaatattatccagtgaagctagtagcttagcaaaagactttgctcagaaataattgggattggtaatactgatggtctgtgaagttttaaaaaatatgaccctttagggaagtctagagaaaaacagtgtgcttttagataatttggtgggttcaagaaatttaaaaatacttttctttagaaattcactgtttacaaacaaatatcaagctcactacatttataaaaggggggttattaagcagtagaagcaaaagttcttttgaagataggcaaactttaggagaagaataaaatcagggtctctggaaggtagaatatcaagagtattaaggcttcaaaatcagacaaaatcttaattcttctacactcattggggtaacttttgatcacttactctctctacattgatccttctcccacactcaccagtcacaaaagtcagtgtcccccaggtgtagatgagtgggatggaccagtggatacacctggctctttactgatcaggtggttctgtcacatggaaatatgaggagacagtatttgttacccccaactaagaaacatgtggtctctattcttatgggttttattatgacgtcaaaaagtcatatttgtataatacttaacttcattaataaagtgccattaaaataatttttaaatgacacaaattataataggaaacaacatgttgaatgttgcttttatctatttaaaaatgttatattttttttctttttttcttttttttttgagacggagtcttgcactgtcacccaggctggagtgcaatggtgtgatctctgctcactgtaaactctgcctcctgggttcaaacgattctcatgcctcagcctcctgagtagctgggattataggtgcccgccaccacacccggctaatttttgtattttagtagagacggggtttcaccatgttggccaggctggtttcgaactcctgacctcaggtgatccgcctgcctcggcctcccaaagtgctgggattacaggcgtgagccaccacacccggcctaaaaatgttgtattatttctaatatgacaaaaatgcaaccttactggctttctttttttttttttttgagacggagtctcgctctgtcacccaggctggagtgcagtggcatgatctcggctcactgcaagctccgcctcccgggttcatgccattctcctgcctcagcctccctagtagctgggactacaggcgcccaccaccacgcccggcttattttttgtatttttagtagagacggggtttcactgtgttagccaggatggtctcgatctcctgacctcgtcatctgccttcctcggcctcccaaagtgctgggattacaggcgtgagccaccgcgcccagctttctttacaaagctgaatgttgataattgaaatagagactagtctgaaatgtacttctgttccacttgtgtaaaaagggtttcctaaatgaattaatggcacaagggagatgatctgcttcagagaataaactttgcaagtcacttcagttcttccgatggggtgctgattaatattcaaatgttatgttgagaaaggactgattttcagatctttgtgacctagaatcacttcccctatggtgcattttacacattgtgtggttgtagtatgtcaaatccttttttatttggagctcatgttatttagattgagtctatggtgaggttgtatgtaatgcatgatgccaacagcgctgggagagaaatgctgtctttatctcagtacctgtttatcttgagttgaaagtttgttacttgtaggtggattgtactctgtactgtgcttttgtcttccttttgtccccagaccagagctaagtataaaacaggtgtaaaaaattggtgagtcgtttttgttttgttttgctttttgagacagagtgttgctccgtcgcacccagcagtggtgcagtctcggctcactgcaacccccgcctcccaggttcaagcgattctcccacctcaggctcccaagtagctgggattacaggtgcatgccaccatgcccagctgattttttgtatttttagtagagatggggtttcaccatattggccaggctggtctcaaactcccgaccctaggtgattcacccgccttggcctcccaaaatgctgggattacaggcatgagccactgtgcccagccaaattggtgagtttttacattgaaacgttatgaaaaattacccttgacctcagaaacaggaaatggaagggttttatgaaatcttagacatgttatctgttgaattttcttatcacgaaacagtgctgctcatatttacccatttcctctttcaatcagcataaaaatcttatagtcttgaaatctgaaatttgaattaaaaagatattgtggttgaatttaaatcaaagcagttatgccgtgtttatgaatcttttagccactcatggcaccagcatgtccgttttcttggtgacaaggcatgtggaatggtgacaagtgtgtaggttcaggatattagaacgacatttgaatcctggaggtaccatttccttgctgggagacttagaacaaattagctttaatcctttaaatgaggattacacccacatcacaggttatattaattgtgaacctatatgaagtgtctgacatagagtactggccgtgcagaaggtgtgcaataaatgttagcattctttatctcctgcttgcatttaattgctaaaatgaccaaattctgttcactttaatgggatatctttcctgaagggataagataaaattgtttgttcttcaactctgataagttattctagaagaatatctttctgataccattagacagttttatcatctgtccttatgtaatgtccttagttttatcagctcaaaaatagggatgcaattgatatcaacatattgagatcattaggggtttatcattggaaaaggggtaagagaggagctttagacgggaagctcattcgggcacttatgcttagggtgacagaggaaaccagtggcgggggttgtggggggcggtttccagtagtgcaggtgaaaacctaaagcaaaagaaaggaacggatttagagacatccagagagtgagtagagtggctctgttgactgtttcattatgagggaagggggtggttagggaagaagggacagcaggtgtctgtctcacattcatgtgtcatgtggctgccccagtggtggtgctacagtccaaaccaggagatacaagaaggggcaggatttatgggatagagtgaacattcagttttggacatgttgagtttgaggcactgggggtatctaggtggaatcatctgataggtaaagagagaggggggcagggagggagggagagggagagattgagaaagacaggtgggtcaggcaatcagagagagttttgggaccagggagggagttttgaccccttcagctctatatggccaagagtggttatgcctgagacggtgggtgggcctgcccctgtggggcacatagctggggaagagaggaggtgtgggtgaggatggagccttcgagagctctcttttagacgccagcagaggaaacagttataagaagaggaaactcagaccatagttatgaatttagaatctgcatttggttttaataatttacacacagtgagtttcccaaagagatggagaagtcaactgtttggaaccaaaaagccaaagctggaaagaaccacagtgccctgagtcagttctgcatttgatggacagatggacgggtctcttgagtccactgaatttccatttcatcacagtcaccctcccggcggcgcctcccccagaagccgttcccaggggtggtgatgactcaggctacgccacacattcaccttaaccttcatgagaccacaatgctgcagatggctgtgggaaatagaaggtactgaacactcaacaaggaggcgtgcaatttagagtagttttcactcatctttagcatgagtgcttaaatggttgtaattagaagggatgacctaggacctgtgcggaaagtgtgacttaatattttaagtatttttgggagctattaaaacaagaaaagtgttctttactttgtcaaattttgcttttttcttttccttgatagaactcgatcaatgtcttagctattatataatctgtcattaaaactgtgaccttgggcaagttacctaactctccctgatttcattcatgaaatggagataatagtatttgtttcataaggttcttatgagaacaaagtgacgtgacatgtagaaagcccctttgtacatattggcagtaaagtgtagttgttatgagtaggaggtgggaagggtaggcattagaagtgagaggggctgggcacggtggctcacgcctgtaatcccagcactttgggaggccgaggtgggcggatcacctgaggtcgggagttcaagaccagcccgaccaacacggagaaactccatctctactaaaaatacaaaattagccgggtgtggtggtgcatgcctgtaatcccagctactcgggaggctgagtgaggcaggagaattgcctgaacccgggaggcggaggttgcagtgagccgagattgtgccattgcactccagcctgggcaacaagagcgaaactccgtctcaagagaaaaaaaaaaaaaaagaagtgagaggaaagcggttaaagatgatggggtgtgcatatgagtgagaatgtttatcatcgagaaagtgagtggtgcaagaggaagaaaggggaacatgatggtgtttggtgtctttaaggaagagtgaaggaagggtaagaaggcacgggagcatacactggccacccatgggtggtgctcacacctggcagttggatgtttgggaccggagatgtacctaacttagataacttgttgtgtgctctacgctctagttgttttgttcgggtttcctgcaatcagacatagctggattgtaggatgtcatgaaaatggtgatagtaggaaggaaagtagttataatcctgtgttggattaaaaagatcatcaactttgggttatgaaaaatgtagtgccacgaaagtatgaaaatgttaaaacttagaaacataaaataacagtttatgaatgcaaagcttgggaaatgaattatgaaagtctactatgtttttaggagcataagacaaaatgaggaagacaaaacttaaggaaaacccatgaggggatccagctgaacaccggatcggtacacactaagaaaataactgaaactcatgtgagttcaaacgcaagtgttaatgctttttatcaagcaaaagatatcaggatgggtaacactttgcttcccaaactctgaacatcacaaagggagttggggaatggcctcaggatgtgtgttaggattatcaatccctgtgcccttttccctcccatctttctgaaatctaatccaagggttgtcacacttttggacttcacgttcaaagaacacttcaataaaatttgtgtggatcaccataggtcgccagcttttagttctggcaagcaagtgctttttaaaaaaatctgtcatctcttatcaccattactgcattaaaaaagaagacatttaacatgcacacatgcatatacctacacacacacacacacacacacacacacacacacacaaagaagagcataattaaagacaattttttgatcaagtaaagttatctttatgagaaattttctttgttgtcttatcttttcttcttttcattgtggactgttaaaataattgtccacacaagcacaaacacagacctacagaatctggccagaatttactaagtactggtccagctgttgtctacctgctcccaggtgaccagcccaggacagcttgggagacagaaatcctgccaccttcgctgctacaaacgcagggctgaaaagaccaaccctttttccggaccactttgtggcccaagccaagttatcaaaaggatctttgttgccaggggatgtttttttcttttctgagagtaggttgggttgcggcaggggggcggggggtgttgggtggcaggggtttggccgggggaggggagggtggatagaaaggatagaaggtaaatggtataacacaagagggaaattttaaagactttcaatgattaagtacatatgacttcctttttcttttttgccctggcactgcctgaaaagtacatatgactttaagctgtataggcgagaatattttagattctagtgtaaagtaataggatacggtatcacattgggagtgatgtctttcttcatcaattgtttgttcttaaaacaagccttttatgaggtgtggaactttaaagaggccagttttgctgttcctgtgagaattgacgcctttattgcaaaatatgaatgtggtagacatgtgggtttttgaaagttaacagaaaaatctactaatctgaatagatcattaagaatgtagtctgcttcatcagtgtacgtgttacatgaacagacattaagagcttgtgacggcagtgacttaccagcaaggatgggataaaagtaaaatgtggaaggaagaaaatgcagcatggttttttattatagaagagcttacagacaacttgtattgatagctttcgcaaatttagaattaatttatattaacagtttgatatttggaaacatttacttttaaaaattagcctgatttgtatttaaaattattttttaaaatacagcaacacggtttgctttgttgcccaagctgctcttgaactcccgggctcaagccaccctcccgcctcagcctcccaaagccctgagattataggtgtgagctaccataccccgctagatttctgcttattcataatctatgaactttgaacttaccattttcagggttgcagggttttttttttgagacgggatcttactgtgtcacccaagctggagtgcagtggtggcaatcatagctgactgcaaccttcaactcctgggctcaagtcatccctccacctcagcctcctgagtagctggggctccaggcacgcaccaccacgcctggctaatttttgaaagttttctgtagagatgggatctcactatattgctcaggctagccttgaattcctggactcaagagatcctctcacctcaatctcccaaagtgctgagattccaggcgtgagccaccacaccctgccatggttgcaggttttaggtgttaaatttacatatcttgtgttggggaaactattgatttaggaccacagatctgaacaaagtataaaggagctgatccatcagccattcattcctgtctcaatagagactgtgccgcagtgctcttggcccatgcatgaaaaaaacactttatactgtcttgctaggtttctcaatctcagtctataactacatgtacgtgtgtgtgtgtgtgtgtgtgtgtgtgtgtgtgtgtgtgtgtggggttccagctgaattttctgtcccgaggttgagttagaaatcagcttttgtttgctttacaatttctcgtggcttcagtcaaacagtggtgtcaaatgtggtatcattgacatctgtggtagccttcgttctctgaagtctatcagcaatatccatgctgataattcagtctaaatgattgcccagccacaagctggacagtgaacactgttttctcagttgggttgggtgctcctcagggagtcccactatgccaagcagatgaagcacagtttgccattcactgagaaggagcccctgggaccccattcggtggcccaggccacatcactgcccccgaccggacccttgcctagaactgttaagtgtcaggggaatcacacaggaggaagggcagccaccacatacacacaaggaggatgttcgggtggcccccgctctcagctagaggcatctccatggagcactttgggctgagccaccttcttctctgtccccactggttcccccaccaaagtgctgcagccagcagccagagattaaaatcctcatttgggtcgagtaagaaagtttatctattacccataaaccttttcttgcaaatctgctcatgctgcatatattgactttcacatttcactctctaattgagtagaattataagtatcccttgcctattcatcctgccaaatactcaagatttctgttcaacaggctgtcctattatcagtaaactgccctcgctatgacatactaatatatatgatatgaacattgccttcttggagctctttttagtataaccgttggggtcatatcccccagtgagaaggccattagaattttggggtcaggttatttgtacatggtagtgtaactgtcaagatgtaatatctgaggggtttttttggtggaactttttgtgttgagtatagaagccaatcatgttcatatagtagacaaacttgagtgatactcgtctaaggaccacaaataccaacagtttgaagtaaaagtaggaggactgaacattattgaggcaaagtctcaggccatacctgtttctcttctctgttgtaatgccctcagccagggctaaggtgagtttttgaaagcacccatcactattgtgtgtgtgacgtggataggagaggttcagaaaaggaaacaatgaactcaataattatatttgatgctaatgatctggtctgtgggtcatgtgggtgtctcctgtctcctgatccacctaacactgatgacaaagctcattagtacctctggccagagggtggacttgaggaaagagaggacagcactcatgtcaatcagtttggcttctcattagtaactccaaagaaaatagttggccaaagaggccagaaccacaaaaaggaagctaactttgagtcacccatatctgtccactattatcacagaggtgggaaaaggctaagtgtctggtatgtggtaagtggatgaagtgaaatgatattttttaaggctaaaataaaacttgtaaaaaatctcaatggcagcagtcctaaaataaaagtaagtctttataaaagaaaaacaaagtccaaagtgaacatatttgcttctcctgctaacagtgctatttcagacactaaaaagtagtgatggattcttcttccgagcaagagggagcgtgtagctgagaccatgggcagaatgcatggtgcagcaggcaccgtggggaaggagatcagaatttgaagttccactaaactgtatcacctggcatagactccgaggtagcccgaaatccagtaggtcacactggtgtggacagaaagatcttcaagggaagcccttgcttcctgacctgagaagcaggaaaagggagtgctgacttcatagtgagtggaagaagccaccgtcctcattctctcccttcccaacccatagccagtcctgcacagcggcgtagggctgggcagacatccaaaactgtgcgtgctgggggaggaggatttccttctttctgatgaagggaactgtggtcctaagagcatggggcgaattcccattgcttttcttccctccctctgtccttctgccacttgacaccacattgaaatgcagttgtgctagaagtatgtggctgagcaaggcaactaaacccagcgttctagcagaaggaccatgaaaaagggccctagggtactggaaggtactggggagatcacagagaggatcaagagagctattgcataaaatattgtatgaactcctggactcgcttctgagctgtgcatgtttggatctcattgtagcagcattacaaacgctttgagagctgaaatatgaactagatcatacaggtcccaggctgaccactgcatggtatacatgtaagacagatccaaatagcactgcaaaagctttctgcactgaagtgacattcagctgacaggaggtggtttggaaatcgcagcctgaacttaacaatgttgatcacgtgcttaaaaaaaaattcaacattgtccttaggatttaaagactcggactctcatgatataataatcaacattactaaaaattagccagcatatgaagaattaggataatctcaatttgtatgtgaaagaacaagtaacagttgcaaatactgaggtgtcacagatgttggaattatcaaagatttaaatcagttattctaatcatggccccagaagtgtgggaatagattatgtaatgcagaagtgagtggtaattttagaactgaaatatataataatcaaaaataaaaattcatgggtgggctcaacaacagaataaagataatagaaagagaagagacagtggacttgaagatagagcaatagaaatttttcaatctcaacaacagagaaaaagattgaaaaaaaaataagtaaacagagcttcaaggatgtgtgagaccataccaaaaatgtccaacatttgtgtaatcaaagttcctaaaagagtgtgatttgaagaaataatggttggcaactaaatttggtcaaagacgtaagcttttaaatttaagaagctgaacaaacctaaacaggctaaaatcaaagaaatgcatgccctgacacatcataaactgttgaaaactaaagagagaaaaatattgaaagcaaatagggaaaaatgctacataacatataatagagcaagttgaattactgcagatttaattggtatgtttagacataccaatgatacataacatataatagaacaagttgaatgactgaagattttctgttagaaaccacaaaggccaaagtaaagtggaacactatttttaaaataaccagggaacatattatttatatacgaaggtaaaaaaatgaaattctcaaataaaagaaagcaataattcactgccagaagacttgctctaaaagaaatgctgatagacagaaaattataccagaggaaaacttgaaacatcaagagaaaaagaaaagcaacagtagtaatacctgagtaaatataattattctcttaagttctttaaaatatgtataataggccgggcgctgtggctcatgcctctgatctcagcactttgggaggccgaggtgggtggatcacgaggtgaagagatcgagaccatcctggctaacatggggaaaccccatctctactaaaaatacaaaaattagctgggcgtggtggcgcatgcctgtagtcccagctactcaggaggctgaggcaggagaattgctttaacccaggaggcagaggttgcagtgagcagagattgtgccactgcgctccagcctggtgatagagcaaaactgtgtcaaaaaatatatacacgtataataatggaaatcaaatattctagcattggtagagtttcattgtatatagatgtaacacatatgagaattgtaagataaagagaagaggttaaaaggactaaaatgatggtaagatttaccacttgaagtagtaaaatattaattctaagtagactgtgaaaagttaagtatatatatttgaaatgtgtagagcaacagctaaagacaccatacaaaggaatacagtaaaaactcaatagataaacaaaaatagagcactgaaaatattcaaataattcaaataaaattaggaaaggaaaaacaggaacaaaatgagggaagaaacctaaaataaatcataaagggtagatttaaatttcaacgtataactaattatattaaatataaatgatctaaacatacaaattaaatgacagagattgtcataatggattttttttaaatgaccaaaggatatgctatctacaggtaatacattttaaatataatgaaatgaatgtgttaaaagtaaagtgatatacactaatcataaggaagctggaggggccatattaatatcagaaatagtagactgtagagcaagaaaaattaccagggataaagaagaacattacataaagaaaaatgggtaagttcaccatgatgacataacaagcataaaaaagtgtatgtacctaacaacaaagtttcaaagtacatgaaacagaatagaactgaaaggaaaaatggacaattatagttaggggcttcaacacagctcccccaataattgcaagaacaagtagatagaatagcggtaaggatatggaaaaactgaacaatgccatcagacttgctaattgacatttataaagtgttcctccctcaaatagcagaatatacattcctttaaaatcctcagggagcattcagaaaaatagatgacagccagagacataaaacaaacctaaaaatgattaaaagaattgaaataatcaaaagtagttatcttaccataatgagatttaactagaaatcaacaaaagaaagataattgataaatctctaaatactaggaaattaaacaacctacttctaagtgatctgtgaatcaaagtctcagagaaagcagaaaatattttgaagtgaacaaaattgaaaatgcaatatatcataattcatatgaagtagctaaatcagggcttagagggaaatatggaggattaaaccctcatattagaaaagaaaaaaagaactgcaatgagcaatctaagcttctacctaaagaaactagaaaaagaagagcaaaacaagtctaaagcaagcagaaagaaggaattttataaagataagagtagatatcaatgaatttgaaaacaatagtggagaaaaccaataaaattaaaaatctggttttttaagtatatcaagagctgataaacctctagccagattgacaaggaaatatgacataaattaccattgtaaggcatgaaagagggcatatcactatagtccccacaaaaatataataagcaaacaccatcaagagctctgtgcacataaattcaacaatatagatgaaatggaccaaatcctagaaagaagaggctgccaaaactcaccccaaaatatccctttatatctcaataaattcaatgtataattagatctttaccaaaaactcaaaaatcaaaacctaaaaaactacaggtttggatggtttcactggtagaattctctgccaaacatttgtggaagaaatgacatcaattctgtaagatctttttcaaaaaacaaaagaggaggcaacatttcccaactcgttttgtgaagccagcattatcctggttaccaaaccagacaaagttagtacagtaaaagaaaactgcagaccaatgtctcttaggaacatagatgcagaaatccttcacaaaatattagtacattgaattaggcaataataaaaataataacaagtcatgaccgagtggatttaggcttggaatataaggcagcatttgaaaatcagtcaatgtagggctgggcacagtggctcacagctgtaatcccagcactttgggaggccaaggcaggcagatcatgaagtcaagaaatcgagaacatcctggccaacatggtgaaaccttgtctctactaaaaaatacaaaaattagctgagcgtggtggcacatgcctgtagtcccagctacgcaggaggctgaggcaggagaattgttttaacccaggaggtggaggttgcagtgagccaagattgcgccactgcactccagcctgggcaacagagcgagactgcgtctcaaaaacaaacaaaaaaaaagaaaatcagtcaatgtaatctatcatattaacataccaaagaagaaaaaaaccacacaataatattaacagattcagaaaaagaagttgacaaaattcaacatacattcatgatgaaagctctcaacaatctatgtaggattaaaaggaaacttccttgacctgataaagaacgtccacaaaaatctgcagctatgatagctatagacactgcagactactagagggggagggagggagggaggagggcatggattaaaaattacctgtggggtactatgctcactacctggatgacaggatcactcataccccaaacctcagtggcatgcaatatacccatgtaacaaacttgtgcatataccccatatctaaaataaaagttgaagaaaaagaaacctgtagctaacatcatacttgatggtgaaagacctaataccctccctttaagactggaaacagggcaaggatgttcacgtttaccattcctgttgaacatgatactggagtttctatccattggaataaggtaagaaaaagaaatgaaaggcttacaagctgtaataaaactgcctgtttgcaaacaacttgattgaccatatagataatcccaagaaatttacagaaaaagttcctagaatggcattgccagttagatgcaagattgtatagccagtctggaaaatagttcagtagtttcttaaaatttatttttatttttatagatttagggatgtcagtgtagttgtattaaatggatatattgtgtagtggtaaagtctgggcttttagtgtaactgtcacccaaacagtgtacattgtacccaataggcagtataataggtagtataataggtagtatttgatccctcacttcccttctaccctcctactctgaaagactcctttcagagtctttaatgtctgttattccaccctgcaataactttttgagactggcttctttcactgagcctaatgttaaaatgtatccacgggattagaagtgtgtaaggcacaacatgaaggagttctttggggtgatagagcaattccatatctgattctgctcccacttataactgtactataaatacagtttttgccttactagtaatttcacttaggataagggcctccagttccacccatgttgctgcttttgcatgcaaaagcatgatttaattcttttttatggctgagtagcattccatttcgtgtgtgtgtgtgtgtgtatcacatttttagtccagttatctgttaatgaacacttaggttggttccatatctttcctcttgtgagtagtggtgcaataaacatacaagtgcaggtgtctttttggtaaaataatttcttttcctttgggtagacacccagtagtgggattgctggatcaaaggtagttctatatttagttctttgagaaatcaccatactattttccatagaggttgtactaatttacattcccacagacagtgtataagcatttccttttctccacatcctcacaacatctgttgatcagtgatgtttttcatatgtctgttggcctcttgcctgtttttttgaaaaatttctgttcacatcctttgtccactttttaatggggttacttgtttctttcttgttgagttatttgagttccttgtagattctggctattagccctccattggatgcatagtttgcaaatattttctcccattgtgtaggatgtctgtttaccctgttgattatttcttttgctgtgcaaatgctatttagtttagttaagtcccatttgtctttttttgtttttgttgcatttccttttgaggacttagtcataaattctttgctttgaccaatgtccagaagagtttttcctagattttcttctaggattttaatagtttcaggtcttacatttaaatctttaatccatcttgatttaatttttgtatatggagtgggataggagtccaattctattcttctacatattggctttccaatttttccagcagcattgattgaatagggtgtcctttccccgtgttttatatttttgtcaacgttgtcaaagattagttggttgtagttatgtggctttatttcttggttctctattctgttccattgatttatgtatgtattttggtactagtaccatactattttggttactatagccttgtagtatcatttgaagtcaggtgatgtgatgcctccagaaactaacaaagagtctgaatagccaaagcaatcctacttcagtagtttctgatgaagttatatgtatccttaccatatgatccagcaatcccattcctagtacttgcaacagcatggatacattttaacattaggctcagtggaagaagccagtctcaaaaagttacatgctatatgattccatttatatgacactctagaaatggcaaaatgataaggaaaaataacataccagtggtttccagggattcgaagtgtgtaaggcacaacatgaagcagttctttggggtgatagagcaattccatatctgattctatcctgagtgatggcaaggaggcaaatctacacatgtgttaaaacttacagaatctgtacatcaaaagaggcctcaattttgtatatgttaattttcaaaattatgttaaaaatatgagttttcttggcaaaagtgaatggtacccgattttattattctgttctcacattgctataaagaaatacctgagactgggtgatttataaagaaaagagatttaattggcttgtgactctgcaggctgtagaggaagcatggcaggatctggttctggtgagacctcagggaacttacagtcatggcagaaggcaaagagggagccagcattgttggatggccagagcaggagaaacaaaaaggtcggggggcgggctaggtgctacacactgttaaacaaccagatctcagaataactcactcactcactgtcacaagaacggtaccgaggagatggtgttaactcattcatgagaactccacccctatgctccagtcacctcccaccaggccccacctccaacactgggaattcattacaatttgacatgagatttgtgcagggacactgatccaaaccatatcactgatattcttgtgattgcctattgattaaccagatcagtactgtccagtataattttctgagatgatgaaaatgttctgtatctgctctgtccagcattgtaaatactagctacatgtagctattgagcacttgaaataatattttattattattttaaatgttattaggaactaacagtattagttcctaattttcagttaatttaaattaaataaaattaaatattagttcctcagaaagttccatacgacactatgacataaactttttctgccctaagttcttctaatcaatgtcctaagaagacaaggaaggaaaagatgaaagtaaaaggagaaaaactgagagcttatgattttttagttaaaaatccagattctaaatatattgttaggtcttatatttcaggtcttatgttagttcctcgggaactaatattttaggcccggtcatgccgagttcacctttgtgatgagaatgtttggccagtattattcctgaggaactaatattttaattttatttaatttagattaacttataattaaatagccacacatgcctagtagctactctatttgacagcacaaatatagataattgtataatcactgtgatcttagaaaacaaattatgttatttttattcattcagagagataaaagaaattatgactagtttttacttttttacatcaggattttatgacattttctagctttataaacaaaaatgcatgatccaacttccatgaggtgatatagggaggtgatactgaggatgaggctaatgtacattaaagatgttagtaggagagtagaagtttatggctgtgatacgaaaggtgtagaggagagcaaagcccaaataatgtttacttttaagccagcgaatattggattgtttttgcgtgctgaaaataactatactttcaccaggcgaacacaacagtccggatactgttgtcattcttgtcagtagggatagaggtggacattaggagtctgtccccggatacggaggtgtcgggaaagcagcccttggaaggtccctgcaaacctccctgaactgggtgttccattgtggtgtgccccttccaactggttcaactggggactgtgagaagtacaaattcagcctggtcatgctgagttcagctttgtgatgagaatgtttggccagtatttctttactttacactccgtctggacttagtttggagcgaattttttttccttcttattcatagttttttttttttagaagtatggtgatactttcttttcatgtatgtttacttttcattcctcagttaattggaagcaccttgaggtcagaggttgattctattgctatgtctgctttgtaaaaatatggcagtctttgccaccttcatatttttttcccaattccatcttgcagggaaggaatgcaacccacagagaggataactcagttctaattaaataagccagggacaaagtcactcagtttctcagctctttgaccttataactaattccagctaaaagagctctaggactcaatagcagtatatgtttaaagcaacagaaatactgatgatagttttgaaaactaattgggaaataccatttttagggcgtatttttagatgtagttgttgtttcccaaattgggggcatatttgtcccaagggattggggccatacactggcaggtttatacatcctcaagatgaatgtggatggtctccctaaagggtcagttcacttgtaaatttgggaaagtaatattgaatggtgttcattgtaaacaaagttttaaacttttgttattaggacaatcagggttctattacagagtagaatgcatagactgtatgaatttcagggcgtcttcacagtagaatctaattgtttttcctctgcatattgggggcttctgtgggcctccatcattattctctgcagtttaaatactagatacgagatagaaacgtctgagatacactcaggcatgttttaacccagtcggttggaaataaatagtctgtaaatccaaatgctgtgtaataaaattgtaatggagaagggcaacacttcgtttttctgtgctgtctcatcgttttcttattgtttaatgttaaaacaacaaatttagaatctggctttttaactgaaaaatcataagctcctcagtttttcctcgttttactttcatcttttccttacgtgtcttctttagatattgattagaacaacttagggcagaaaaatagtttataccacaatgtggtatggaaaaaattagatatctgcatacttcatttgtaattttttatccaaagtgcacctgcggctgggcgcagtggctgacgtctgtaatcgcagcactttgggaggccgaggcaggggaatcactcgaacccaggaggtagagagggtgcagtgagccaagattgcaccagtgcaccccagcctgggcaacagagtgagactctgtctcaaacaaaacaaaacaacaaaacgcaaagtgcatctggaaaagccttacagttgacttttctttcgatatattttacaaggtgttgtggagtaatggagggacacctgcactgagaatcaggggacctgagtgctagttctggttttgctagtaaatctttgcaacctgggcaagtcaccttcccactttgggctctaggattatatacgattaagtgatgatgtactagatgtttttctgtgtctcctccagctcttacctgcacttattcagtattcccaatcctatgagaattgacttttgagaatttaagtaacagaatagccatgttcttcacttcatgttcatagtgttgctctctaatacttgtaagaacaccaagtgtattttttaaaagtatttcgtttccttacatatacagtgcaaggaaatcttacccaatttaattgaaatggtttcttccaccacttagtcaatcctgggctataaaggccctaaaaatgtaggaactttctgttttccaaactgcttttgttgagtttttaatttgtgtctttttttaaaaaaatcaattttatgcaactaagaaagtataatctgttattggtgcccagggtttttgtttagagaatttctcctcttccctttatttctcagtttgtgctagtattctaccctgggcactactccaaatgtcaggctactgctatagcacagatagtcttttcgatagattctggggaggtagtgttaggtgcgttgtgaaactcatgcatttctgatagcattgcagtatttcatgttggaaatgttggatagtacttttgtgaaacagaaaagttatctcacgtctctctgcttctctctgttccctggttaagcactctttacattttgttcactctctcacagtaggcttttaccttgcctcagtaattatcttttcctttggatgcatcctataccctgttgcctgcataacctaaacattcagcatgaggaacatctcccctgtagaaacctttaatgccattctccaggtatttaatgttatctttatcccagcctgactgactctttggccttgttgctaccaatctccttcatagatccctccaacccagccatgctgaatctaccaccagccattctccaaaacatcttagactgtctaaccacatcgtctctgttcatactgccttgctgcctggaaagacactctcatcttgcctctccccacccctttactcgcccatcctgtgtggctgcctcagtgcctcttccttcctgaagcacctctcagttccctccatgcttccttgatggcgcttttctcatatcagaaataaccatctttctttgctctcctggtcctctttccctctttgccttgaatgacatagatgctgatgttgaacaatgaatataggagcggtactcattcatcgttactgtgacctcagccacatgctaggatctcacgtgctgtgttttataagtgtgttttgagtcgaaaggaggtttagtggaatattgtcacagactaggattgttttctccccgactggtgcagtcttgaaaaaggaagagaatcttgacaccgcagacttctgagttgtgataggagtccaagaagtccctgggggaagccgcgtctgaccatattgtcagcatcccttccctcctgggagttgccatgagcttataaatgtttttggagaatggaggtgtcaggcttctttgggaggagacttactaagggccatctagcaaatgctgagtgaaactcattgcaaatataaagtgggccattttcctatccattaaagactgttctttaaattttttttaattgattaatttttagagaaggatcttgctctctttcccaggctgaagtgcagtggtgcaatcatagctcactgcagccttgaactcctgccctcaagtgatattcctgcctcccaaagtgctgggattacaggcatgagccaccgtgcgccatgttctgaatctgaccttgggccacccctcttgccttctcttcctctacttcccagtaatgaaccctcagccccaggcaggcctgcctgccttatgatccccacctccctcccatccacacctccacaccttgtccatgcttcctccctgcaggtcagtcctctccttccttcagcatagatttagggtctgctgttggctagccactttcagggatatacctgtaaacacaaaacatgcaaaaagtatccctgctcatggagcttatgttatgacatatgggctgtgctttctcttttctttcacctgtccagattctagaacaagttggcctttccgtggaagccattgctgactgtttcgaccccggttcttttcttcaaaattcttgggggcactggttacctgttcctcccctttgaaatacactgccttgtatttttgcactttttatatgtgagtatcttacctcctcaagtacatttgaagcttcttgagggcagacaccatgtcatttgtccatgagagagtgtgcaccaaggtttgtatactccatatgtacacaaccttaaagattaaaatttaaattcctgaactgaccataggactttgcagttaggcacctgataaatatttttaattgatttaatggtatttattgctgtctgctttttcaagtggagcagctctaagagcatgcgagaccattagccatcaagcgtttattaagatcctccccgtgtccctatgtgacgctgctatttaatctgctgccaaggacgcaggcgagtgccaagcacagcctctgcccacacttcatcaactgagcaaatcacctctgcggtcctctgtgtgatgttcgtaaagctttactgtaacaccgaagctgttatccaaagatgtaagaggcacggggccaggaggaggactgctaatgatggctgcatgtgattcttgagctcatcttgccatcagacgccgagatttaaagcatcagcagaccgttcttgtctttgtttctcagtggaggccaatggtgtccattatgaaacccaccgtactctcggtagggcagcaagatgagcttgtggtggttttgcctgaccgtgtatattcttttccatggtccttcaataaaagtctactcaggggcagtcgttaggggtcatagaccccagcagaagcaacttctacgggagaccccacttgtgaccttgacctcattggtccatgtgccaagtaagcagattgtgttcaatctaaatttaaaaattgacatataggttttgacatttttttgtttacagtggcttttttattttaattatcaagaggtaacacgtgttgttgaaagaacagactttcaacagcaatggttgttgaagatgattcatgtaggaagtctgtagaacagcatacataaacgtgtaaaaggtaaaattgactttcagtggctgaaagaacagactcgagagccagctgccttgggttgaaatcccatctctgccgttcaccagctctgtgagcttcaggaagagagttcccctctttaagtggggctcacaccagtacttaactttcagagtccttgtgaagatgatgtgagtttctaagtacagacatactaggcccatatatagatgaaaacatgcatgcttggatattagaaattatgactacatttttatttgtacattctcatcccttcgagtatttggattttttttctttctccacatatttaacctttcatagatcatagaagaaacttgtgtctttaactgtcaggaggtggtacagtgacccagggcttcccagaaggctcttacactgccaggactacagatatgtctgtttagatatgaatttgtaatacatttgttatatgcttccatcattgcattcttaaggtgcgtgtgcttattaggcaccctgtctgaccttacagtgatcagaccacgcccgacaggaatgggctggattacatgggtttgggtggatttatatccaacaacacagccagacttaaagaggtttgatgaaaggcgagtggctttgtttggaggcgctggtgctgggccctaggctcagtctgtggcatgcatgagaagctagtggcttatcaacgaggagagaaaatcataccctagaagggaaaatcaagaccgtatttggttaagtatgtggagaaagaaaaaaaaaacaaatacttgaagaaaagggatgagaatgtataaataaaaatgtagtcataatttctaatatccaaacatgtatgttttcatctgtatatggcctattaggtccttatatgcttctgatcaagcatacaaggtaaaattgatgaggctgttaaaaagtgcatcagtagcagttggtgtggaacacattctcaagggggtcacagggtgacagatagtccaggacagggaggagacagtgccacggggaggactcagcaggaggatgccacgtcgtcagagggaaatggatacgccagaccagagcaaaggggggaccccaggagggcagaggatgtgaaaagcgttaggtggttgagggcatggaagacgttttatttaataacattcaaagcaagcatctcaatggatcagtagatgaatatatagtctgcatgcctgctgagtgtcccagactctaggcagctagagaagagctgatctgggcacagggacctggttagtgtttgtagctatcggatgggtgatggcgcagaagcgggttatacgttttgtagcctcccgaggacagaatggatgtcactgtgcaggggtgacaagagacgctgatttgaactcaactcacaggggggcctttgccagagcctgagctctgttgggggaggttctggaggacaggctgaatcaccggagtcaggagaggataggacgctttcaggattttagccgggagacccacgtggggacccctgtaactctgagtttcgggggcgccttatgaagagcttcagtgcatttcccatctttgctggcaccccacattttgtgcccctggtagctgagctgctgggttcatgaggatgtgggagaatttgctgcagaatcgtctgccacccacctctatgggtttctgagaatgagataatttttcggttatccggatcctgagcggaggcagcgagcggtgcctgttttggcgttattggatttgggagagttcggcagtaccactgccgtgagattcgtttccttggcctctctgactccatttttctcgggttttatgtggctgctctactccttccattgtgttctctctctcaactgccgcccccgtcttcctcctgagatgtttacgtgttgcttcttgcactctaaataaagactacatgttttctctgctggcataaattcctctgtgtgtgtgtgtgtgtcggtgtgtaaatgcatgtccgcaggtgtacacgtgagtgattcagcctggggttcacaatgagcgtggcacccgtagtgcaatgaaaaggacatttttatgcagatacgtgattcattttcaccttgctgatcttagccgtagacatttttaagaaacaggggaggaaccagccaccccccaaatcccatgaatcccacttctcggtgcgattggagttgtgttgtaagcgcaggagaggctcctgctgagagcgagctcctgacatagtgacctcattccccacgccgccctcctcgcagcggcagaagccgcactggctggtgctgggtgagctccaccgctgcccgggctgcgagcctgacggctgtgtgtcgggaatgacgagacccaggcttgcaaagacttgcacggcaactggaatttatgacaaatagctcactgcagctaaactttgatacagtgtacagtagaaccgcctgttacacacaggagggagacgcgtccttcgtcaccatgcaaagccagccttaacacaacataggaaaatgtggcaggtctctaattacggactggtgagtatatgacgccagatcaattttaatgtgtgtgttctctcttcaagcatctggaggtatgtgccctttttacctttttcatgattaaaaaaatatgagttggtgctaatgcatgggaggggacctgggccccttggagaggagagtgtgcccctcgccaccccgcgcctggggtacattctgacctcgcgtctccgcactgcacagacaaaggagcctgcacagacaaacagaggctgtagcttttcttggagcgatgactcatttcagttcacaaaggattctgggcagggcagtgagaagtcaggttggctgatccgtccctgtgacttcactttgcagagaacaagcagaagaggagtgacactgcagattccgaggcactgcagtgggatgttggctcagcaagtggctgtgatgtacgggataggcatggaacaggattccagctgttccatgcaaataggataaaagaatggtaaagaggattcctttttttttccctcctcaaaacgttaccagcaaagtacattcacagagcctttttaaggtgccttttgccagcttttgaactgaacttgtaccagtatctcaagccctgaattgtaagaagagctgagagttctggaactcatttttaaaaagtagatctacgaaggtaaagtaccagattcctcttgtgttccacgggccctcagtagccaatctgaaatgctcatttaggatactatgacttgaaactttactctttcttcttattccagattctaggacgtccgtttctgttactggctccttcttgtgcttggatgcagctccctagcatgcaccaggctttagcgtcagtgctacctgggggatggagccagtccagaaagggccaggtaggtttcccctgcttttatttcaacagttgttgtgtgcaaaggaatatggtgaaatgtcagcaccacccgtgaagagggtgcacggtcctctgagaagtcttgctgttccgctcctcccgcagcctcaatcttaggcagtccaggtcctcccactgtgggctgcccaccacacacgacctcaccagcccaggtcatcccagagctgctcacggggaccgagaagtccacagcagcaggatttgccaataggaaataatcagactgccccagatttccctcagctgtatatctatctcgctcgctgctctgagggaggcattcagtaaatagtatttgacattttttctggttttttttttttttttttttttttgtttgtttggtttggtttggttttttgagacagagttttgctcttgttgcccaggctggagtgcaatggtgtgatctcagctcactgcaacctccgcttcccgggttcaagcgattcttctgcctcagcctcttgagtagctgggattacaggcacgtgccaccacgcctggctaattttgtatttttagtagggacggggtttctccacattggttaggctggtcttgaacttctgacctctgttgacctgcctgccttggcctcccaaagtgctgggattacaggcgtgagccactgtgcccggcctcgacattttttcttaccaattaatatatagtgcccgaaattttgcatactgtttggcctgttaacctacatgcaatgcactaaaatccaagaaagcctgatttatgtgcccagggactgtttccaagactaacatcatattgaggctgctgttaactgctaaggaagtaagcatatttcatcatagtctgctttaggattcagattatgacagagctgttttcttacaacatccatgggcttttcacacgaaagctttttaaaaaaacatgacaacgaaatggtaaattttggtcctcaaaagtacattacatgcctcatttccaaagtgagacttggcacatctgaaagcatggctttaccccctcatcacatggatggtttcagcactgttacagatatttctgagagtgttgaatcccgtatgtaataggtaagaatttttagaacatgtttaaaggcagatgttcaagaccccttgaacatcttctttctcttcgcagtcacatccatctcatagctcaccctgtcacagaagaaaagagagcatgtttcctttctccactgtcagaggtctcttctttctgcatagcagtttgcatcttcagagcaacgttgaggatgctgagtcaggtttaaaggatgtttggtcagaaaaaacacaagcatggtatgttgcaaatacagttccatcatgtcctcacacccatcaattctacccatccttaaggacctattccaaatctctgtcccctggaaagttctccctaatcaccccaacaggaggtcatttctaaatccttgaaactcccattatagagttaagtttctattcattcatgtgttttcttgctatagctcttctaagggtgttttgaacagcaatgtgtatatttcatgatgctttatattttcacacatgtatatcttatattcccacctaaattgtaatctcattgaaggcagagatcaagatttatgcttttttctgctgtctacatctcctagcagttccctacacatggaaccctttcaataaatagttgaataggaagaggggcagtttaaaaagcaggatttttttttttttttttttttttttttttttttttttggtcatagagagttagaatgatctggttttgctaattttaagaatcttcacagggtatattcaggctaaggtggacctcaggagtcatgcatgccactctagaagttgtgatggttcttaccctgagacagtgtcacagccaggaagctgccttaccctgcttgtaaagaactgttgccgtaaaggacaaatgagcatgtggacattgatcacggtttacttgaattatattggacaagccatccttaagttatgaggagtatgccgaattcgggaagtttaggtgaaagtcacttttttgactcctacaggacattttccttagaagaaagagccagaatggttactaataattcggatcatatcagaaattatttaactcctggtgtcactgatttttaatactaagagtacttatttaagtcctgagtttcctttccctttcttaggtaatggattggcccaacctaagttttgaaataggtcaacatcctttgatatccttgtaattctctatccacactatttcccatctcctagtgcctttttctctccaaagtccctagtgtaatgcatgtttgcactcccagcctggtgatgcatcccaaatgctatgtgttctatatatctgattaaagtaatcttattaaactacttcatactagtataaggaagacctctgcactcttagccttcccaaagatattttagttttttaaaaaggcttatttttaggtacaaacaaattttccattggtagaaattcaaacactgtaaatgagtaaattggataaatctagatgggcttgaggaagaatttttttttttttttgacggagtctttccttgtttcccaggctggagtgcaatggcacggtcttggctcactgcaacctccgcctcctgggttcaagtgattctcccgcctcagccacccgagtagctgggattacaggcatctgccaccacgcctggctaattttttgtgtttttcgtagtgatggggtttctccatgttggccaggctggtcttgaactcctgacctgatccacccacctcgacctcccaaagtgctgggattacaagcatgagccaccgcgcccggccagggaagatatttttaatactagctactatttattaaacatgtattaggtctcagggacagggtaagcactcaacatccattatctcatttaatcccctcagtgagtctacaaggtaaacatcattatgtatacttcacaaaagaaaaaattgaaactcaaaaaattaaataatttgccccaaatcacacaaccagtgaggagcagaactgggctctgaacctaaagttttgactacaaagcccatggcttttaacaccatcttgtaatgctgaattgaagagagaaaagttacttaattgtacagcgacttagacgtttcctctgtgtatctgatctgatcccctatcctttctttcatgcctctgaattctgacatagtcctttcataatgacctccatggcagttggaaggggtagaagcgtgttcggttttaggggggttggttggtagcagtcaatcggtacaattttgttgtaatttgggaactgtcaacctgtccatatttgtagtttatttaattaggccttcctgtcctattacaattgtattttacagaaatcagtcccactacagttgtcatccctaaactgatgaagcagagaatacaaagactgagaaatagctctggtgattccaacttaaaaagagggaaagtgaatgtgtgacctagagttgttagatgatttattaagctgaagttgggaaatatcatcagtggaaactggagcatctaatgtctagtgttaggccaggttatgctgcagaatgaacatgaaggagaagtacagggtggcttaaaataggaatttatgttctttcttatgtgatgcacttaaggaaaaggaagacgtcatgttcctcaggtgctcttgttggtcaggtgctttacagaatttcaggacatctgggagatcttactaattgttatcatctaggactggtatttcatcataactttatccttgttggtaagtggctttaccttcattctggttgaaggactggagcacaagtggcagctggtgttggaaaacatcttgtaaggtagcagggccttgcctcttcttgtttatgtacgtaggaccttttgattctacaagcatttgaggacctgccgtgtgaaagcattcggctaggttttattccatgtgcctagcacgtaccaccctggacctagctgatgggttatagtgtggagccttagcaaaggcgttaattacgaaattaacctgattggtcccagggctcatattccatcctaccttttctgctatgcatctattgcaaatagctaaatggtccaacagaagtgttagttgttcctatcagagacgtcaggaatcacctctggcggtggggaaggtggctcttggccagggcgctctcacccacccctgcccacgaggatggcccctttctgcccgatgctctaccctttctgccttatctgtctctatttattctgtgataagcttttacctgtagtcaaatctcagtaacaagagcaatagctaatgtgactaacgaaaggttgcggactgggaggatcatgagcttcttctgtagaccaatgagccaattaattcgttacttcacatagtggcattagacagactggtcagcacaaaggcccgggtgacgtgggggatgttaactcattcttttgggtgcccttggccaccgtgttactctcgtttaactttattcccattagaagtttcttagtaagtaatagctaatggacaccagtatttcagtatgattaatgagtgtcttctgtttacgctctcttgattaaaatgatttactcaaataatagcttaggaattggacctgctttaagatacccattaagtgttgaagtaaagcattaggaaacatttttaaagttgttatagaatctctaaatattctaaaattccttttttatgctgtttccttcagttgactattgccatcgggctcagccttcaacttttgaaatcagtggcatttgaaacaaacctacagtaaactagtaaaagtgccttttcattgccagttttcttctgaatgtcaaatacaaacattcgaaagtcaagaatagtcatctggtttcaaaggaaagctgcttaaaacgcaggagcatgtgaggtaatgggagccgtctgctctgcccccaccagatgggtgctgtggtcttcaagagagcgcataggaaagaagtatgtgggtttttttagaacagctttttaaaaaatactgtagtaggccttctgttaaaagagccaaacagcattaatacataaaattggggttaataaattgaattaaattgtaaaacacaagatttgtctgaggcgctgcatccgagaagttgttcacttgactgtaaccccagaaagcgggtgatttccccaagcccaagggcatttaagataaaacttggcgaaagaatcgttttctgaagagtgtgcggagaggaatagagttgtgttgtccccatgcccatagtgcattttatagacatgtttgactatttttatgaggaatcacggtatctactacttgtggtaattttatggcatccgtgattttaacttgcgtgttaattttggcggtgcagagaacaaaaggggcacacattagtcctgaggaacaaagctgagcaagactttgaatttagaaagagaaaatgatgaagcctttattgtaagggaagaaaaaattattagccagtatatggagccatttctttgaaaattaaagcccaactttttcagttcagatgagtgttaaaatagtgtccccagcgtgatggaagcagagctagacacccgtgccatatgatgcttttatgccagaattctgctgcattcatataggatcacaggatttaggaggctgaaggaatctttgaaatcatttcatccaaactctcattttacagatgaggaaacgggcgcagagcggataattgtattttgttttaagagactgggtacttatcaaaatatctcttgaatgctttttttatattgggaatttctcaattataaactagtacagtttcagaaccacattcttaagtgggttgttttggtacaagaatttcattaatgtcaaagataactcttcaacccagagaatagattacattaacacttgcaatgaaaaacagtaccttaaaaggaaaacaggataattcatatggaatgttggtgcttgaaaaaaaaattatttaaagaaagctaagatagaggatggaggctggtactttccaggctgtttactgtgatgcagtttgcctggggaaattctggctttccttttcttacacagttgtatgaggatgggtactttaagatgaaatgacatagttttatgttggcttttgtagcaggtatcttttggaaagctacggatgtcacccaggaaggagcaggtgtaagctgttgtgaaagtcatatcccaggagcggtgctggtctcctgcgtgtgcacaggctgagaagttcctggaacctcaattaatgactgcaaaaagtgaaaatgccacttataaaggacagggctttattttagtcttttttttttttttttttttttttttttttttgcacaaatagaaccgagataagaacagttttggaacttgagtgcttaaaggtatttgatgtaaaataggcattcagatatttcttgaaaggatgaattatgtgagagagagttttttttaaaataactccaactaaagtaatgggccagaagttggaaggggaaaatagatagagggatttaaatagtgaaaatggatgcgcttgataaagctatttcctgaggtaggggtgactagctgtagacaatccaagagcaggttggcgtctgcaggacatctgcctgttgtccgttgtgcgagtgattttaggaatcaccagctctttctccagagttgcacaagagtgattttctcatgcaagcatatcatgtgatttgtctgtatgaaaacaggggcagtgcctcgtcaccgtcaagaataagatctaagccttcttgtcaaccaggatctggccccttttttctctgtatctcaccaccagcctgccccaggggagcctgaacctgccgcagctccccagtctcagctccccgggctgcctgggctcagcatgctgcacccccgtgctggctgggctgttccgcctctcctggagggggtccgtcttccatgcccctcatcatccacccggctactctttctcttcatgccagtcagccgacaatgacctcacatgaaagcagtgtccacattttcactcatgcattttaaatgttaaatactcttaaaacagaagtttacttacaattgtaatattttcatgtcttttcacattttaagctcgcttaaaaatctatggaatgcttcctctgtccaaggcactgagtttggttttatctgaaatagcctagatttgacaaaagtcctctgaggactgtacttaaatggatgtttgtaagaaaataaagctgaactaaaatctatctactccttttttagaacaataggacagaattatagcagtttagaaagaattttttagctgacaaagtgccaatgtgctttaagatgagttgtcgttatgaatgtgttctgaactaattctgacgatggaaaaatccatcctataaattatagacaagtaaattataatccacatttcatgcaaaatatggtagtttctgtagataatgtagattatcgtgaccaacaatattttagcagtacctacattctccttttttcttctttgaataaataaatgtggtccggtagttggaagaattttctagtagcatatcttaaaaatgactagttggctcgttaagcaggtttatataagatccacagaagattatggtaaacttgaataatgtttatgttgtgttgagagatacctgtgattcctttaatacagatcttaaatgcatgttctaaacttcacttaatatataattattcttttaaaaaatttactcatttttattaatttttaatttcttattgctatataatagttgtgttataaagttatttttctatagtaactgctgtgtttggaggcctatttctcatgcagttaattgggggagtcttagaaattgcatgggtaaacttatttgttctctttttgtttgctattatttagcaaaaatattaataaaattacagtcctttaagatgactaagaaattccttagattatcatgttaaaaatggatattcattcattcaacaaatatttgttgggtaagcactgcatcattctaggtgctgggaatgtggcattcacgttgccttctgtcatggagcttacattcaagtgggtgagacagacagtaaaccagtgaaccaaacgcacatgcacacatgcagggagagaagacagtaaactcggctgtgatggaatggcagtagaccagacagtcaggttagggctttctgatgaggtgccatttgaattgagacctaaagcatgaaaagccagtcttgaaaggtcgacccaaggagcatcccaggccaagggcacaaaaaatacaaaggccctgagttgaggaaatgcctgacatgttcaaagaacagaggaggtcgtgagtggcaagtaaggatggaggtgggagtggtcctagcatagggtggacaggctcaggccacgtgggcccgtgtaggcctaccaaggagttcagcttctcttctaagtgcagtaggcagtccctggaggattttatgcagggaagtggtgtgttttttgttttcctaagaggaccttgcctgctctgtggagaggggagtgttggaggcaggagggaaggctgaacatcatcaagttcttatgaaggaccaggtgagagatgatggcagtttaagggagctccagggatagaatccaggggacaggccaggaagcatttgggtgtagacaggattgctgatgggattggggatgggaaaggagttgaaagtaatatatcttagtgcagcacaaaaatgagatgaggtggagacagttacttagaacatccaaattccattttgttctacattctgagttaaaagttattgcccatattcattattatagtgaaactgagcttttccaaagtaaatgccattcagacacacttaaagcatgctgcctcttggagttggctgcaatgaatgaaaagaaattaactgagaatatggcagtgaaaccaaacaaattgtttcagctaaacccataaggacaagcatgacctaaaccaaagcagttaattaattttgctaatagtcatttcttttttacagagagttcgagtttcctcttatgacctatacaaaaatctggaaatagtccggcctgcattttggggatcatatttagtatttttgtatctttcatcttctgagatgttcttagttatataataggcacacgttggaaggtattaacttctcaagtgatacccaagtccagaggttctggaatctgcattgatcctgtccctctttgccagctgatcccatcttccttttcatctgactttaaaaatcatcccaggtgactttcaggtccatatggctaacttagcacctctgtaagaaagccggcctcagtgcccctgtcctatccagtggaggtggagtgagagagaaggaactacaggccggtgtctcagactgtctgtgcctgagctgtagggcctgcggtacggagggcagagtcaaacaggtgaacttcccaactcccacctctgctgcagcttgcatcagcactcagccaatcttcacacatttcttatgtgtttattgatttagagacagggtctcgctctgttgcccaggctggagtgcagtggcgcaatctcagctcaccgtagccttgacctcccaggctcaagcgatcttcccagctcagcctcccaagcagctgagaccacaggcgcgtgccagcatgcctggctaatttttgtattttttgtagagatggggtctcatcatgttgcccaggctggtctcaaactcctgggctaaaacaatctgcctgccttgacctctagaactgttgggattataggtgtgagccaccatgcccaacccacattaggttttagagtaagacttcatttgggctgggcatggtggctcacacctgtaattccagcgctttaagaggtggccggactgtagtcctagctatttggaagcctgaggtaggaggatctcttgagttcaaggttgcagtgagctatgattgtgccatttcactctagcctgagccacagagccagaccctgtctcaaaaaagcaaacaaacaaaaaaacaaaaacaaatgaacaaacaaaaaaacccagctttttttgtaggaaaaaaaaggatatgacaaatcttttctttaagatttaaatacattgttctaggccgttggaaacttacccactgaggtggtcccagcccacgtcattctatcattctgtcatttttgagttaccaatacgaactgagcttcaccagccaatgaatgaaactcacatcccccaaaatggccccaagttcacactcggtctcgcctgctactgccccacaaaatattacaagaatttttctgagggtgtctctttatgatgcctatgacccataggccccagacatttgtggcttctaagctaggtcagttcctggcttctgctgatttttctcccttcctccttttctggatgtgggtactcctgtctccctctggccactgggacaacgtcttatcctcctcatatccatcttgcagagagtggagctacagtagagctgatgggagccccatgtggtccagggaaaggggggcgttgaactgagctgggtttgggaagggggtgaggcctgagccttgggcactggagtcctgctgcttcctccgaggcacctgttggactctccccgtacgtgctgatctttgtcccaggccctgctgcctgatttcatcgagcaaaccatttctctcctagcccatcaaagcagcaagtttttccccatagggactctgcactcctcctgcaaactaggaactgtggctgggcatggctttaagtgcctgacagtgaggaggttggtccacctcagagcagccagacaccttgtcggggagggtgttgcttaatgctacaggccgacctgagtctcggttttggtcaaccatggtagcttattacaagcatgcttcagaaacaaaaaaggctagattatggaagtacatttaggaaatcagattagaaacttaacagaccctgtgagcccttctatgttctactgtgttgatagtttgcatcctcctcgtgtaggacatcttttcaaatgcaaccttggagaaccccaggtataaaacaggtggcacccaggtgtcaggagcgaactttcctgccctcccagcctctgcttctactgggggcacctccatcccagaaatattccaagaaattctagggatccttggagcatcacttgaaaatcactgactgcactgtggtataaagacttgagaaatgaagacagatatttgcattgtaggttgacatctcaagagtcaccgtccatcacccctccgatgcagggtcttcagcctctcctgcctccactggcccttttagtgtgcaggaggccacattctctgagggaattgtaatctgccttctcccactcctcccagccatcatccccacggccaccacagtcatctttctgaaatccacacctgccttcagccttccatggctcaccacccctcatagaatgcagagcttggacactcagctctttattcatggtcgtccctacctacctgtcccccttcgcttctgtgccccagaaaacatctgcttataggtcccagccccgcagggacacacctactcttgaacactgggttcagattacacttccttggtggaaccttggaaattcctgcttctgagccccaccctcgcctcccagaggtgttatccttcctcgactctcagcacccaggtgttgttctgttctcttgtgtgcctgccacgcagcattgcgaacttcgttcgatctacttgtctgtcttctccacttaaatagaaactgagggcagagatgtttggggagaggcgcgcactctgtctctgcagctcccgttcccccagcagacacgtaaacgcgttcaatgtgtgaatgaatgaatcatcaagttacacaaatgcaatttgtcgggatatgaatggcagttattaaataaatcagctccaagttaataaaaacggaaataaaagcctgttgttgcaagactttcagtactaggactatttaaatgagatctcggatgttaaagggaagttttatttgttgaggcagtaggagcttccactgcgtgtggaagtctttccacctgagtggaattggctgtggcttctgtgttcagagtggaattggcaagcagctgctatgttcggagctgactgtgttcgtcagaccagggccagatggacgcgtgaaggcgtgtgtctgacagatgaccgggtcttttaatgaaccactcacttgaaaattgtctttctgcaggtgatgtatcacccatcagtatgtctcccatcagtcagtctcagtttattccactcggggagatcctctgcttggccatctcagcaatgaactcggcaagaaagcctgtcacccaagaagcactgatggagcacctgaccacgtgcttcccaggtaacgaggcgggaacgtagcactttccaggtggcggtgtgctgtggtcgctctaggactcacgtggactgttctgcccatgtttaaagagaataggaaaacattcttccccaaaactgacccgaagctttccttacttctgtaattaaaaattcaggcacctgcatgacatcaaaaaataacttaactgcttcagctgtaatactttttaaattggcaccgagaggaagaaattaattcagaatccatgaagaatctggcaagaatgaccaggactccagtcagtctttgcaaactaatctttaaatacatgaacgtgagggttcaacggctgaaaactttagtcctagggagttaaactacagaaagggtcatgtcaaaaattaacatatcttacatatttgtatcatggcttgatgagttttaagaaaataatattgataaattaggatttcattttaaaaaataaaatacttacttttctcttaaatgttataaaaaggaggcaacagcccagctgctgtgtgagaggcatttgacgctttcagtgctggaaggcattaggaagggtgacaagctgcagaatgcaggaccctctttcaagagagccagtgtattgtcaccccacccccaaatggagatcctgccagagttgccaatctcatgtttcaagacaatctggaaatttggtcttatgtgaaatctctgcatttccttaaatattgacaattgtgtgtgtgtatatgttttaatgtctgtgtgccagcaacatgcaagtcaaatgaaatacattatcgggctaccagtttgccaacttggtgtggactcagcctgtttctaggttgaaatagagattatattaaaagggaacgtttgctatatttctcattcaacttagaagagatctgagtaaatataagctgttaattgtatcagttagcttttgctacaaaaatgctgggtaacaaacaactacagaacatcaaaggcctacggcaacaagagttgatttcattcatgcctctgtgggttccccaggagtcagctgagccaggtggggcccagcagggtagttctgctccatctgtacccatccgatttagaaaacggggcaaatggagatctccttcacttgcgggatggcagaggcaccagagcacaagcccatggcacgaaggctcttcaagctttgttcatgccagcccattaacactgcagtgaccaacacaaacctgctaaactcaaagtcaaggtgtggggaagtgcaccccacacatgggaagagaacgggaggacgaattctaagctaaggagagatcttatctactgtattggtctccctgcttctccttttgtccccgaggaacgttttctccttctccttgtgatatttcttcctttttcaatattctaattaatgtgttttgataatatgtatatggttcaaaatctctaacatgaacccacccttgcaacatacaaattattttaagatttctagcattttattatctctgaatattcttcactgtctgattgcctgtctctttttgttaagtcctaggcaaacgcctttccttttagtagtgagagaaacagaatcccaggtgagagccacctaagtggggacagatagtgttgccaaacacagtggtcttggaggaaggacctgctttctgtcctatgagtgcgtagccacttctgacattgaacaacccagcagctttttaaatccttttatttttatatagcttcatgagaaatcacacggcttttctgaaattggttacgtaccacccatttttgggctctaaaataaataatggaaagaacatacagccagtgtgtaatagtaaaatgctcctcactgccaagcagctgataacaatatcactaacttggaatgctttgtggattaatccataggtcatttgtacttaaaagaataactgttttgctagcttttatgggaagagaacttaaatcccaaggccctggttttcagacagactgaggagctttttcttctgtgtgacactgatgactcattggtcagcctcagaagtttgcaaggacaccatacaaacccaggtctagcgcaggagtttgctaacctgcaggcctagtgcggcccaccacctgtttttgtaaataaagttttattggaacacagccgtgcccatttgctcatggatggtctttggctccttatgcgatagtggcagagttgagtagtagcaatggaggtcatatggctaaaagcctaaaatatttactatgtggttctttacagagaaagtctgctgacccctgggctaggatatggtggtaactatttaaagttatgttcagcaatagctccagattttaaactggtatttcataaaaaatgaaagtttgtttcctgcctgcctgccttctttcctttcttcttagctacctttctcctttccttcccttccttcctttgatttttttttttgtctgtcttttactatcagttaagctacagcagaagaaaatattttagaaaatctaaccctttaaattctacttgaaaattgtatttttaatgacaatgctaaaactctgaagggatttaaagatcatatttatattttttgtttttaaaggtaagaataaagtatttagttcttttatatcttactattcaaaaataaagtttttgagcctaagtattattaaaatatttggatctcatatttaatgtatattttataaatcaaaagtgtagtctagaatttggcttcttttcttgttttgggcatccatattctaaagaaagtttttagtgaatagtcttccagcaaaaatttctgggtcaggcgcagtggctcatgcctgtaatcccagcactttgggaggccgaggcgggcggatcacgacgtcaagagatcgagaccatcctggttaacacggtgaaaccccgtctctactaaaaatacaaaaaaattagccgggcttggtggcgggcgcctgtagtcccagctactcgggaggctgaggcaggagaatggcgtgaacccgggaggccgagcttgcagtgagctgagatcacgccactgcactccagcctgggcgacagagcgagactccgtttcaaaaacaaaaacaaaaaaaaaattccgatacatcaaaacttaaacctttttatcacttttctataaaagtgagaaaaacaagttggctgaatttttgaaaaccaactcaacaacttttatctatcaatttccattacagaatcaagaatatttttaaaaggtttataaagaataatacttgcttcttgtatttctaaataactatgcatccattcatccagaatgatcatttaaattggtggtctggtacctgttaagctgttacaactgaatctttctgggaggaagactggtcttcagggacatagagctagaccctataagtccaggtatggagctgaacttgactttagagattcctggagaatgttaatagatacactgtgttctgtctcccattcgtctccttatgttggctcttactgaattcttcttcagccagcgttcttcacaaacaagaataatctaaagatgctcattaaagcgtttcacttgaaagtgcttaacatacagaacaggtccatgtgctcactgttctgacagtttgtcagatttgcaggactaaagcaatacatagaggctgattgtggtggctcacacctataatcccagcaatttgggaggccgaggtgggcggatcacttgaggccaggagtttgagaccaatgtggccaacatgacgaaaccttgtctctactaaaaaatacaaaaattagctgggcgtgtggcacgcacctgtaatcccagctactcggtggctgaggtacaataatcacttgaacccggaggtggaggtttcagtgagccaagattgtgccactgcactccagcttgggtgacagagtgagacgatatctcaaaaaaaaaaaaaaaaaaattcataggtataagtagaccacagtgtcatgcagtgttttaaaatagttatttttgctttgaaaaatgtaaaggtgtggaagagatcaggttcaggcctgttaggatgtaaagtttatttttgttctttaagccctcacaatctgaactcatgatgaactttcggagtcgaatttggaagtagtggaatatgcaaacgttaaacatccatcacaaccatcactttctcaggtcaaccctacagatttctggcagaaccctgaatttcacaatcagtcagtatattagggcttcataatacaatgataatcataaacataagcaactttcagttaagtctgaaaactctcaggtcacagcatggaaaatggcttggacagggggcaaagaatgtttctagtttgcattatcaaattaaacattatttgatggatatacctggaaacccaagacataaaaaaatttaagcacaaatactctatggaaatagaaaaatttttctctatttttctttttattccttcatttgagaactactagagaacttgtttttaatggtaagtaaagatgtttgcattgtagtcataattctatacattaatagctttatgagtttcctaagatcatcatttggaaggcctacagtcagcaaattctataataaaattaaacttttgctttatagtaatagctatttttatgacgtatacatcagctttcccttattaggagccatggtaaactggtcaatcatgaatacttataaatgaaccttacgagtgtttgaaaaagtttgtcacattgttgactaaaagtatgctaccatttaagatgtggtcggctttaaacatgggcttgttatcttgattgctgtgccaaacaatgacagtgggcatcattcctgagactgcggtgcagaggtgtgccctcatctcagaaggtatattccgtgtcagtggtgtcccctgaagttattcagtggaaggcactttgggaagcaggggcgggaagatcacttgagcccaggagttcgagaccaacctggggggcaacatggagaaaccccatctctacaaaaaatataaaaattagtcccagctactcgaaaaactgaggtgggaggatcacctgagcctggggaagttgaggctgcagtgagctgagatcttgtcactgcactccagcctgcgcaagggtgagaccctgtctcaaaaaaaaaaaaaaaaaaaggaaaaaagaaaaaaattcatttctattttgtacagaaagtattataaaattaaaaaacaccagcactttgggaggccgaggcgggcggatcacgaggtcagcagatcgaaaccatcccggctaaaacggtgaaaccccgtctctactaaaaatacaaaaaattagctgggcgtagtggcgggcgcctgtagtcccagctacttgggaggctgaggcaggagaatggcgtgaacccaggaggcggagcttgcagtgagccgagatcccgccactgcactccagcctgggcgacagagcgagactctgtctcaaaaaaaaaaaaaaaaacaaaacaaaaaaaaaattttgttattattggtcttaaaatcatttgtataaaaactaatgctcacttgccagaagtaaagtattagactaaaaggaaaccatgcgactcaaaaattaaataattatattgatacattatctatgaacaatgctaccttttccgccttggtcactaaagataccttctgaagatggtaacacaaatgggtgtgtatgttaccgcgcattcacggattttctccccttgagaatcccaggccatttctaatacctttatttcctactttggaaggacttggggagttgaagcatctcagctgacccaggtgttctaggttggtgcacattgttgtttgaaggcaatctggttttccgtgggtcccgacccaaagtggagactaactcccagctaatgtttattgagcactctctgtgtgccaggcactgctccacacacgaaactcctttcacctcagccctgtggctacaggtactattgttatctaccttttgatgacagtgaatggaggctcagagaggctgagctgcctaaggtggtaccagctgtcttcatttgctaggactgctgtaacaaagtgcagatggctcaaccaaccaacatgtattgtcctacagttctggaggccagaagtccagaatcacaatctcagcaggattggttgtccttctgagagctgtgagggccctgtcctcggcttacggatggccaccttctgtgtgtctcctcacactgtcttccctctgtgcctttctgtctccagctttccccttttcagaaggacatcagtcgtattcgattagagaccgctctaacgacctcattttgacctgactttaagaccctttctccaaatagagtcatatttaaaagagtattaggagttaggatttcaggatataaattggggtggggagtgcataattcaaccagtgacaccagctaacaatgacagggcagggtttcaatccagcagcccggccccagccttttagtctccaccttacactgccttattcgtgtttggttgaaccacatgcaactgccatttttgtgagtcagatggttaaatatgggcagtttcacatgactcaagctgaccgatttcaggtcagtcttctaagtattaccaccctttatgtgcctggcattgagaaatggagaatacccaagaaatgaagtaaatgggctggagcctggggaacttaaactctcttaagaatttatgctcttaattctgtctcttaaggtagacgaggcataaacatgcacaaaaaccctttgaaaacaattatcaatcatacaaagaagctttcatcattttcatctggtgtgtctattctagccaatatgggaattttggacaaaaagacacagagtgtcaaagccttcactcatgtatttattagggctctttggttagaaattagaaaaaccaccttcttcttactgactgacgccaaaaaggagaacattcttacatgaattttacccgggctgcagtcagtttccaaatggaaggcaatgactccaaaattagaggatacatcataaacagtagtcaagtctagttgcccttttatatcattcacaaaattaagtttattaagtaaaatctttaacaatgagcacacacagtaactcttctgtggtagcctccatatatgttagatatgttttttaatatcaaggtagatattttcactctgcttctctagttgcttttattgaaaaagccttttctatactttcatatcatatcatgggaaacatttttcatttttctctcatttaaaaatattctgtctttcctgtttcgttcaggaaacaggaaacaacaggtaacaacagtagcaacctgactccacctaacttccatctctgtcttcccagcttttatatctgctcattctgtgggtagtaatgtaggagttacccaagaaggcgaggatttgcactgaacttaatgaacacctttgtctgaattgtgcatcctagctctgtgatggtacttcgcatcttggcgaatgaataggatcctggaaatcaggaatccacatgttctgtcttcattctcacaagtggttttttttttttttttttcaggtgttccaacgccaagccaagaaattctgcggcacacgctgaacacgctggtacgggagaggaagatctacccaactccagatggctacttcatcgtgaccccacagacttatttcataactccttccctcataagaactaacagtaaatggtaccatttggacgagaggatacctgaccggtctcagtgcacctctccgcaacccgggaccatcacgccctctgcctcaggctgtgtcagggaaaggacattgccccgaaaccactgcgactcttgccactgctgcagagaagacgtgcacagcacgcatgcacccaccctgcaaaggaagtctgccaaggactgcaaagacccttactgtcccccttctctgtgccaggtgccacccactgaaaagagcaaaagtactgtaaatttttcctataagacagaaactctctcaaaacctaaagatagtgaaaagcagtcaaaaaaattcgggctaaagttattccggttaagttttaaaaaagacaagaccaaacagctggccaatttttctgcccagtttcctcctgaagagtggcccctgcgagacgaggacacgccagctacgatccctcgggaagtagagatggaaatcattaggcgcattaacccagacctgaccgtggaaaatgtcatgcggcacaccgcgctcatgaagaaactggaagaagaaaaggcccagaggagtaaagccgggtcctctgcccatcacagcggaaggagtaaaaagagtaggactcatcggaagtcccatggaaagtctcggtctcacagcaagacacgggtgtctaaaggagacccttccgacggttcacatctggatatcccagctgaaagagagtatgacttttgtgatcctcttaccagggtgcccagggagggctgcttcatcattgaacacaaaggagataacttcatcatgcacagcaacacaaacgtgctcgagtcccacttccccatgacaccagaatgggatgtgtctggtgaattggctaaaaggagaactgagatgccttttcctgaaccttctaggggaagctcccactcaaaagtgcaccgaagccacagccatacacaggaccggaggtccaggaatgagagatccaacaaagccaaggagagatccaggtcgatggataactccaaaggccctctgggtgcttcttctctagggacgccggaagaccttgctgaaggctgcagccaagacgaccagacccccagccaatcctacattgacgacagtactttaaggcctgcacagaccgttagtctccaaagggctcacatttcgtccacaagctataaagaggtgtgtattccagagatagtcagtggcagcaaggaaccgtccagcgcttgcagccttttggagccaggaaaaccacccgagagtttgccatcctatggcgaactcaactcttgtccaacaaaaacagccacagatgactatttccagtgcaacacctctagtgagacggtgctcacggcaccatcacctctgggaaagaataaggaggaccatgacactctgactttggcagaaggggtgaaaaagctctccccttctgataggcaggtcccccactcctccagggagcctgtggggcacaaggaggagtcaccaaaagggccgggtgggggccccgctgcttcgggaggagtggctgaagggatcgccaacggacgcctcgtccagcaccatggtgccgagcccagcagcttggacaagaggaaagagatatttagcaaagacacactgttcaaacctcttcacagcaccttgtctgtaaacagctatcacaagtcgagcctgtccctcctcaaatctcacccgaagacacctgctgacacattgccaggccgatgtgagaaactggaaccgtccctggggacctcggcggcacaagccatgcctgcttcccagcgtcagcaggagtcaggagggaaccaggaagcctcttttgactattacaacgtctctgatgatgacgactctgaggaaggggcaaacaagaacacagaggaggagaaaaatagagaggacgtaggcaccatgcagtggctcctcgagcgggagaaggaaagagacttgcagaggaaatttgaaaagaacctcacccttcttgctccaaaagaaaccgacagcagcagcaaccagagagccacccattcagcccggctcgacagcatggacagcagcagcatcacagtggacagtggattcaactccccacggtagggagaggtgtctctgtgcacacacatgcgcctagcggggcctggggctttatgcacgtaacttgacaagtttctgatttcgtagtctcagttctatggatgagggttaagagttgtatgagttgtattgttaacaatctgtttctgacttctttttcaggaattgaaaaaaatgtttctgcacctgtagagatcaccaatctggactggtgggttggctcctcccctcaaacttgcatcagtctgatctaactaaaaccaatatttccagtattttttctgctacgttcatattgccacccatgctaagagaaggatgttttttaagtccttcaaaaatagtaactttttgagtagaataaatagtctgggggcgggggaggaagataggggttgggagtaaactgattgatgctaagataggggtccctgtagtgaaaatataatagcagatctcaaaacctctccaatggatctagaagcttgttgccatttggatcccactattctgtgcagcctgtccctctggctcacacaccttcctttcactgccaagaaatggaatatttcttccctcacagcgagggcaggggcctgtgctctgttagatcaaagcatgtgccatgtttatttctcctcctgcagaaatgacggagcccatttgggcagtctaattgtagttccttcttgttaataggtgttagttcagcaaagggttgacagtcaagagttagtggtgcccagtggtcatggccaaagctctagagttattcagggattcagaaagcaaacaagagtctgtgcaacttccttttttcttcttaactctttcttctcctcaaagagcaacatgggacctaattctctttctaacttctactccagattggtgactctgagatgcagaaatactactgagagattgacatttctcatcagctatgattcccaagattttataatacttataattttaacatggattcagataggattatgtacttcatatatttaattattaagaattaaaattaattccgttgtgatcttttcactatatccctggataattttggaagtgagcatcacacagctggaactgggaatcattaattgctttgtcccatattaggcctttgtgatttattaaagggctggttcattattattattattatcatcattattattttggtcttggagcctttcttccaagttaacacgtgtgtggaagtctaaatgtctgcacagagctgagagatggccgtggtgacagtggagactatgggccccagtccctctccccatccctcgaggagcctctgacacctcagggagccatgggcctcagcctgaaaaccactagtctactaagtggcttttctaagaaatcatttttgctaaataattttttatctcaaatcagatattattttctgatttattttaactatccttttttttcttcattttcctgttctactcttttttcctcttgagttcccggtagtggataccagattagcaaaacagaaggtctgtaatccgtggtagaagttgagaacaatttttggtggtaggtgtggtgtatttgcctgtgtctttctgttctactgtttctcattatgtagcctctgcctcctacctgcttttcacatgctcgttttaaacctttctcctttccctctgggcccctgggcttccacagacaggaagctgccgtactaaagagatagttgctaaggagacattgggagtagtttaatgagttctaactagaaaaccttccactgcataatattgaaagttttttgtttgtttgaaggtaaacagagatattcatgaaatggttgaaccagtatctctacagaatatattttactatctctaaacttggggtgcagaatatagaatttatgactgggattatttcttgaagtaagttgattttcagttgtttcattatgtgcttaaagttaagtgttttgtcatggcagaaggtaaagactgttctaaagagacaaccttcacacaatagccgcatgtctccccactaatattaagtagaattttctctacatgaaaacgtgtatcacctatacatgttatacagttagagaatctacagaacaattgctaattttacccctttcatatttactacccttcgattagaagctaggtgacaaactattttctacacaccttaataaagtcactgagttgtctcgctgatccaggagtaatgttctgcaaaggaaagtatttgactactagaaactttgctctgcagtctggggagtattttagccagatagcattatcatgcgcctacattaccattgctgcgagacatgggaatcgttttaaattttttttagagatagagtctcactctgttgcccaggctggagtgcagtggtgattgtagctcactgccgcctggaactcctgggctcaagcaatcctcccacttcagccttctgagtagctgggactacaggtgtgtgaaaccacacctggtaatttttaaaaaaatttttgtagatccttctgccttggcctcccaaagtgctagacttataggcatgagccaccatgcccagccctgacatgaaaatcttaagcaggccatttattaaaatctttcagtaaataattcaccgagcagctaagccccaaccaaaaaaaaaaaaaaaaaaaaaaaacagaaaaagaccccaaaaagtgacttttctccacactccagggtttcagtgctggcttagaagtcatgttcagccacatttccaaaattcttcagtcccttttgttgggaattaaagggtatgtagaaggaaaaagggtagaaacttgaactatgctatgagatctaatattgaaaatgaaaagtcttgacgtgagaagcctgtgatttcaaatatgaggcctaaagctggttgataaacacaatatgaaaatcagagaccaaaggctgccaggggtatatctgcttaatgtattgcaagaacgtgtgctgtagacgcctggggccaggggaagacatgtgtacagaaggatgaacaacagaaccgcttggtccatttctcctgcctataaaatcctgaaatcctgtttttcaggttgtactccattagctctctttaaaaaaaaaaaacaaaaaacaaaaaaccaacttttaaatttgaggaatatttttactgctaacattctatctcctttaactttttcatcagcacatccggagcccgcagcttgaatgtcacagactgtaatcattattgcaacaataatgaaatacattctttaccacaatttaccactattacatatattacatatttaccactattaatatgttggctgtgattgaaggtgggcgaagggatcttacagtagagacagaccccagctcagatcatgtattgcaatatgtgtttacggtgcctggtatacagcaggcacataataaatgttgagcccaccccttgaaagctggtttaagagtgaatcctttggaccttaaaatgtattttcccatagaaaatacgtcattcgtaatacatggattctgaagcgaacccacagtcactatttatttcattatatgctaggtatacaatgaaataatccacattttctaccttattagtgtacagattcttccttgatgcttacttcttcttcacagtcaccctaggagtaggtacatcccatcataactctctatattttagagatgaggaagtcagatactgtaaaaagttactttagtgattaagaacaaaaccaaaggaatgtgtcttgaaatctttggggttttgcatctttcctgaccctcctcttcctccacctgctccatgcctcagtggtagctctggcaaagccactggtgagttttcctgggggagacgtcatgtaggcaagtctcacactttcccttttagtgatgacattttggagtgtcttttaggtatgctcagatttaccataagcataatgaaaaacttgacttctccctataaatggattacctttctggaggtaccctcgacattcaagaaagtccgagggtttgtttgtttgtttgtttgtttttttggttgtcagtgaacaaactgccttttaaacaattaactcttggcttcttggtgagaagcaaactcaaagccacaaggagttaggcttaaataacctgttggaaagggctgtcagagtacaggattcaaagatgctatcagccgaggatgggaatgaaagagaggagaggatgtcttcgctgtagtagtttgacttgttaactagctctagcaggcttaagtcagttgtggggaccaactctcagagactatttcctaaatgttgactctgcctcatgcagtggatgttttgagaatgcttctggcttcctcaatctctgtagctgatacatttcttgtagccacattgaggccctggcacaggaaagctactcagttcttctcaatctggcccagtcatcttatttctgccattgccctatacatttgaaatcttaaatgttctaaatatcttaaagcaatgaaatagattcaagtgtttctaacttagaaaaagtaaaagagagagcaaaataatacagcttttaaatcacctgtattctatacgaattattttaaaaagaaaatacttcacgtataatcccagcattttgggaggccaaggcgggcggattgcttgcactcaggagttcgagaccagcctgggcagcatggggaaacccagtctctactaaaaacacgaaaattagccgggtgtggtggcacatgtctgtggtcccagctactcgggagactgaggtaggaggattgcttcagcctgggaggcagaggttgcagtgagctgagatcacaccactgcactccagcctgggggacagagcaagaccttgactccaaaaacaaaacaaaacaaaacaaaaacaaaaacaaaaaatccaaacaaaaacaatcctgccgaagtggggcagaaatgagtggaaacttaacaaatgaatgggaaaaaaaaatcgaagttcctttatcgaaaatataatgtattttaactaaagtgttaaattttgaaacagtggaataaaacgtttaaagtgaattttattcccatctttgcggcaaatgcccagggtcccccaaaaaagggcatgctcaagtcccccacagtcgaaatctgctaatccagaatgaaaatggaatcattaggataaaattatcgagtgtgttcaggagcggctatgccagtgaatttccagcctgaaatgaaatcatgacttaggtgtatttatgagtatctgttttaaaaaccactgtgatagctagctatcacctcaaattttgaagtcgtttcgttgagtgtgaaaaaaaggagaagacatttcaaagtgcatttagctatttaaaaaccctttattcactgagtgtgctgctgattattacatgtctgtggaagcttctggagccagtggtggagaggcagatgtgaataatcagtcgagatgtatattgatatgacattatgaaccaacagaggaaatccattaacgacatcatttgctcttcctctggggctcaatttataattatttatgttccaaacaaaacaaaacaaaccctttttgctcttttagtactcgggagagcctggcttccaacacatcaagcattgttgaaagtaaccgtcgtcagaaccccgctttgagcccggcccatggtggagctggtccagccttcaacttccgagcgagcgcggagcccccgacaaatgaagctgagaagctacagaaaccttccaactgcttgcaagcttctgttactagcgtgtgattgtccttctgcctcagatcttctgtctcattcgatacagcaaagtttacgacactgggactgatgtttacatctttggaaagacaagcatctcaaccacagtttttgtgtttacttaaactgtgctgctaagtagggctagggcaaaaaaacaaaaaatctttatttcagagtattgcttttcacatttatggctctgtagcaactgagtaacagtaggggtgatatgtatacttttgcttcactaattgtatctgagcacacataggaaagtctagacactgtaagtgtaatacgcattttcaatgtcatgcagttgccaattccattttaaaatgccacagatgcgtgttgctcccagtctgtggttaaacggtgccacagaactgatccttgacacttccaaaaaaaaaaaaacaaaacaaaacaaaaaaaatttaaaaaaaaaaaacaaaaaacaaaactaagctaccacgaaatgtcaaatgcaagggtccaccttgagggaaatagatgccaaactaactagaagggaccccggccctttgtgtgtgaattgtttatgcaccagtcatttttcactgtgagttttcgtgacactattttgcaggagcccatggaagtgtgtgagaaggggtcgcaatggagatcactgggagtgaatgttttcagggttttgttttgaagtgtcacagatgcttgtctgatttttttaaccttccgtgatcacaaacaggaatataggcctttgaatctgaagtggacaaaggaaagcaatttccagtctggctggggcacagcattaggtgattgaaaaggtgatgtggacttgtaaaaggtgttactcaaatattgaaggaagagaatttcctccttgtgatacttaggatgaccctatcttactctaatagatacaataattagtttgtttaaaagcaaaatgttctttgtgatacaaatgaagagtagggcctgaggatgttattctttctaatggaaggacataaatctattttatgtagttttaaatagaatgcctaaattaggctgtgggagataatttttagtggttgtaggaaagagcaaatttagggagtgttgaacttcaggccttttattcctgggaagatatgtatagagaaaacttttaaaataatttttgattagaaatatacatgtgcccatgtaataaacaacagaatgtgctcattctgctagtgcggtataatccgaatttgtactcccctaaaatttatcagaataacaattatgcatacatgaactatgccagagtaatgtttacagatactttgtaaccaatttcaggaggcgtttttagctggatgtgtagttaattagaccaacttatttccaaatggtttgttaacattttgctttggtttacaatgtcatgttgaacacaaagaagacccagcagcaaagggatgaccaataatttcatcttatagcaaggagacattccaacgttcccatgttttattttctgagaacagtgggacagatctgtagtaatggaatattatttgcaaaagggttacatatgacacaagtaagtgttctgacataaagttttatttagttcagtggcatgtgctgttgggagccatacaccataaaatatatatatcccaaaataaatctagaatattttcacctccaatttcagtaattggcatatgatttgtgagacgcatctgtttttgtatgaggtttaatcactagcaatctgtttaaagaatccagtcctatacacagttggactcattcttgaaacctttaaatgctccctcatagtttttcagttatttggaagttgcattgggtcaaactgaactccttgagtttggtgtaaattccttttttctgcttattatagtgaaacttcagcatgtttcttagtaaactcccataccattg

SEQ ID NO: 594 - DNA, 33238 bp, Homo sapiens
  source 1..33238: mol_type = genomic DNA
ctctcccctcatcaacttgcagctcctgctgagctgatgtcaccagcagcatgtatcaagaatgactcctaatctaaaataaaagttgaaaaaaatgactcacgtctggtggaaaacagcaggatggagccaaattccatgcgctaggccaccttgggtaagtcattgcccacgtctgggcttcagttgcctcaaaaaccaaatgacatggtaggactaggtgctacttcatggtccaatagactctgattgcctaaggcttgatattcccagcctgacttggacatccctggctccattcctagctgagtggcttggcttcttggagtaggacatggacctaagacctaacacagggaatggctgtgccttgagtggactagctgctcccctgctttaaggtcttccgtggtccccactgccctccaggtaaagcctgaattccccacttagagcctctctgacctgctcctccaacaagcgcacccttccttcctcttcttggaacagctatttaattgttcccttaatgttccatggtgtgccatcctctgcacctttgcttatactgttccctccgcccaggcaccctttccctgttcttcatttggctaagtcagtctttgagagtgggctctggcatcaccacctccagaaagccttcctggatgttcccccatccccaatgtgaacaggccccctttctctgggaacctggattctcctcccctgagaccctgttagttgctgaaacaaggtcaggaagcctttttcaacgggctgcagtgggatcacagtgtgccctctttggcctcctcggggcagccttgaaagtgggtttcaggtccctgaccccacccctggctttacaggtatttgaggctgtagcaggaacctgagcttggggcaggggactgttgatctccactaactgtgcaggcatttctcaaggccctgctgacctagatctgtagggtggccacatcttcctaccctctgtagcccccagcccctcagtggacccagggcatgttctttattcatataccccgccctccacctccaccaagcccccagtagggaaaagaccccagtctgtctccaccctcctttcccctccgtattctcattctcctcccatcaggacagcctacgctatgtccccccatgtgacacgccccttcctacctccacacctggagtcacactgcttccccagcattcctgaagtcgcttctcctccccagatcctgccccttcttcaagacccagaataagtcccacttccaaagccagcattcacatggctcaggggtggcatcatagggtccccagtctctttgccacccaaaaggatgcagctatgggttctgccttccacccagtgtctggcccagcatgtgaccagaacaccccaagccccatccccatcaatgcacagtgttcctgacagtgtaggcggggttttccctgcatacccctcccgctatgaggacagtttctcaggaacaagtttattgcagggaacacactaacctctttcataatagccaaaggcataaaaactacaaaaatatctggctctcgagtgtgggcagctcagtgtgggacctggtctgagtcatgacttgggctgccctgcaggccagaggcccgggagctttccggccactccccagagaggtccgtggcgctgagggggtgaggaagtgccttggctgcttccacagcgtgaaggccaaggctgaggtggagctgggctggagtggttccagagaaggcttcatcgaggcccttcaaggctgatggcagagccagggtagggagacgcctggatgtggctgccctggctcaactggctcctggaccaaggccctaacccaccagtttctttctccagaacccctgctggctctcccatagccaagtgggtggagcagagccctcctgaggctcccagtgcagacagacctccacccaaccacagtgatccggaggacctgctggctgcatggctggtgtgatgctgggaggagagccggggagggaggaggatggtaggcaggaacatgcctcagcacagatgggcaggtgggttgaccttccctgccctcagggctgggcaccattggcacccaacagggccgtcttgcggaagacctgcagggttgggttgtgcagcagcgtgtaggccagaccccagcgagccctgccgcggctggccccgggcctagctcccttggccatggagtcctttgtctgtagcagctgcatccctgagagagacggactttctgtgagtcactcagcaaacacccagccaaccctccctggccctcagacctgatcagagagcctgaaaatcccaggcgtgtgcaggtcgtgaggcttaggatgtcccctgcaggcagcacatggaagtggggggtgaggtctgtggatggactggaagctgggtgggacaagggtctggagctggcttagtgtcccctccctacacacacttctgggcagaaggaaaggaggagtcatactccctgccccaagggagaagcgggggcagtgacggagccccttaggaaggcagctgtttcattctctctgtgtgcacacatatggtgtgtgtatgtgtgtgttcatatcatggaaaaaatcaccctgagatcagaccaggaggggtgaccaaaggcagccaaggaagagaggaagtgagaattttcctggcgctcactctgtgtgctggggaggggcacacatccttcctagaagaagctgggtaggctctattcccccattcccagtgggagggcgcaccttcgtcttcctcccctggtctgaggctgtcctggggggctgccatggtcctgggtaggaggctctgcgcttgcaggagcagggagcagaaggctgtcatggctggatgcgactggctgacttcaatcttcaagaagtttcggtacgtgtagtagcctggggtggggtggcggatggcaatgctgggggagcaggggccacactggaggcatccagacatcccctaacacacacacagggagtgcacgtgcactccctgcatccaagcatgtcgacacaccaagcacgtggcacattggctgcatgggcacgtgtggacctgctagaacaccccacatccactgcacgtgctgcagggccacaggaggcacagcgcaggggcacacaggtggcacatgcagctacaggcatcggtgtgaactgatcagctggcacggccctggggcagggcagatgccttcctcactgcttgggtagcctgagcaatcctccagccccgcccagtgaccttaccggggtcgagagtggcggctctcggtggcagcaggctgaggtccatctggccaaggtggatggcgttgtagagggcagagaggagcactcgccaggtggccaccatggcacccaccagcacattgagggggaagagaagaaaggtggctgcatagagcactcgcctaggatgggagaagaaagctgaggcaggccgttccccagagctccctccccagggtcagtgtcagacctggatgcccagaactgctgtgtatttactgagtgcctaccatttattgctatgtcttctgtgcaccccaccctgggcaaggccttctctctttcaacccaccatgctgggagatgggaaactgaggcccagagagattgggagacttagccaaggctgtcagctattcagtggcagagctgggctttaactctaggtccatctgagtctttctatgaccctgatgcctcccacctcccttttctgggtcccctgtctgctaattccaagttcccctgggagccaaggttctcccacagacttgtcatctgacagggaactcccttgctacaaagtggggaggggcatggttttaaggaaacagaggatccaggggagagcagtaccgattcccaaagcaagaaaggttcacgggggtacttccagccccatgccgggtatgtagagaggtactttggagtgggctgagccattgtcccttttctctatgggtaaggcaagctctttctactatcatctgggttccttgatagagagaagggatagatggcagtggagggaggacacaaaaagagagagacaccgaagaagaggcgagggcctgagggagccacaagcccagatgccacctcaccggttggtcagctgtgggtgtccatcatgagtctccaggaagacccaatgggctgccatgttctgcaggatcacagccagggccaaagtcagccagaagggcctgccagtggggtggggaggtggtcgctgttagcggacctctaaggagtccctgagccctccatgtcttgtttcactcaccacgaggactccagggaacggaagagcaggaggttcctgccatggagcacaggcatgagcaccaggaaggccagggccgtggttcccaggaagaagatgatctgctgcaccaggagccctgccaggggcgggagtggcagggggacagaaaacaggttccatgaaaactggccatccccgctgcccccagaaccaagggctttgggattgggcaggcctggttttagatctctgctctgccactgcctagctatgctgccttgaacaaatcactttacttcattgagcctcagtttcttcctctgtaaaatggggataatagtccctacctcagaggctgttgtaaggatccaatgagataatgtctgtggaaactcttaaaatcacaaaatactttgcaaatgttatttccctccagtttctcctgagtttgagttactgggggataaggctacatattaaactgatgtttgcattccttcaagccagagcctggcatacggtaggtgcccaaggactgtctattgaaataatctggccaactgattagagaatgatgtctacaaaagggcctggaggcataagggctaccaagaagagacgctatgacttttgtcctagtaattcatctactcctttaccatccttctcctcccgcaaggaggtgagaatggaaggaactggagggagagatacaaggcccttggatgtgcaacccaggccacagcccctcaccattcagagtgcttttctcactgcagtacccaaggggagagtcagaaacttggggctggtaggggtcctggaaggttatctggtccaactctctcagggcaggaccccctttgcagactgcaacaatatccatggaactctgcttgcatacccccagtgacagggatctcattacctttgtaggtagccaaatgtgacacagccctttcttaagctggagcgcagtggtgcaatctcggctcactgcaacctccacctcctgggttcaagcgattctcctgcctcatcctcccgaatagctggaactgcaggtgcacaccaccatacccggctaatttttgtatttttagtagagacggggtctcaccatgttggccaggctggtcttcatctcctgacttcgtgatccacctgcctcagcctcccaaagtgctgggattacaggtgtgagccactgagcccagccaggaatgtaccattttgaatttgacacctccagacctgggtccacccccatgtgaatacttggtggcacccagggttcatctccatgtggagggtacacactcaatttcccgagggctcctgtacccccatcctgaataagcttcttaagggcagggaaggcaggggggtccctccttcttgctgctgccccagagcattcccagacaaactctgagggcagtacttgctgagcactcttctccccaactgaggccagtgtctgaggggaggcccaggccaaggctgggtgtggcgggcaagggaggctcaccaaggcagataaaggctgtctggtaggcactgaagctcatccaacagaatatggcttggcgggagggatggggactccgatgcaagggactcaagtccagggcagctcctcggtgcagagctcgaaggttggtcctggggtgggagccagggaggcagagacctcagggagcaacacactcttcctaaatcctcctctgggccagcaactggccaaactcccaatagaatttcaactcacagccatcagcagggaagcccagaactgtgggagccaggaggaggccactaacccaagatatctggaagaggtgatatctgggtagtcttaaacagtgaacgaggaatacaaaacgaggcagaaggctcaacctgagccaagtcagaaaagtgagaaacaacagtgagaatggaagtgacacacagcacagccaacaggtaaagaggcaaggcaagcacaggctgaggagccttgaatgccagaagaaggaggggtgacctgtggaaaaagatccctgggaagagctctgagacctggcaagtgcgcaggagacatgggccagttctctgacatgggtaagtgctcgggctgccccttccacctgccctgggccttcagtgctcctcaccactcaccgctgcagggcaagcaaggtggcatggcgagacccgtaccacctctccagtgtgctatgccaccaggctacccctcacctacactctcacatggcagggccaccccagcctctgttctcgtccacacagtcctcacctcctatctccttccattcccgggcaggtgcagcttccccaggccaccttccctctcatccagcccacccggtggcccctactcagggggcaagctccactagctgccctgagttggtggtgccctatgtccctcacactcacagacgtttccccaaccagacaggaaggcccaagggcaggacccagccccaccttctcccactgcagcgcagccacgcacaggtgggctccatgacagcccgggccggcagagcccttccctccctccaggcccagggcctccccgcaggcccacaggactcccactccttccccacctcggcgctgggtgagccagagtctgtcactcacctgtgtgtcaccagtgagcgcatcaggaccaggaaggtgagtaagcaggacaagaccaaggctgagatgtagcacactggtgggcagagaatgagcaaagtgagaggtcagggtctggagagtctcctggaggcctcagaacccctgccagggtggtgccttgtggggagttccccctgccccaaactgaactctgtgtggaagcctcttggccccacccccaggtctcagatgcagtgtaagccaatgacttcggccaccccattcttcccagtgacatacagtggtcaagagatgaaaccagctctgagtctgcagacctagtcctcaccctgctgttgctgcttctattgctgtgggacctccatccaacctggcatctgcctccagcttcactgcttcttggccatgtggccttcaggagggcactccttctccccaggcccccatttgctcgtgaacataccgcacgccgttatgctgcccagctctcaggataatgtgagccataaggccccatccacgtctgcactaatggtcttcgttcagggcatagagggtgtgagtccacatcggtgtggactgagtccatcagaatagggaggcagccgctgtcacccagctccctcaccctctccctggccatgcacacaatgagtgtgtgcatgatggtgtgtcatgaacaagcctgggtgtttaagaatttcaggggtgcaggctgcaactctcccaccttacgtccacatccagtcttgctctggactgtaacagcaaccccgcaaggttagacagaagaactgttcccactgggctgaagaggaagctgaggctcagagagagggcttcgcccagacagccatgctgctaggaatgatagagtgaggtgtgtaaccatttctaagcagatccagaatgagcctgagatgcctgcaccctgatctcatcagtcagtccagggaagtgttcctggtgcccgtgtcaccaccagaatctcaaggacggggagagcaaacacagaaaaggtgagtgctagttccacatagccacagggattagagtggtggatctcagcaccgatagcgcctttaggatcacctggagctgctaaaactcgcccatagcccagcctgcacccaaaccagttaaatcagaatttctgtgggtgggacccagccttagcctgtgaaagcaacactggtgattcagtgtgcagtcaggactgacagccactgctctgggggctttccaaaggcagagccttcatgatttatttccatcagaaatgaattgaaatcaaccaaccaaccaatatttattgggtgcctactacagtggtgatcaaactttgcttgcatgagaatcactgggactgtgatcccaacactttggaaggctgaggcggtggatcacctggggtcagaagttcgagaccagcctgaccaatatggtgaaactccgtctctactaaaaatacaaaaattagccaggcctggtggcgggcccctgtaatcccagctactcgggaggctgagatgggagaatcacttgaacctgagagacggaggttgcagtgagccgagattgtgccacggcactccaccctgggagacagaatgagactccgtctcaaaacaaaacaaaattagccgggcctggtggtatgtgcctgtaatcccagctactcgggaggctgaaatgggagaattgcttgaacccaggaggtggaggttgcagtgagccgagattgcaccactgcactccagcctgggcgacagagcacaactccatctcaaaagaaaaaaaaaatcactgggagggctgttcactcaaagaggctgggccccactctgagagtttctgattcagtaggtctggcacagggcttgagcaacgggaatgttaaagccaccaggtgcttcccagattcagccagggctaaaaatgatgctacagaaacctaggcccttctgctggtccctagctccctcctccagggccctcgcagggacacttttctcagaagcaaggttgggagaaagcactgtgcatgcatagctccagcctctgtggtcccccttctggagccagctgggctgcagcgagggcacattctggaccatttgctgccaggaggtgaacagcccgcctgctgagcctggcctggtgagtgtacaggctaacacagggttgaagggttagcagcccccttggccacaggcctggcctttgatctccatccatctacctcctacctctctctccctccactggttcccaacttgggcacccccaaaccccagcactcacacaatcttcctgctctttgccacctctgggatcctgtgcctgccttcttctgggccctgctttgggggatagatctgtcttccctcatgtgattgagggcctcaagggcaagtgttcctttttcactccagcactcattttgcagttggggaaattgaggtcaggagaggtaatgcactttgcccaaggtcactcagcttgtaagtgatggaacagagattctaatctagtttgcctgactcagtctgagctctctgtgagtgatgccaggcttatggtccaagtgctgggtggcagtcctaacagaagctctgagctcagaagacattagctccttaggcgaaggacagaccaagggacactggagcccaggttgcgggatggctttggccgtatctgtaatcctcctgggcctcagtattcctcatctgcaaatttaaagagtaactgttgctctgtttggcccaagaagattcaaagtgggagcctttgagcttggaaactgcaacatgcaattaaaaatataagacatgatgagtggaagcagagtcctttgccctggatgtgtctcattttgtctttgagcctcaatgtcctgccctgtgagctgggatcaatgatgctgacctacagggtcactgtgagcaagggtctgaggttggttgtgggctgacctggaccatgtctgcacctgcctatgaaccagattgcaaccagctcagaaaatctcctgggagaggacattttcagctcacccggaacttgtcacctgtccagtttgttgccctcagcagcagttccagggcagcctctagtacgggaactgaggtgctcacggagatggtggaggtggtcagggaaggaagtggtcactccgtgcacctctgcccaccccccactccctgccccgccatgaccagcatgcccaggtctgtaggataaggatgatgttaatggtcaggtacagctgcggagcagctacacctccacctgcaacgctggcagcccacgctctgaccacatgttactcctcagaagccgggggcccatccgtcccagcctggggtccccaagtaagcagaaggcgcatgcctcctgagtcctcagcaccgggctttgtcccaaggtgatggagaaggcccccgcctaggcttcaggagccctgcgttctcttggctgcactctgccctgctggatggcctcaggcaaatccttccccatgtgtcaagtggggacacttctcagtcccctccacagcgctgttgggagcgcccaggaggcagagtaagtaggtggctgcaggaggcatcagaccacagaaggggaagccaagatggttccctggttcaggagctcattgtcagaggagggaaggagaaaggagacggccccaaaagacagggagtggggaagagaaagcctgtgccctgcccaacgccagacccctgccacgaggattcgctcagaaatcctcaccatctcccttcgccgtctcttccctccttccccaccctcagctcccccatcccatggccttcctcatctccatgcctggatagttggtcagagacactgggggtggtgggggaagatgccacagaagcaggcaagggacaggagctgctgagatgtcccttcaggtttcatggaagctcagaactggaagcgccaactgccacaatttggagatgaggcaatcgagacccagagagaggaaggaatgtgtccaagggcccccagtgtgtccatggctgactagggcatagaccttgggtctccccgctttcattccccactgcagccctcaggggctccctggaggcctcaccttccagagcccacagatggtgcttcaccagctccaccacctcctgcttgtcctcggagagcacgattccaaagccggccagcaggtaggagacatccgtggtgacccctgccctcaccttctggatagtgggtaccacgcccaccagcagcagcagggccacctggaagagccccacagtgagggccccatcccaggaaagggttttctgtgctaacaggggagacgctggggaagaaactggcagcacacaggccccagccacatgcccattgcccatcagtgttcttatctgccccttagagcagggatctcacgcctctaaatgaggacattacagacaggtgcaatcacagcctaataggccaaaggcatgccttcgagcaccgtaacttcatatagtcagccctgcgtatctgtgggttccacatccacaaccaaccaattcaatcaagcgcagatcaaaaatatttggggaaaaaccctcaataaaaaataacaattcaatacaaataatacaaataaaaaataatacagtaggacaacttcttcttttttttttttttttgagatggagtcttgctctgtggccaggctggagtgcagtggcgcgatctcggctcactgcaacctccacctcccaggttcaagcaattctcctgcctcagcctcctgagtagctgggactacaggcccgcgccaccaccgccagctaatttttatatttttagtagagacagggtttcactacattggctgggatggtctcaatctcttgacattgtgatccgcccgcctcagcctcccaaagtgctgggattacaggtgtgagccaccacacccagacataggacaactgtttacatagcacttatgttcgatattataagtactttagagataacgaggtatactggagaatgtgtgtaggctatatgcaaatactacaccatcgtatatcagaaatttgagcctttggattttggtatggaggggtgttcctggaaccaacccacctcagatactgagggatgactgtgtctgcacctctatctatttacccatcatctatctatctaaactttggaatgtaaaatttctggtttttctatgttgtgaaagtaaatgagcacaggaattaaagctggacagacttggattcaaacttaggctacgctgagatattagctgtgcagaaacttggccaagtcaaattcacctctccaagcttccattctccccatctgtaaagtggagaataatcatacccatctcccaggattttaattgttgttgttggttttttcggggttttttttttttcggaggtggtgaggcagagtttatcaaacatgttgtcttgctaaatcttcccaattactcaaagaggaaaattattctattttctcctttttacagatgagctaacaggttcagagaggttatataacttgcccaaggccacacaggaggtaaatagtggagctaggatttaaattcgtgtttatgtggcctccaaaattaatgctccgagtcacttcatgagtccaagagtgaacaccccggcccttctgggtaggccagaactcccaagatggcctgcagcacctggtcagggttctggatggagcacctggagagctgggttgggccggaactgctccaggcttgggggttgagggcagggctccagaggcagatggcagtacagggtgagggacatacctggtaaatggccgtccctgtcagtgtagctgaaagcaccagcttcagcgggagatggaatcctgtagtcctcaaaggaaggagtatggtgaacagcaccactcaggcccgggagccctcctccctcccaaggggcccaggaaaagggccagcaggaccctaaatgaccaaggccaggccagggtcttcccgctgtcccaagctggtagttgtccctcttgatgacaaggattctggggagcaggagccagtcctccactgcagccattctgtgcaagggagggtaacgtcccctgtcacgctcggcctcagctcccaaccccatacctggctgtggagtgtagatgcagtgtctcaagcagacgcgggcccaggacaggaagccatgcttggaggtgtggtagctgcagaaagacccaggcaggtgcggggtcctcaggggaagcccattccctgagggccagccccagaggctggtcattcttcccctctgcccctgccatgctgcccagtgccagcttcccaagcacggctgctaaccagcccaatccattggcccacaaagggtgtgtcagagaccccacctgcttcccagcttcttcctgcaaaggaggttcctcagatattcctcagagtagctgctctgcagcccctgtggagacagacaattgaacaagcagatgagatctgcctcgacccattcgtgggtccctggctcagggaactagagtgttcaccaagcaggtgctccataaaaacctgttggccatggcggtggtggtgagtgtggatggggctgacctgtggggatgaggtccgtgccctccaaagcttcccttttctctctcacaaatacaaggccagtctcctatcaaagaaccatcaatgccaggaagttcttcctaagatctgtctccaactctcgcctgctttactcagtcacatctcttcaccgtttcttcccacccctagccctctggcctctgctagctgaaactggggcaaagggaagcttgtgtcccacgggcacatcctagaccaggacacagaagagggtcattccaggtcagacaccctcaggcttctcctgctgccactgcgcaagggagatcacaagggtgaccagatttgtctaagccacattccaggccttaagctgcctgtgaagtagcagaggcccatgggaagatggggtgagcccctgcctggaatcactgggagaacacaggctgttgtcacttgttgccatgacaaccctgggatcccgggcaggagtgggtcagctcaaagcttgatgggggtcctttgagacttaaacctctttgaccaaagtccaaagaggattgtacacctctcaagcctgggaggaaaggctggcaatggagagagagatggggtggtggaaaccctggaagagaaggtaaaggggcatgcctcaggcactgtgtcgtcccggggggccgctcccttttcagagccagctgtaaacaggaggggacacaggcttcctcgaggggtgttggcctcaataggcaggagctacaagcgctcagaactccctgcctgccacgtgggagccgagtctggagtccgtgggccttctcggaccagagtagcccaaaagggacccggggttctccatcctgcctagggatctcactcactctctggattcagtctgaccttgccgagttaacacccggtcccagcccctctgctgagctccagactttgagcagtacaccctcaggaccaagcatcatcccaggagcacctgctcctccctccaccttccctgggccagcagctggcaccaccacctacctgctggctggccaggtgcctcccatcaagcctttccttcccctgccctgtctgaagagaagccacgccctttggcctctatgtcttaagactttctcctgagtctgttcttctttcccctttgagggtctctgcagagctttcttcctcctcctctctcaccagaaagaagtagtggaccccgccccctgcaccacagtcccaacacccggtgcaggtttcacattgcactgcaggtgttttgtgccgcatctgtctcccccaccacactgggagctcctggagatcagacacaagtccatcagctccaagtccacagcactgagcccggggcctgacatatggtaggtgcttagaaggctttttagtgagattgaagtatcttctaagaattctcttttaccatgatgcattcatccatccatccttccttccatacatctttccttcgatccatccatccattcatccatctattcaaaaattcaaaaatatttgctgagtatctattaagggccaagacccacccagtgctgcaaatataatgaacaaaacagacacaaaactatctcttcccctttactcatgctctttcccgtgcctacaatgcctgctccttattctctcatcactctagatctccctgtccttcaggcccttgtagagtctacctcctctaggaagccctctcagccctcccctttatctgaaattattcaaccacatccaacctagagttgactcataatggagttctgccctgggtgcttcctgaatcatctcattatgtgcagaactcggattaggcacaaggctccaggctgtctctccagccagatctcagtgtttcacagacagagatatgactctcctggcttctgactcagttctgctttgttaagtccctactattcacacagcccagtgccgcgggtatcctgggtgccagtcaagggcccagtccagcttttgcctagggagggaggactaagcagtcactcagcaaacattttctgagcatctattctgtgctgggccctacatcaagcacggccatgtatctgggaccacagatacgggggagtagggctgtcttgggtgctgaggaagagctcatcccaggcctgcccctttaccttggagcctgctcctgtcctacggctgaagcttctcaccagctgcacagggtaccaaaggctcaggaatccgaggcccagcaggagaggcagggaggccagcagggagtagtacttgtagatctggacagacaaacacccagacagactactttccaccttcttcccccagccaagaaccagaatccgttgcccttcccacctcacactgggccctgagggtggtctggggggccatgggaaggcttcagctctatggttcccaacctgccacccagcgcaaacctgcccacttccccttctcgagccctgcagagatgctcacccctcccccaggctcctggatccccacgggcctgagaggagccaagaggaggagatcacttgattccctcctgccccccactggaaaggacacctctttctgtttctgtgttcccggagcattaggaacagttctgaaaatcacacgaaagcctgcctttgcctacatatagttttcaacctgagcatcaggaaagtctatgccctactcctcagggctgaggccttcctgggggtgggctttttgtatactcattcatttatttgttggttcaatatacttttattgagagcttagtatgtgccaggttctaggtggtgaaaaaaagccaccaagttccccctctcaaagcaacctcttagtcttcacctccaccctgagggactggtgttatcagctccatggacggatggagaaacggtctcagaaaggtggcactgtttccccaaggcacttggtaccacctggcatcattttgtttgcgtgtcatgtctgcccttctgaagtgacggctcttgggaggctagggactgtttgtcttgttcatagctgtagtccagtgcctggaaatgtccctggtacaaagtatgtgcttcaaatatgttgttgaatgaatgggtgagtgaatgaatgaagtggtgaagctggattcacactcaggttgtctggctctaaagcctgtaccatcactctttgagttctagactggacagcttcacagccccagccagcagccagtgagcaaggtcctgaggttccggaattctcctctcagccctcttagaccatccctgacttcgcacttgccggcctccatcaagcttcactcccattccctctccagcctgaccaaagggaagctgggggatcactaacacaggcattgggggtgggggccatttcaggctttctcttccccctactctgcccacttccccttctccgccacctcctagacttaaagttcctgagggctgggcccagccaccttgttccctgcctctcctgcagagcagccaagcttggaaggggcacatgtttgaaggcatggaatcccatgcacaatggaaggctgcagggcggcccatcatagaatcagagctcaaaggaggcactgtggtttgagtaggttgctctgtgcgcccctctgccctaggccattgtgatcagcggttaccttgggcacctggggacactctgccctctgccagacctggaccccaaggtgggcccaggacagcgtgctgccgagcaggtgtgcagctgtgtggccagccgtggcacaggcagccagagggtagtagagggcagcataatagaacagtcccagtatcttccaggcccctggaaggtgaaacaagcagagagacccatgctggaggggcagacatggggcctgcagtgagcccacccaggcctctcttcggtctccagcttccaagcccttcagcacgttcagtgggcaagaacactaggttcaaatccaggctctgactagtctcaactctgtgatcttgggcaagttacctcttggagcctcagttttcccatctgtaaaatgaaaataatcacagtatattagcaagggcaaaatgagaaggtggatatataatgcttagcatggtgcctgagcaaatactcaatttaagatactacttccctggctctcagttcctccattgcaaaatggggctaatatgcatactttgtagcatcgttgtaaagactggatggtctaaaaaggtcacgtctcaggatagcagcccatctcattgacagctgttcctgttactctcatctccttgagccaagcttaaaactccgagaccccaccctaccccatcccatcacaccaaccccagggcctgggggtcagtgggtaccttggctgggtgctgaggcgagagtcaggaagggcaatgcgtcctcgtcggggagcagcaaacacagggagctcaggaggaccatgaaaacagcagcaggcactgcccggggcctgtccccagccaagaaatccacagggctagcacagaggcaaggacagggcaggagggagttgctcagcccctgcacccccattacctcccagctgtattccataaatcaaggaggtggagtcagtcccactttctagatgggggaataaggccccttcattcattcattccatagatatttgtggagtgcctcttatctaccaagctctgggccccgtgccaaagggacttgggacacacatacagtgggaagaagccctaagactgctcctccgcccaccctggaagctccaggaagcagccacctccacactaattggtctgtctgagctggcaaaccttcagagaactcagcgagtcacaacatccttgtacaacagccgccgccctgggctgggtgtggacccggggcagagggcagacagcgggcatagctgtcccaggcatcacccttctgggctcagggcaagccactcagacccacagcttctgcactgcagcttgcattcatgctctgagaggttcattctccctcaaacactgccccagccagggcaagctctttctggggccaaccagagaccccaggctggttccccacaaaaccagcacagcaagacctgcctcggtgcacagtctgggtctgggatgtgaagctgtctacaccaaggagccacccatcacctgccccaaccctttggtctctcgcacactagcttgcccagccccatctcctcaggatcatgcctgtccaggctctggagtcacagggctgaaggagataggagaagaaagctccagctataggggctagatgtcagtccccataaatctgccttcaagcattagggtccaggtgataccctcagggaagatgacggtcaagatggcattgggatggtcacgtcaatccacacatggagggctgcctgagaaggtacactctgacgctgggtcctgtcaggcttgtttccctagggtctgggttggagtcctttctcccaggcgggcttgagcgagtccctcccccttcctctgggggtcctgactaaacctggagacctaggtgggggtgaggaaagctccaggctgagggcgatagggatgtcattaaagccagagctgccttttaggtacctaacaaatcacccaccctcccagagggaccctgtcagctgggtcccctgagtgggggtgcccaggccatggtacaaacctgggcaggccgggcctgccacgcacacagtcaggccagagctggcggcgcctcaccagcatggccaggagcagcagcacaaggatctgaaaggagagtgcagaggagggcttggggtgcccaggcctcccctgagggtctgagtttgagggcttggactcaggccccaggatatcccctacctgcccagtgcacactcatgtgacatcttggggactggtcaaggggtgacagacatctggaaggttggacttgcatcctggtttgggcctccaagctgggagaactcccagatagctccccccacccaggatcttccagggccccccttcaccagccccagtggggaacacaggtcccactgcccaggctggcagcagcttgcaagccaggttcaacttgggttggactcactgacagcgaggccaggcaggcgtggtacaggccgggtggtatgctggtgtggcaggagggcacttccctgcagagcaaatgaaggctggctcaggcctgcgtcaggcccccctgggtgtgcagatgggtctggggttcaagactgttcacactgaggctttacccactacctccctcaaccctctgatccctcctacacaagccttcccagtcccaccttctcagggtcattctggggccctcgtgtccctgtgatgtgccagccccatgccaagctctggggttataagactaaaggacatgggaagctcccaggggaagcagagtagaccggctcggcctgatcacttattctcttttttttttttctggagggacagggtcttgctctgtcacccaggctggagtgcagtggctcgatctcggcttactgcagcctcagcctcctgggctcaaaagatcctcccacctcagcctcatgagtagctgggaccacaggtgtgcaccaccatgcctggcatttttttttctgtatttttagtagagacagggcctcaccatgtcgcccaggctggtcttggatttctgagctcaagcaatcctcatgcctcagcctcccaaagtgctgggattacaggtgtgagccactgtgcccggctgagcacttattcttgctcacccagatgcttcctgtccttcaaggcctcccctctccagggagcccctctgactgctcctggtctcacagacgtcttctcagaactgcagttgagcacactacctgggtcaagcagtcaagggtttggccctgtgattcgccctctactcactgccatctgaggttggtctgtgactaaaatgatctcccctggtccctctcttttcctgcttccctctcattgagagcctccatggacagccatgcaggttgcccactgcacaaagatgctcagccaagggaacgagcaggccaccctgctcaccaaacccagcacctgctgagctgaatgcacctaactggggatccctttctctaattccacagaggctccctatggcctggcaatggtcctgcactcaccctggctgagcgcagaggtaaacccacagtggagataggggtcactgaggacaatgaaaccctccgcttccccagcagaatcatgtggtggagaaagggagtgaggcaggagtcctgagctcagggctggccctggccctgggagagtaggcaggactgggtccctggtgagcagtagagctccgggttttcccagcttgggcctgggagagccagagggagggtggcagcatgggtgaggccagtggggtctggtgggcgagggcctgagatggagcctgggctgccgccagtccctgcctgcacagagggcttagccgcccaccaaaacgccctccactgtatgaagagaggcatcaaggctgcattatccaggggagtgcagagccctgggatgctctgctgggtcagctcggtctgtcctgctcgctttctctcaggaaatcccagcgggtgagcggtgggaaagaaaccagtcacttggtggagaggcagagtaagtcagctctgggcagcttcttggccaggagaccagcctcttcccaaagtagaactgggatcgtgagtagcagccacactgactccagtgtcagctccccacctccagctccaaggcctctcactctggtgcgtagggcagccctccctctcagccggcatctccccgcatgactaggtcccgctccacctttacacctgggcccggcagggacttggaaaactgtccctggagtagtttgaccattttcctatggaccttaccccaaaccacccctacccccagaaatgccctccagggccctgcctgggggagcctctggccctttctgtatcacctgaggtccccatctgacctctcagctcagtgtgaggggtcagatggggatctcaggtggcatagaaatgagcaaatatttggctagtggcttgtggccccactttttgtgccatgggacaggcaggatggcacagacataaagaccttggagagggtggtgagcttgatcctgggacaggcacagcaggtgctgaaggatgcagaggagggagaactttgggcaaaaggaggtggtatctgattggagtttaaaaaatggttagtggctgggagcagtggctcacgcctataatcccagcactttgggagactgaggcaggcagatcaaccaaggtcaagagtttgagaccagcctggccaacatgatgaaaccctgtctccactaaaaatacaaaaaaaattagctgggcgtggtggcacgcacctgtaatcccagctactcgggaggctgaggcaggagaatcacttgaactggggaagcggaggttgcagtgagccaagatcgcaccactgcactccaacccgggcaacaagagcgagactccatctcaaaaaataaataaataaaagttggttagcatctctttaggcaaagaaggggagaggcagctccaggtggagggaagtgcatgaggaagcagagaggcaggcgacaggcagcgtggctggggctgggcaggccttccagtttgattgcagcccagaggtcaggtgagatgaggttacagcaagcatgggaggccccaggaagccactgagggtgtttgagccattgaatgttctggattttaggacatttctgtggctgactccactgccatcagtgttcatccaccccaactccagcctgagagtgctggggcactgggcactccggagttcttcaaagctctgatgcaacatgtccccagggtgtctgactcacacagacagaggtgaacccaagttcatttccttgggattcccctgagctcccaattttctgctcccactttgagggcagggggatggcaggcagctcaattggtttggctaagtaagtagattcaaacaaatctctttattcttatggatgtcatgccctgcagtgggagaaagaagctgaatcttctagatgtcacccacatgagggactggactccccatcacccagtgcctgacatacacacaactttattctgagacaacagctatagaccacagctacatttacaggcacctggcccccagccagtgcccaggccctgaggctcccaaggacacagcttcagattagagccttcacctaggtcagaaaccatcctcatgggttcctgggcctgtcctcattctggtctctcgcaggccacacatacacagcaggatatgtggagcccacaggctctcggtcagtcaggcaagatgagtggggagcacgcccttgctgactgcaggctattttccaggtggtcagaaccctgagtcctccaaacaacagctccttccccgaggcctgggtggagcctctgtccctgctggatgacccaagcccagccaggccgcagccccagcccctggggaggcacgcaaggatttttccttctcaagtttcaggttttgatggagaacagatgtgcacacatctggctcggcaacccccagcctcacctttctacttctccaaaccgtcagacagagcagggagataagggatggggccaggcctgggaacaacaggggagaactggctctgggtcctacacaggcaagacatcctggcaggaggtgggggacacagaaggggcccagctcctccaccagggtgcccagactaaaccccggtagaatggacccaggcaaagcagctgtggctgggttctcaggccaccctggggcgggctgccttcctgctcccaccctcacctgggctggcctgagcacttctgctaaagggaataggctctcctcatcctctgagaccatccaaagacaacaagggtgcttgtttcctcagtgacttctcaccaggctttctccctttggttctctgccttccccgaatcccccagcctgcccagagaacttgacacttggaaacaccacacccaaatgctcaccacagagaccaataaccccttgaagggaggtctgcttgcctcaactgctctcagcagcttctccatcctggctatgggccagaatcacccagggagccatccctgcagatctgaatcatctgtatttttaacacgtcacacatcatacctaaggtgaccagccttaggtgtcttaacagcagggtgagggatgttgttctcatgtaacagaggcagagactgaatgaaccccagagaggctgtgacttgcccaaggtcacacagcaaatgagtggcagagccagacctagcagcccctgcccaggagctgctccctggccagttgcaacctctgccatcaccccattctgatggctgacagagtgaggtggggtggttccacacttacccctctggctggagctcctcgcccccctggggctcatcgatgtaccagctgccataggagtagtcctctgtggccccgggggaggtctggttccctgctggctgggacgacattctctggcccttctcctttgaccccaggcgagagaaaaaaaaagccactacagatgtgaaaagaggcttaaaagagaaaaaaaaagaaagaaagacggaaaacccaaacaaagaaacatttctctttaatcctgaaggttactttcttacttttagctctctgggaaaagcccgtctgggactgagggcctgagcaagctggcacgggaagaggacagggcctctcgtgtcccctcctcccttcccgcccatcgcactggtcctgcagagatagctgtccccttggggccccggggctcccgctggcgcatctgtctgaccaaccaccagcaggcgtgtgttcaaaggaccattttcaaagaaggcttgtccagtctgagctgcctaaagagacgccccttccttcccctttcccaagcccacctagacagacccacagacacaccagaagggaggcccagggaggaaggagttgcagagatgaaagggtaggcagcccacggccagctccgcactgcctgcctgggccctcccagctgggctcccttgagcccctcccccagcctcagcctgcccctttctggcccctttgggcctcggtgatggaaatacaccataatccttgacaaagcccccctcctgggggaggaggccccagcaccattggcggcctgagccctgcaagggtgtggccaggagccacccccacccccgcacctgacttcacacacatacctgccttcagcgcctgccccagagctcccaagcccctgcccgccacatctgcagtgccgcacacagacaggagaccagcattacagcaacaaccgagtgagacggaccgctggggctgggctggggcggaggcagggaaggggaatctgtccgtttcttctcctagggtttccatgaaggaggcaacatgtgtctcattggtaaaccctttttgttcctacaagttgatttcacaaggagataactcacccccacaaggcggaaattagctctttaaacacaaaccagacccacgggtaggcaagaggagccccgcctgcctcctgctcctcctggagtgaggttgagggtgagcaagggaaggtctgggccagggaggagggctcctccgcattctccctccccaggagcaggaccctgccccagcctggaggaaggggcgagaggcagaagaaggtagaaagcagttctcaggccactgtccctggtggaggtttaggcccctaaaactgtgagggtctctgtccttccaataccctacaaggggcttcggcttggaccctgtcagctaaggcagtcattcaacagcttttttaagaagacattattcatttagtcttttaacttaaatttattgaacacacactatgtgccagcactgttctgagccctgaggcaggagagatgacagttcagcggggacacagccagataactaaatcccctccaaagtctgagggttacaaagggaatcacaggttgagctggtctgtaccatgggaaaccaaatttagtccaagagcatttggggatggggggagattcctgaagaaaagaacctttccgtggtgatctgaagggcaggggaaagtccgctgagcagagggtggcaggctcaggatggggatgggggtgggggaaagtgtgttccccacagaggaaacagcacgggtgaagtctcagagtagacagggcttgaaatcctggaggctctctttcaaattcccaagcctgcagggcaggattaggggctgagcaccctgctagcctgagttcctcccccttcttcccaaatggcccttcttgcaggaagagggctctgttgctctccaccatcccacagagatatcagcatctgctgactcagagctgaacccgagctttatttgatgtaatgaggagcccacactggcccttctgatcccagggatgcgggaaacttgccttccaggcgcgagtgtgagctcccggagggcgggactctatccctcccacccctcctcctgccttcccctgatgctcagcgcctggcccttgggtaagagggacttcagaaattgagcttggcaaagccattgcttgttctggcggccagtattcatttgtgggcctgtcctatacaggcggctgctgtgccctgaggttcaccagctgggcttcccagagtccccgtgcccacaccagaggccagcaagcccttccctgctcaggggtctcagactgttaccttagggagcagccaactcccatctgattttaaatccacctccaaccattggagtccagttccagacagggagcccactccctctacaaggcagcagtgtcaggggttagacatccttgcctatcagaaaccatgccctttggccaggtgtggtggcttacacttgtaatcctagcactttgggaggccgaggcaggtggatcacctgaggtcaggagttagagacccagcctggccaacaaggcaaaatcccatctctactaaaaatacaaaaaattagccggacgtggtggcgcacacctgtaatcccagctactagggaggctgaggcaggagaatcgcttgaacccagggggcagaggttgcagtgagccaagatcgtgccactgcactccagcctggacaaaagaggcaaactccatctcaaaaaaaaagaaagaaagaaagaaaagaaaccatcctcttccttggaggaagcctaactctgccttccccaggctggtttggcagcgagcaagatgagtcaaggcctgcaccaaatggaacctgatgtatggtagggcttaggggagacaacaccagaggggaagtgaagtgggggaagagaagagagacgggagttggctgtttgagacaaggtggtcagggaaggcctcactgagaaggtggtgtgttgctgataccagaggggagagagggaggtaccagttgggcactgtgttcatctgtttcgcattgctgtgaaggaaaacctgactctgggtaacttagaaggaaagggggtttatgtggctcacagttctgcaggctgtgcaggaagcagcacggcaccagcatcagcttctggggagggcctcaggaaacccacaatcgtgatggaaggtgaaggggggtcaggcaggacacttggcaagagagggagcaggagagatgccaggcacttacaaatagccagctctcacatgaactgatagagcgagaactcactcattaccacagggagggcaccaagccattcaggagggataccccgcaatgacccaaacaccacacaccaggcctcacttccaacactggggtcacatttcaacatgagatttggagggcacacacatccaaaccatatcgggcactgaagaaaggcaatcaggttgcctgaaggagcctccatctgcccaggggctgcagccaggctggcagaaagggaccccagctgagcccaggcacagtcccttccccaccccccacggagagcccagtgccaacaataccacctccctcctcatgggaagacacagaggccaccaagggaggccctaagcagaggggaggaaatggtgagcttcgtccttttcccctggtgggggcctagcaagcagagcgcagccttgtgcctggtactttggccagggcatagctggaaggtccagaggtaagggccaggtttctgcatggcagtggagaacgcctggttggggaggccacctagccggatttgaaccctgggactggctatgtggccttgagtgagtcttttcctctctgtgggtctcactgtcctctctcaaatccggcctggagattctccagttgtgaactctccccacaaggcccccgtccctgcacaccagtaaccagttgtaacaagaaggtcacagagagtggttgtgacttcctaggtgcccccattgcctcccacctgccccctcctggcccccagctgccctgcccagtctggtgcgggcagggtgggcaggctgggttgaagatccatggatagcgggtggccgcgtggctcaagctgcaaggtgagcccacttcttgagcccaaggtacctcctcagcttggggctagaatcgcttggagctcccatctgcaaaatgggaggctcggctctgagctgttaagaaagatgctacctgggaagacggcaggaggcaagaagtgttaggaagagaaggatggtaatgatgtgcccctgaagaatttctccaaaggcctgggcagcagagtcaagggcctgccctctggagctggctttaaaggggcactgatacccaggaaggcccagccctgccctcaggagagcaaaagtgctcaaaagacagaactgccaaagcctgaggagcggggagggaaaggaggagatggcttgggcagtcttgcaggctccctggaggagggggcctggagcagggccctgaagccatggaagatctggaatggtaacaagaatgaattgacacgtgtctcaggagtgccaagaagggaagtctgagagacaaggagagagtagcataagggtcagggcagggctccctcgctgtgaccagcatgaacccacgtgggcactcagatgaggctgatgccagtatccaaggagcagctcaaaccagcaggtctcccaactgggcacagattggcgggtggctaagccctgctcactatgggaggaggtcctaaaaagcttctggactctgagccagtgaaggccatctgccatttgggcttggcacagagctgctatgcccctcgggttggagctggcccatgaaggccttgggacagggcttccttcctctcatgtttttgttcaagttgattaaacctgaggaatttttgcatccaggagcagaggcccacgtgcatttctgcgggagcctgtgattatcaaatcctcaaagggcaaagtgccaagcttagaagaagctaacagcaggccagaaggaatggggaaggccagcagcatccccagaacctcagaaacatcccctcaaggactcccagatctcccagagaacctccagaatctcagcaacatttctgagtttcagtaatgccataagaagccctgcaacctcagtattgcccccaagaagccccagaccttcagtaacacatcagaaccactgcaacacctcaggacactcaaactctggcaaactcaaactctggcaaatcaaccacagattggaacaagatgttcaaaagcctgtgaccatttgcagaaaggccagagacccccgttgctctccaccctcccatctcagcccttgactctgagtccagcagcaaacccaatagtttacaatactcaaacctcaggtacacccccaacttcgatagcacggaagagaacacgcaagagaggcgttccaggagtggggggatggccactgtgcccacctgtgcagcccagtccccttgagagtccatgaataagcagccgagagagtcaacctcatgcgggcccgtgagcttggggtgtgccctcagtggcacagcacactcacacacacatccaactgcccttcgcacacatacgtgcttaattctggcaccagaccaagtctgactccacacagtgggctggaaggcagtgtcgtcggctgccgtgctcacggcaggaagagtatgggtgactctccacctcctgtctctctacctcctacctcccctgccatgtgggagggtcagaagcaccatctgatgtgcccttcctgcaattctcatgcccccctcaccaacagcatcatcataacataaaggatttagaccaggctgttctggtatgagggtggacactggtgaggaggaggagggtagccggctgtgccaggggagcagcatgttctttccctcccagagggctaggctagtactgacctggaggagggaggcagatttcagctcagaacaaaggtagccttctagagtagtgaggcccccatcaagggaggcaatcaagaagaggctgttaacatcaagatgcaacagagggcttcctgccttcggaggactagacacaaggccatgaagattccccagctataagagccccacgttctccgttcccagcacgttcctccctgggctggccaccgtggtgtggccttgagatgtaggctttgtgctgccctccttcctcactgaggacattgactgctgggcagatcccctgacttctctctccttgttcccttgctgaccacaggacagggctctccaccaaccttttgcccacagccagtcagatccaactcagacaggactctgcgaatgtctcctgccttttggagctcctgctagccccccagtgtcccctgagggcagcccaccccaggtctccaaacttactcatcagaattgctccagcccatcactctgctcacttcctgcccctaggctctgactcctgctcacttcccaccgcacaccccatgtgccttctcgctgttccccgacctgttccaatcccacctggcctcccagacttggctccagcctacctccaatcaagcgctctcctgacctctcccttccttgtctctttcctttcctttattgatctctcccggaaacttgtccctccaggcaagcagggtgctcccaacacggggccttctcctctgagcccagcaccagctgggctgggatcctagaggggtggctggttgtgtggtctcggcagttggccctgagaagtgtccccagcacctgctttaaaaggtgtttgatctgctcctcccggaaggcagctccccccttctccagtctggctctgcccctcctcctgccctcacagacctcccgcccttgattccgggatcagaggaacccaccccacccccatctccagctcaggcacagagcaggggctggggccccacacaacacacagggcggcttgtctccagcggtatagcctctccacacccccaaaccgtttgctcgaaacttgatctccttggccctcagagtcacctcagtggagaagcctgcacagggctttgatggctgagtttccccagatgtggccttagagaagctgaggaaccccctacttacctccatttgtccccatccatcactcccagggggccactgcctgatgaattgccagaggggaaccaccagctcggctcttaataaccggatctgcatcctgctgctgcccagctgggctgagggccctgaccacagctaaggggagtcatcacagggcttcagggctggaattccaggtatgatctattcccaggggaagtgaaaaaggccccctcggagctttctcttctatttctcacttctcacagacaggctggggttctggagtcctgctcttcaccccaagtacatgcctgcaacctccaacgctgctggacagtcggctgcatcccccctcacctgagcacaggctctccctacccctccctccccttcctagagggggtatcctgcagggatgcagacaagactggggaaggaaatggtgctcagagggtgctccacctaggtgctgtggcaagcagggcagggagagagtagataaaggccgggccaagaagcggggccctaaattctcaggagaagggccctggagaggcagtctcttccttgaaggagaaagggagtgccatctataaaaaggtgggaccacaggcttttgtatgtgagattggcttccaatgatagtaaaagaccctggaagagagaaggacaatgccagagccaggcctgcccaggagaggcagggagagagggagagagagagcagctcaagccgagaaagggaagcagccagccagcttggatctgatcaccatcttgtccatggagaagaggatttttagttccaaagggttaaacccacataaagagaaaattaacctttggcacacttttaggaatccattcccaaggaatgcctgcatgcatatatatggagacaaaattcccaaggccgtttgtaatggcaaaaataattggcaacaaccccaatatccatccatcaatgctgataagttgacacactgaagtactattttgctgataaaaagaatgaggtaattctctggactgacgtggcagaacctccaagacatattgccaagtaacagtaaccaagaaagcaagttgctgaacaatacataaatcgtgatctcattttatgcttctttaactaggtagacatatgtgtatgtatgtgtgtacacataaaaagtgaatctggcagacacacagcaaactgttcacagtggtcacacttgggggaggggtgaattttggagaatgaagcaggatttttcacttgtttgaaatgcatattttaaaactcatactgcatgtgtaattctttttaaataagcctgctgtgagtaaggagctgtgaaggcatcactgagctgtgtgaatttgattccgtccccagcccaatattgcacacttcccagtctcccttgaagctagatgtagcccttagactaggtattggccagtgacttggaaaaagagtgttgagcacaattcccaggttgtgttctcaaaaagagaggtgttctctttaccccctcctccttctagctgggtgaaaaacagttgtgatagctggatctcaggcagccatcttggactatgagatagaagtcatgagttaagtagaatagagcagtaagttactggcaaagacagagccttagctaaggccagattataaggctgaaggagactcctgctgtaccccagactccaacacatccaaaagaaacttaagcccagagaggccacatgatgtgccagggtcagtgactgacctaggggaagttttgccagagattcccccccaccactacgcacgcacacgcacacacacacacacacacacacacacacctcactgctttttcccccaagaa

SEQ ID NO: 595 - DNA, 229546 bp, Homo sapiens
  source 1..229546: mol_type = genomic DNA
gacataattttgattacacccttttgacacatttgtgttccagggttccgataattcagtgggcccccagtgaagagctaagctatctcctaacaacgttaatgccaactagaaatattcccaaacacaaatcattgattgttttactctggtactaattgaaatagagcagaaaccaatttctttaatttattttatgacatgttttgatggactttacctacacagaagagctatgtgttctggttgaggaacgacactgcaagaagcagcatatggtagaattaaggacgcaggctttgacattagaccttactttaaataatagctctaccagtgaccaggactgtaggtaatttaattctctgaggttcagcctcttcaagtataaggtggggaagggctcgaggatcatggtggatgatcctaattaaggtttgaggcttgcacctgcatagggaagaatgagtccctaaagccattccctgctggttaagacaagtctcattaattgttcaggaaagtcttcaattaaattgaaggtctggcatactgcaattcctgcaagttcttagttattatcagctctggctggttagaagcagctatgataaacacgggcttcaatttagctatctggaaggtaggtgctgctgcaagtggaaagtttgtctttaagaatatgcgctgcaatttgctttattcactgatgattatattgatcggagttgtctatgttgatacttgtaggggatgaaggagagggagaagtcaacgatgacagcaaattttagtgtagagcaactgagcgaatggtggtgcaggaaacacagaagaggagcggctcggaagtgggaatggagataacatcatactgtggacattcggaatccacagagctgcgtggaaatcagatttaacttgctctctctccccatttaagatgcttctcaagtagcctcactccctaaaacaaacggatatttggcattgcgccacattattctgcagctgccatattttcttgcaggtggaaggcaggcccttcctggtgtaaacaaacaagatcgggccagagtgacaatcctccctgatggcccgcacctggtttataccctctattaatggggtccttcaaaatcatcagatgccctcctcccgcagcggtggcctccacctctggcctggcccagcttacgtggtccagcttgtgcaagatccaattccaactccgggtttccggcttttggccactcaggattggacctgggactggagctggtcggccctgcaggtgctgggcctggggactgaggaagcacagagattccccgcccggttccccgccaacggcgctagccgcgatgccccgcctcactccccgcccccgggatgcagggcgcgtgctggtaatccgcggctcaagccccgcccccactgtccccattctccgctcacctctctccaaggacactgcgcacgcgccacgacgtcccgcctttctccccgccctgccgcggccccggggcgcagcgcgcacgcaatcgcgtttccggagagacctggctgctgtgtcccgcggcttgcgctccgtagtggactccgcgggccttcggcaggtcggtgcaggtctttggagagtattgtttttattttctgccacttttaacttttagggattatttaggagtttcacggccgtctgcttttcgtccccccgattcagcgggcctttatgccgtgtggtcggtgcttttctccttgggtattttctgcttgtcttaaaagaggctgtggatgctcggagcacctgagctcctgaggcaaaggcttacccttgtagcatagtgttgcctcgtttcctggtggttttgttgctccagctctttaaaagcctcccttactcagtgccgcctcgagttaagaactgtgggcaagatcccaagcccgctgcccttccccgttttatgggaaattaattctttctttttttggggggtggggaggggttctcgctgtgtcgcccagcctggagtgcagtagcctgaatatgtcttattgcagcctctgcctcctgggctcaagccatcctcccacctcagcctcccaagtagctgggattacaggtgcatgccatcatgcccgatttgtgtgtgtgtgtgtgtgttttaatagaatatgggtttcaccatgttgaccaagctgttctcgaactcctaacctcaggtaatccgcctgcctgggcctcccaaagtactgggattacaggcgtgagccactttgcctggcctaattctttaaacagaataaacggcgtatgcattgctttccatcttgttaggttcactgcatacagaatacttttctgtaagaaaataggagctgtttttccaagggtgcaatgtcacatgtgattctgacttgagtttccgtgtattttaccctccccttctgccctcctaacgagaactgtgagttggatgcagaagtttctaaaaaaaaaaattgagtattgaaattggctgttgcatcagtgaagaaaagcaacatccctaccacccctcaaaagagacattaaagtagttggattaagggcacgggagtatttgctttccgatttagtgataatgtgagtgcttaatgaaatgactaacacattccctgattatagagctggtcagtggatcttgctgagtttcctgtggacctatgtgaaatgatcggcatctgttcagggtttactaggtgctaagcacctttacatgtgacatccattgaatgctcacaacacccccaggaaattggtaccagtgttatcctcatggtacagtgaaggatactgagacttaggttgcatagcctgcaggttggacacacttctttctgactgctggggagctgtgcttttaaccactgctgatccggcttgttttccccagatgcaggcctggggtagtctcctttctggactgagaagagaagaatggagaagcccctcttcccattgtgagtagacagtaaatggttagagagtagccaggagcttctggaaaccagagttcctttcctcagctgaaaagaaccctaagagtagactgcctgggatggcgtgcgggatgggaggatcactggacctgtgggccagaaacttgggtttgagtcccagctctagctttgcttagttgtgtgactctcagaaagtcatccaacctctgtggtgcttattttcagtgatagtacctgtgggcacataggacctgtggggaatgattaccttttagccccatcctatgacaatatggtttgtttttaaatccaggttagcactgacttctcactgacttctcttgtgttttcagagtgcctttgcattggtttggctttggctacacagcactggttgtttctggtgggatcgttggctatgtaaaaacaggtagggttttgttgttacttagcctcttaacatcttcacgttgttccagtgaaatgtgagtgcctgtgtccctgagaagcaatctcgtttgactcagctttgctgtaggtccccaagctggagtgcaggcttccttgtcagtcttgcagctcctgcccttgccttttgcttatctggtgaagctgagccaggcctcttgtggaattacttatttttgcctctttatctaaaggtaggcaggggtggttgtagtttgttattatcattgactgccattcatcagccatgacccccaagtgccatctctgggcttaagtaggagtcaacctctggcctacacagactggtattttgaagtttcctcattaggccaggcaggggtgtgtcagtggctgtgcttgtttttgccccctagtccttgcctgcattcccaccccaatccctgcaccagacttcttattctcctgatcttctattttttttttaactgcctggccctatttccttctgcttttgtgatttgctggaggtcctgcctgtacacaattccagcccttcatggttgatgaggcctgattagaaagtgttgtacttgagcgagttagagaaaacgccacactttgagacgaattaagagtctgtttatttagctggggcctaaaagacggctaacactcaaagttctctcggccttgaagaaggggctagattttcttttatactttggtttagaatggggtggggggggggtctagttaaaacaattttactgaagtaaagtaggcaaaaaagttaaaaggataaatggttacaggaaagtaaacagttccaggtgcaggggctttaagactattacaaggtgatggacgcggggctttgggcattatcaatcggacgaattcctgggaactgcggatatagctcgccacagtatcttatcagttaattgcattcttggatgtgctgggagtcagcttgcacaagttaagtccttgaggacggggctgccagtgaaagagccaagatggagtctgtctggctctcttagctaaggaagagtcaattcaggtggaaacaaggctaggtgattaaaggaaagggagagtctaaaaacagggttagtaaaaacaaggttaggcattacaaaagaaggcctagtcatagttctgtctaaggagggaagatggccttctttcctttccttagatggaagtgccctgcctattagaggagagaaaaatggggtgggaagaccctgacttctctgagaagatagcacactctccttaacgccttcctgcttgagtccaccttggctgtgagctgtgttgagagttctttgtgctgtcctttgtagggcaggaggtctggtggattccgttagtgaaataagtgcctgacattacaatgcaagctgcgtttgcttccttctaggcagcgtgccgtccctggctgcagggctgctcttcggcagtctagccggcctgggtgcttaccagctgtatcaggatccaaggaacgtttggggtttcctaggtatgtctgcttcagcgtctccttagggcaatcatgtatctggaatattcttttccaaaagaccctggtttggtgggatggagcgagttcttcccacttaatttacgacagtttcactgcttctccaagtccaagtcctcaaagttttaaaataggagaagggtggtgggaattgtcctggttcctgtttattgtttatgtagataatatggaaagatttccataccttgtgaattgtgtgactctcagaaagtcatccatcctctgtgggccttattttcagtgtttacccagtagaattagtatcaaacttgtattacccatatttacccagtaaagtcagcattaaacttgtataagacaaatatgtgtcaaccgttgaggttttccgctgaagaccattggcctcagtatcactaaaatatcacgtatctgggttaggtttgcagctgcgttacgtttttcacatttgaaaatcacctctttagcagtcagctaactaaatatataagacgtagaccatgctttcaaggagctttcaactgacttcactggggaagtaagacatgagcatagaagcaggactggaaaggtaccctgtgagcagcacggacagtgaggacagtgagtggtgtggaggacataagagtcctcatcagagtggttttcagtacatttctgtggagctccacccatgtgtcagacactgctatgagtgtgggttccttgcggtctctacaaaccccgtgtgagaatgagtgccatgtgggagggagaagccgtgtgatctgtacatatcagctggggtggggaagggaggtccgtgatggctaatggggtgtgctggggaaggaggtgtgtccaggtcccagctctgcctaacagctccctccctcatgctccagaatgacttgagcctgcattttccctttctctgatcctactccactcagcaaatgacctcacacctattgtagagaaaaaacagcagccatcaggtggggactcctggagcctttaatctccaagcctcccctcgtcctgtttccctcctttccaacaccagtgtcttcctctgggctttgggtgtcttctccctgaccgtctccagacctttacactggccaggatcctgtcttgtatttgtattcctccttttaggtggatccccgcattgatattcagatgtgcttgtctccttccccttcataaactaccttttttttttttttttttttttgagacggagtctcactgtgttgcccaggctagagtgcagtggcgcggtcttggctcactgcaacctccgcctcttggattcaagtggttctcctgcctcagccttctaggtagttgggattacaggtgtctcccaccatgtcaggctaacgtttgcatttttagcaggtgcagggtttttgccatgttgtctgggctggtttggaacgcctgacctcaggtgatctgcccaccttggactcccgaagtgctgggattacagccatgaggcagcacgcccagccaagagggaaagagggagggagtgggaggccaaaagcctacagcacctggtgtttccccgaaggtggggtggtagtctcccatccaagtaccatgcaggaccggaccgaccctgctttgcttctgggatcagacaagatctagcacattcagggtggtatggcggtagaccacaaacttcttaaagatcatttatgcagctgggcgcggtggctcactcgtataatcccagcactttgggagaccgaggcaggcggctcacctgaggtcgggagttggagaccagtctgaccaacttggagaaagccccatctctactaaaaatacaaaattagccgggcttggtggctgtcacctgtaatcccagccactcaggaggttgaggcaggagaatcgcttgaacccgggaagtggaggtcgcggtgagccgagatgacgccactgcactccagcctgggcaacaagagcgaaactccgtttcaaaaaataaagatcatttatgcctcctctcccatcacacatgatcagcccatttcagtctctgtttctgtccctgtgtttgtggaatagctctccctgaggctgccagtgacctgtgtttgtacaaaatccaatgtacatttttcagtcctcattttacttggccatttagcagttctcagcacggttgaccaatcattttccattctcctggtttccctttttatcctctcattctcttttggcaacctattttcctttttggccactagatattgaagttcttcaggctcttcttgtctactcacttgacagtttcattgaagcctatgcctttaatttccaccgatacacaaatgacacaaatttctctctcctccaggctggactctcatgtattcatctgtccactttccttcagatgtctccaggaatctgcccggacctaacctcatggccacacactccccctgtcttctgttctccatccattcggttcttgattgctctctttcctttctaccaccccctttctgactaattcatcagcaggtcttgtcgacactacctctagcccttatcctgagttgtcctctttttcatctgcacagccatcgtcctagtcccagttatcccctctttcttacctgcattcccaaggacgttccttagctggtatccccatgtaccctctagtttccctgaagtttgttctctatagtatagctagaattacgctttcaaaatgcaactctgggccggttgcggtggctcctgcctgtagtcctagcactttgggaggccaaggcaggcggattgccgagctcaggagttggagaccaccctgggcaacatggtgaaacccggtctccactaaaattaaaaaaggcttcagcattgcttgaacctgggaggtagaggttgtagtgagctgagatcatgccactgcactccagcgtgtgttgcagagtgagactctgtctcaaaaaataataataataatgcaactctttttatgcatccctctgcttagtatcctttaatagcttctcattgctcttatgatgaaaacccaatccttagtatggccttcaaggctctatgtggtctggcgcctcttactcacaaactgcatcttgacttctgtgccacgctgcccttttagggtgaatgtgccatgctccctgtcaccacagggcctctgcatatactgtcccctctgcctggaaagggcattcccatccttcagcttattaacgcctgctgtaatttcagatctcagtcagtcttcacttccttggctaaaagcctagcatgatctccctgaataggttgatccccctgttgagcttttttgtgtagcatcaattatacctgaagcacacattgtaccttgtttttctttgtgtgattgtttaaagtcttgtcccatcagacctgaagcattgtaaaagggcaaagacagttacgattacttttgtattctccagctcctagcacagcgcttgacatgtagtaggtgctttgacagatacccagtgggaattgcatgcagggtagaggaaatagcgtctgcagggcgatagcatctgcagggcatgagaaacaacagcattttggagaaaactaacacattgatggctaaagtgtgggttttgcagaagacaagtggtaagagatgaggctggaagggcaggtagggcccaggctgtgaagggccctatttggccagtattggtatttggacccataggatgtgggcagctagtaatctcccctacttggggaaggaggaataagcataggatgaggcgtgagccttgagagattggtggggcttggtctacttctgattcccctgcgtagaagactaatgagttttgacccttctttgtatctttttcagccgctacatctgttacttttgttggtgttatgggaatgagatcctactactatggaaaattcatgcctgtaggtttaattgcaggtgccaggtactttcattctattactcttctttaccatgtagagttcagtttattgcccagaatactttatgcattcaaaaccttacttgtttcagagtatctgatgctatgcatcaactgacgtttgacttatacactaataggagatgcttcaaaaacaatagttgatttaatgtcaaatgacatgagtatatccattcactgtggagatggctttgttctctggtcctagctccttcctatatggtggcagaagttttattgcaaagctatgactgcagccttttgtgtgacttgcggaggatgtgtgggggtcccatatttcttaggtgtgtaggtgtcttttgtagaaaattttgctaaaaggaaattttgattgaatcctgttttctaattttgattataatacctaaaccaaattgtggtttttaaaaaatgtagttgtaggccaggcacggtggctcacacctgtaatccaagcacagtgggaggccatggcgggcatatcacttgaggtcaggagtttgagaccagcctggccaacatggtgaaactcctctctatgaaaaatacaaaaattaggtgggtgcggtggtgcacgcctgtaatcccagctactcgggaggtcgaggcaggagacttgcttgaactggggaggcggaggttgcagtaagttgaaatcgtgctgctgcactgcagcctgggcaacaatgagtgagagtctgtctcaaaaaaaaaaaaaagttcacttgttaagtatgataaagacatcctgaaggcaggggaatttttaaaatcctgttttcaagaaagattacatactctactctgatcatagtcgtgatgctgccagtataatattttatacctgaagcaaaagagtcagtatggagcaaggtctagaacagtaaactgagaggctggagtctaccataaatcagatctgtgatggtggggaggccttgctttctcttgcctccatttcttcatctcttcaaattactggcagttggattaggatctagctcatgtgtgctattttaagacctcagtgaaactgtcccttggcttgctttttctctggttcccccagggatggaaattttacctctgaccactcttgccttagtacctcctcccccacacagttgtgaggaacctgcagagtttagttccttaaaaacatagttgcctgttctatcctttacctgatgttttctatcttacttgttttaaacagtttgctgatggccgccaaagttggagttcgtatgttgatgacatctgattagcagaagtcatgttccagcttggactcatgaaggattaaaaatctgcatcttccactattttcaatgtattaagagaaataagtgcagcatttttgcatctgacattttacctaaaaaaaaaaagacaccaaatttggcggaggggtggaaaatcagttgttaccattataaccctacagaggtggtgagcatgtaacatgagcttattgagaccatcatagagatcgattcttgtatattgattttatctctttctgtatctataggtaaatctcaagggtaaaatgttaggtgttgacattgagaaccctgaaaccccattccctgctcagaggaacagtgtgaaaaaaaatctcttgagagatttagaatatcttttcttttgctcatcttagaccacagactgactttgaaattatgttaagtgaaatatcaatgaaaataaagtttactataaataatatttcctatggtgtcttcattgccagagctggtctagttcatagaatgagatgttgctagatatagaaacttgaaagtattttgttgatatttagaaattacctattttgagtaatttaaggaccaaggaaagttatttgattgtacattgcattgaagcttgtttcaaaaatgatctctgaggatttttttgtttgttttttaagagacagggtctttctctgtcacctaggctggagggcagtggtacaatcatatctcactgtagcctcaaactcttgggttcagtcatcccacttcagcctcctgaatagctggtactactggtgcataccacctcgctaatttattttatttttttgtagagatggggtcttgctctgttgctcaggctgctatcaaactcctggtctcatgcgattctctctccttggcctcccaaagtgctggggtaatgagcatggccactgaggatttctaagatttaggactgtgtagcaaaaaaagaagaagaaaaaaagtggttttttttgttaattagttcatatataattgtgaaactagaagacccatctagagcttgaatcacctagtttgggctctacattggacacatttactggatactggtacgtttttagttcactttattcatgtttcaacatgaagaattaactcaatctggtgccctttgttttagttttcattccctctttaaaaaggtaaggagctgggcgcggtggctcacgcctgtagtgccaacactttgggaggccgagatgggtggatcacctgaggtcaggagtttgagaccagcctggccaacatggtgaaaccctgtctctactaaaaattcaaaaattagctgggtgtggtggctcatgcctgtaatcccagctattcaggaggctgaggcaggagaattgcttgaacccaggaggctgtggttgcagcgagccgagatcacgccactgcactccaacctgggcgacagggtgagactctgtctcaaaaaaaaaaaaaaagatatttgctactgatttaccctaactgatactggttgagtttagagtataattcagacactttatgtatttgcataagcccctggatggtggtcctagttttccatccttttttataggactctggacaattaagggctcttgtgttgcagtggtagaggcatcagaaggccacagatcatccaaagctatcatcctcccaggcttccatagctaagattttgagtctcaacgttggccattttttcatgtgtcatggagtgtttccaaagggcacacatttttgccaccttcagtcctagaggaggacctggctcctcatgaatgacaaggttccctgaatgtgggaattagtttaggtgccaagtagatccccatgtgactatttgatccccagcaatcagcctggaaaattctaaggctgcccacagatgagaggcaggagatcttcatagcccttgccaagtgccctcatccctgcttctctgcaaagatccctgagtatttactgcctaagggttgtgctgggtcctagcagtgcaaagaacaagccatggtgcttgcccttctggagtctggtggaggaggtggacatctaaacaaaggcagtatagaaataagtgtatgatggaggtagatccatattactgtgggggcacaaggaggggagtgggcatttctgttgagggagtcaaggtaggcttcacaaaggaaccaacagttaagctgagtcttgtcagttgatgcatgaatcagttgacatgaactccttttgtgagttgtctgagaaattcataggtaaggacggggcaaatgtctcagagcgagcaatatatacagtgcctcaaaggcatgaaactatgtagcataactgggttcaaccctttccttagagatctaattcttttttttttttttttttttttttttgagatggagtatggctcttgttgcccaagctggggtgcaatggtgcgatctcagctcattgcaacctccacctcccaggttcaagcgattctcctgccttaccctcctgagtagctgggatttcaggtgtgcaccaccacacccagctaattttttgtatttttagtagagatggggtttcaccatgttggccaggctggtcttgaactgacctcaggtgatccacctgtcttgcctcccaaagtgctggaattacaggcatgagccaccgcaccaggccaagatctaattctttttaatggcttttaagttgtacggatgattactatttagtttactattcccctactgatagaaatatgtcttgtttaatgcctttgatagccgggagcagtggctcatgcttgtaatcccaacactttgggaggctgaggtgggcagatcccctgaggcctttgatattacaaaggatggtgtaccaagaaatatcctcatggaaatccccgtgaacatgtgcaaaggaatctgtaggttacattcctaaatgctgagtcagagcatctcagcatttaaaattgtgattgccttcagaagaggatgcaccaatttatcctcccactagtggtggctttgtgtaattggactttgtaaaaatctttgacacattaagctggaagtctgcaaacttgttctgtaaagggccagatagtgaatattttaggcttctcaggccatctgtgtcccagctgttcacctctgcctttgtagaatgaaagcagccacagccaatcaataaacgagtgtgactgttccaataaaactatgtatgggccctgaaatctggatttcatatgatttctacatatcacaaaatagtcttattttgatttttttcaaccatttcaaaatgcaaatctattcttagcttgctctctgcacaaaaacaggcaatggactagaattggctcactgaccatagtcatgcctgtaagagttaaagaaagaagaaagaaacatgaaacgtggctttgtagtcaaagacaggttttctttacttaaaacctgagaggcttcccggctaatttcggttaggagcactttctcttacagaccctgcacttgatggatcacctggcaccgcccaaattgataaactggctcatctgatcttgtggcccccatccaggaactgactcagtgcaagacaacagcttgcactccctatgacttaatctcccaccggaccagtcagcactcctgagtcacctggctgcccctggcacaccaagtaacccttaaacacttcaatccttgaatgctctgggagactgatttgagtaccaataaaactccagtctcctgcacagctggctctgcgtgtgctctttctctattgcaattccctgtcttgataactcagctctgtctaggcaaagggcaaagtgaacccattgggccattacaagattttgtgtctttggaaagcacttcacatttttattctttttttttttttttgagatggagtctcgcttagtcacccaggctggagtgcaatggcgtgatcttggctcaccacaacctctggctgccaggttcaagtgattctcctgcctcagcctcccgagtagctgggattacaggcatgtgccaccacacccagctaattttgtatttttagtagagacggggcttctccatgttggtgaggctggtctcgaactcccgacctcaggttgggacttctcacccaggctggagtgctgtgtcatgatctaggttcactgcagcctcctccttctgggttcaagtgattcttctgtctcagcctcccgagtagctggaactataggcgtgtgccaccacacccggctaattttgtatttttagcagagacggtgtttcaccatgttggccaggctggtctcaacctcctgacctcaggtgatccacccacctcggcctctcaaagtgctgggattacaagcgtgagtcactgccgcacctgatcattcatgcattcattcatgcattcatcttagtatggactcatggatatttcttttttctttgggttgtaatacttatttttttttttttttttttgagacggagtcttgctctgtcacccaggctggagtgcagtggcatggtctcggctcactgcaagctccgcctcatgggttcacgccattctcctgcctcagcctcctgaggagctgggactacaggtgcctgccaccatgcccggctaatttttttgtatttttagtacagacagggtttcaccatgttagccaggatggtctcgatctcctgacctcatgatctgcccaccttggcctcccaaagtgctgggattacaggcatcagccaccgcgccgggcaatacttaattttcttgctcaaattgttgcagctttggccattggaaactcagttgacctctgtgtccctctggcatagccaaagggtttgtgtgtttgtagaacttccttattgtctggcactacaagacgttctaggctcatcttgtatatttcctgtcctagtactagaatcagccatttctccaagtagctctggttccttttattgaacagtggtactgcacaccaatatctggacaccaatatctgagtgctaggtatgcttattgctactgggctgaaatctacttaaaacatttttttacgttattctttttctagcttcctaaattaaatgctcaaattcagcatattttccatgctcgttttttttttttttttttttttttccacaaataaaccatgtgcatactttttttctgagatctgttttggctagatgtgcaatggcacaatcttggctcactgcaacctccacctcccgggttcaagcgattctcctgtctcagcctcccaagtagctgggattacagacatgcaccaccatggctcataatgtttttgtattattagtggagatggggtttcaccatgttggccaggctggtcttgaactcctgaccccaggtaattctggaaaaagaaaaactgtggagacagtaacaaggtcaatggtggccagaggttcagggcaagatagggaaggatgaatagggagaggacaggattttgagggagtaaaatgattcttatgatactattatggtggatacatgtccttatacattttgtcaaaacccatagtgtacaacacaagagtgaaccctaatataaactatggactttaattaataacaatgtatcaatactggcttatcagttgtaatgaattatctacatgaatgcaagatgttgataatagggaaaatcggggaggggcagatgaaggggcatatgggaactctactttctgatcaatattttcataaacctaaaagggcttttatttttttttttttgagacagagtctcgctctgtcgcccaggctggagtgcagtggcacgatctcactgtactgtaacctctgcctcccaggttcaagcaattctcctacctcagccgcccaagtagctgggattacaggtgcccgccaccgtgcccagctaatttttgtgtatttttagtagagacagggttttgccatcttggccaggctggtcttgaactcttgacctcaagtgatccacccacctatgactcccagagttctgggattacaggtgtgagccactgtgcctggccctaaaactgctttttttaaagactactaattaaaacaacaacaacaaatagaattcaggatataaggtttaaaaacataatgaaaacacactagttagccatattttttttaatgcctattcagagtttaaaagtgtcccagtaacaaaagactgcacagctttgagacattaatttaaactgtacaaatacatataaccattaccactaggataaattactctttagattttaacatttttcaacatcttacatctgaacagttgactcttctatacaaaaatatcattattattttataatatgcctttgtataatgcccacaagatgacacttattacaatagcagttgttacaaagtcacaaaatacataaaaatctcagcagttggtaacattattattctttaaaaagaatttacagtactaaggtccagtccagaaagtggcagatttaaacagagtagcccaaagttcgaagtgtctatttaaaataccagtttggaaataaactaaggaaataatatatgtactatgtgatatcactgccccagcagctgaacgcacttgcttcagagcaaatgtgaaggtcagagctgagtcagtggtcagcagcatgagctggcttgggggaaccagctggcacacttcatctttgtgtctggtagggacacagaaacaaaacaatttgaaaagtccaatgaaccagcatcaaacaaacacagtttccagaactttcttaatgatgtccagccaagagaaccttgacttggttactattgaagtcatcaagccattgggcttgattgtcaccttgaattcatgggaactgtactggtcaagatcaaaacacaagccgtccactaaaatcaagtggcataactttgatattctctatgttaaagataaatttatttctaaaaaaaaaaaaaaaaagctgggcactgtggctcacacctgtaagccctgcactttgggaggccgaggcaggtggatcacctgaggtcaggagtttgagaccagcctgagcctgaccaacatggtgaaaccctgtctctactaatactacaaaaattagccaggcatggtggcacacgcctctaatcccagctactcgggaggctgaggcaggagaatcacttgaacccaggaggtggaggttgcagtaagccaagatagtgccactgcactccagcctggacacaagagtgaaacatcgcctcaaaaaaaaaaaaaaagatatcctgctcaagattgaaattaccatcgctcccatagcttcaaagtagaaaaacaaataattgcaatctttctgtcattgacaaaatggcagcgcagagccttagtcaaataagaaccacagctgacagccagcaaaggttggcccaactgctgtacaaaaacaaaagacaaacctcttaagccaaccacagcaaagtgaagaactactaaaccatttgggcacatacaacaaatgaaaactaaaacactctaaacattttctggaagttgtttttttttaagggttcttattggatttactatttattaaattgtagatcaaatacttcatactttggcaaatagtttattcaatactttgtaacatcctacccatatatcaacactgtgggcaatgatgctaagaaaatgcatttcttggaaataagtaaaataggggatgatttttgcccttccaagtacccacttttgcatatttcttccagaactcagtagaaatagacatttgtagacatttcccagggtcaaggaacttgcacgtactctacggagcaatgctgtagggtttcacaccatagactcctaccggtggcctccatacttggccacccagtctgtcctcccatgcactgagggaatgggctgtgcacggttcacaatatttaggttttttgctgtaggattataagtacgtcctgaaaactgcccccgaccagtttttgtgttccaggtatattctgaaagaaatcagatttggaaaacagggttttactcatttgcttatcaaactcaaaataaagaaattcatcctctcatttgatggggaaaatctgaatttatgtttaaaagattaactcagtactctctgaggctttttaaatgttaaaaccaaaaattctagtgtagtattatgttgacatccattagaatttccagtagctggccgggcgcagtggctcctgcctgtagtcctagcactttgggaggctgaagcaagtggatcacctgaggtcaggagttcgagaccagcctggccaacatggtgaaaccctgtctctactaaaaatacaaaaaaaatcagctgagcgtggtggcgggtgactgtaatcccagctactcaggaggctgaggcaagagaatcacttgaacccgggaggcagtggttgcagtgagccgagatcataccattgcacaccagcctgggcgacaagagtgaaactccatctcaaaaaaaaaaaaaaagaattttcagtagctgaagagccaatattattcctggtttatagtgctgacactgctgctatttttaatattttacatttagataggcaacgccaggtaagaagaccaagaaaatttattggctcaaattcaatgggcaacacccacagtgttggtgactttgtaatatcacactgtggttacatctaaataatattgacacaatatcactacagaaaaatgtatttggaattgtgaatctataaaactgtggcttcatggaagaacacacatggggtcctataatagatttctttttaaacattaaaatgtgggttttagaatgaagatttttttttttttttttttttttttttttttttaatgaggcagagtttcgcccttgttgcccaggctggagtgcaatggtgcgatctcggctcactgcaacctccacctcccgggttcaagtgattctcttgcctcagccttctgagcagctgggattacaggggcgcaccaccacgcccagctagtttttgtatttttagtagagatggggttttgccatgttggccaggctggtctggaactcctgacctaaggtgatccacccacctcagccttgccaatgatccacccacctcagcctcccaaagtgctaggattacaggtgtgagccatcgcacccggcccatacttcatttctcattgggaaaatcatgggtgggaacacaattcccttaaatggtaggatcctaaacttttaaccacaaggttgtttcattcatatatctgactgtttaaaaatttgtgaaaaatttaaaatttcttgaacatttgttatctgaacaatttatgagctaaaactgcttcaacatttcaaaggacaaagcaggagatcattttacagacaacttttgatgccttcttcagtccctccttcacgctttcctcacctcgaattgagagctaaggtatcacaggtattgtatctgaggagggatgtctgctttttccatctggggtttaaatatctcttcacactgtgtagtagctgccattcttggattaaactctaagtgttaatactgaaatgaatctgaccattttgtacccctagccctagctatcccatatttactggcatggtttgcacagtttttcttaaattttcactgtataactgggagtgaggagggaattctgtgagcatgtggtcctgacaagctactaacttcagcatgggtgaacaaggtattaagtgtggacactctgggtaagacagccgcctggctgccgtgtagtttggtggaggcagggaggccaagagctccccactccatggtttgacaggtcctttcattccactctttttactgggcttaaaattctcaaagtcaaagccactaaaaagctatctaacaaagtcagggacaatgtgtctacaagggccagtcagggcaccatgttttccagaaagagccctttagttatagccattggaatagaaacgagcatctgtctgctaaattagtgagctcacccatgtgggccacaggtcaaactggtagcaggggtagaagagacagcgtgggaggggagtagagagcggggagagaggcaataagccccgcttattcagggagggaaaagggaacgtggcattaggctaatgggtgtggctctgagggcaagaagtgagagctttggggagtaacaaaaagagaagcctttttccaggtcatgatatcacctaagtcctaaatggttttaaatgaaattgtgtccaggacaatattttgtaaaactttttcaagagggaatcattttgctaagaagggggtagtgttgagatttaggattcctttcctagatatactagaatttcaggactcaagtacctttggtgaagaacctaacagctgagaggagcccagatctcgtggcagggcaagaagtgcttttgtgccttagtgggaccaccccacacctcactgccctgcaagagcgggagggatagtgagccttgcaatgcttgctctgtgtttaaaaactgcatctgtcctatcaaggacatttaacttcttgtagaaaatctatgctaaaggaaagaagtttgcctctagttatggatttaattgatgccactgtgatacaacttttagcaacatataaaacttgtgtgagatgcggatcataatagtacctcctggaatacagccctgggaggattaatgagttaatgtacacagagtgcttaaaacaggatcctgcacttctaaagtgatcctaaagggtgctgtgtagaacagaagtcactcctcgaagtccttgttagtttcaaggcaggggataaggaagtattaggggaaggagagattacatgggagggaagacattgattttccttctcaaaacttaaagggtagaggccaggtgcggtggctcatgcctgtaatcccagcactttgagaggtcgaggcaggcagatcacgaggtcaagagatcgagatcatcctgccccatctctactaaaaatacataaattagctgggcgtggtggcacgcacctgtagtcccagctactccggaggctgaggcaggagaatcgcttgaacccgggtggcagaggttgcagcagggagctgagatcacgccactgcactccaggctggtgacagagcgagactttgtctcaaaaaaaaaaaaaaaaaaaaacaaaaacaaaaatcttgaaggggagaaagaagagcaaagacgagactatgcaagaagggggaaatagttgagtaaatatggtaatgacctggttttattttcttgtgggaaactgtcacccaactggcatgactggaagacacatctcttacagaacagtgttttttctaaggatttgcattgaccacttgagagtgattaatatttacttcattttttacctttcctcctatcaccatctgtagaaaaatctgataagcagagtaaagaaataaaaagttaagaaaaagcatttacttaaaaaaaatgaaaacaggaatatgcatgctaattggatagaataattaatatataaaggccttcaatatcttacaaaaatattttttaaaagacccactcttgatttataagagtagatacctaggtaacaaaataatttgaaacattatgattttctgcctttatattaaaaatataaaatgtggccgggtgcagtggttcatgcctgtaatcccagcacttgtgggaggctgaggcaggtgaatcatttgaggtcacgagttcaagaccagcctgaccaacacagtgaaactgcgtctctactaaaaatacaaaaaaaattagctgggcatggtggtgcatgcctgtaatcccagctgcttgggaggctgaggcaggagaatcgtttgaacccgggaggtggaggttgcagtgagctgagatcacaccactgcactccagcctgggcaacagagcaagactccatctcaaaataaataaaattttatatttcatataaatgaatggctcataaggctggcttaaatatttgaggccttataaaaatcactgctgtatataaaatgtttacttattttgtttcagcgaaaagataatgaagcaattcttttcacagataaggtaactgtagtactatttaagcagttctattgcggcaagaaataaaaaaataaagaagtccaggctttatacatttttagctccaatagtgtgaactttaaagactggcacatctaatcaggggttttaatataagatagtggttaggataggctgtgagcacactttcagagtcaacttttaaattaaactacaggccgggcatagtggttcatgcctataatcccagagttttgggaggccaaggtgggaggattgcttgcgcccacgagtcaagatccagcttgggcaacatagcaagaccctgtccctacaaaaaacattttttttaattagctgggcacggtcgtgtgtgcctgtagtcccatctactcagaaggcggaggcaggaggatcacttgagcccaggagttcgaggctgcagtgaaccatgattgcatccctgcactccagcctgggtgacagagcaaggctttttctctataaaaaagaattaaaataaataaattaaactacaattaggtatcttattaaagttctaatgattggctttaatgtttatttttggtgcttcactaagaatatctatttcagattcaaatgattcgaagaccattcatggtcaaatctgattggcttaagtacagaatcatcaccctccatttcaagtgtgtacccccacatgtggctgtcacatgccacaccactggggagcaagcttacctcagttaggcataacgctggagggtggagggataaacccttccccctgaatactattgcaaagcaaaaggcagggtgtgaaagtcctgccaccgctaatttctacgccctaagatggaactgtagagacacacctcatgttaactcattcataaatagagtgtcagcatttattaagctttcaccctgtgccaggtcctgggcagagggctctggaaaaggcattttctcacatctctctgtgcagcacagcacactctttggaagtggattaagttgggtttctatcccagctccactagctgtgtgacctcaggtaagttacttcacctacatttcatcatctgtaaagaagagatctagctacatcatcaggttatcatgaggattaaatgatataattccagtaagccctttacactgtgcctggcagagagtcaccacttaattagtggtagctcttataattattagaccctcaaatcctcatttttggaagaaaaataggacatttcggtaaaaacaaaaagaaatgcgttaatgaggtgaggctgactaaaagtcttcgcttgggaaaagtgactgcataaacttaaaaaggaaaatgttcctttctgctaggaatctagaaaactgtatctgaagttgttcctacctgaagccgttgcattgagaggtgctaagtggatcctctggccagctgactgcacttcttttttgagaaaggaaggaatatatcctgactgattgtaagtagcataacttccaagatttcctagtgacatatcataaagtttcacagtcagaaggtgaatattttaggcacagtagaataacattgaatactaccccattacttctaaatactatttttcagcatctactatgttttaggcactgagctgcacttgttacagatattcttattccatccatacaacagcccgcttagatcatattagtatccatatcgtgtggctctccaatgttgagtaacttgcctaacttctcacagttagtaagagactgagctggggtctgaactcaaggcccaggggtgttcagttcaccctgaacacgccaggctttctcacgaccccacttcttcacatgggggtgtatttcccactgcgaagcccctatctctgaagtgctctctgtgtctgtcttcattctgtaaaatggttgtaagtggacctattctcgtagggttgttgtagggattgatgagactcttcagagcacgtggcatagaatctgtacgcattaaacgtcagctagcataattgccatcattatcaacaccatcatcatcatcactattggtgaatgctcaatctggcgttagcatagggatgcattgatgaggaaaaatctaaagtctggagaccagtgaggaagtcactgctaagagctgaaatgagggaggatgagggtctgaaccacagcagtggcagagggtgaagaagaagggaactaagcaggttcacggggtggaggtggtagggaaagagggaaatataaactcctaagtttgcagctcaggtgactggggggtgcgttgtccatgaatagcaacataggaggagaatcaggattgggggaaagacatggtacccagaggacattcatgttgtggcaggcagagggcaagtgggcaggcgtggagattggtgatgatcagggtgtggtggttacagagttgtgggctgaaggagccagctcagaggcactgcgaatgtgcagagacctggagtagacccccaaggaacaccagcattaagggacaggagagaaaaggacctcatggaggaagagaacaggtagagaggtggatggtaggaggaacagggtatggaaatccaagagaatacacactgagtgtggaaaaaaggaatgggagatgaggcagagagctcggataggaccagcaccgcccctgggatctggccactaggatgtcaagatctagcaggagctgctgcactggcaggaagcagactgaagacaaacgacaaccagaagcaataggaggagctagctctgcaggaagggagacaggtttatctctagaaggcgaaatggggctctgatcaccctcgtggtttcaaagcactgttcagtaaacagtgttttctctatagcgttatctgtttacacgtctcgacactgggctctgtgtccgttgtctctcacggcatatcaggcttcaacaggtgtctgctcttgaagcaacaaatgtcaaagcgcaatattatgttatcagcccctaaagggttacatacagtgagcacatgctctcagtctatacatgtttaaccctactgaattttgtgtaagttcagctgcctactttaacctttttcccatctcagaaactcattctgaaacactaatcagttctttacttcagaaaaattttcggaaggaaattcaaagcagtgattgcattcactagcagcttcagtcatgtctcttgctctcatcctcatcagcagagcaaacacttattaaatgcttagcatgtgttaaaattccaggtagggttatgtaagaatacctaaggaaatttcgtccgttttatggacgggaaagctggcttaaacaacttgtcccaaaccacaaaagctggtgagtgacaaaatgggatatatcagactctaggattcatgcattatgatgcttcttattggagaaagaagttgttagggaaaaaacatgaacagaaaattaagtcttcttaaattattttggcttattatttgaagtaccttgtatgctgtgaattttcagattgcagccagttgttagcactgttgaaaccagtaacactgaacccctaggaaatccaccatctctattaacccagttaacctttttttttttttaatttttatttatttatttgagatggagtcttgctctgttgccaggctggagtgcagtggcgcaatcttggttcactgcaacctccgcctcccgggttcaagcgattctcctgcctcagcctcctgagtagctgggattacaggtgcatgccaccacacacagctaatttttgtatttttagtagagacacgggtttcatcatgttggccaggatggtctctatctcttgatctcatgatctgcccggctcggcctcctgaagtgctgggatttcaggtgtgagccaccgcgcccagcctaacctttttaaaaaagtggttgttcatgcttaagaaatgagtttcagaactttgaaaaaaaaattccaggaatatagatcgcaaaattagaaaatactcttttgattcttttcattagaattatttgcttgatttcctctataaatttccgtaattaatttaagaagaccagcacagagctttttgagagcatattcatcttaaaatctcagttactgaaggaagatattcttgatgagacagaatgcttttctttatcttagtcctgatctgacttctcaaagcggatcatctcggccttttatgtcaggattaggggcaaatgttgagaagaaaatcagacaagagattcaaagaacaaactgcattcatctgacgcccagaaattaccttgtgggtcctctaatttttcaggaaaagtttcattgcatgatagtttttcgattggtttaattatgctttcttctaaagagaagacagatggaaagaaagaataatagtaaggagaatgttataggaaaagcagagaaaaaatggattagatgattaatgaaaagatccagaaagagcccttaaaaatgcaaaaatgtccccattgttgtcacagcatttatttgatgccaactgtatattcccttgagactcaaagttgttctactgtcatttaattgaatttgtgtaactggttggttcagtgaatattaattttaattatctgaagaaaaaataagtaaattacagtgctgcagtgtatgacaccgcagcgacattaaatggataaactgagtttttaaagaatctggaaaacttgtaaaaagcccaaatatattgatgtcacatcagaatatctcactaaactactcacttataatggtaattgtcaaagttttttgatccaatatcacctacattaaaaaacaaactgtacctcttcacacacttttaagttgatatttaaaatttttaatcataagtttaacagttgcaaaggatgttatttctgacatattgtaactataggcatttaaaaaataaaactattagtgatttttttttttttttttttgagacagaatctcgctctgtcgcccaggctggagtgcagtggtgtgatctcggctcactgcaacctccacttcctgggttcaagcgattctcctgtctcagtctcctgagcagctggatttataggcgcatgccaccatgcctggatttttttttgtgtgtgtgtatttttagtagagacagggtttcaccatgttggtcaggcgggtctcgaactccggaccttgtgattcgcccacctcggcctcccaaagtgctgggattacaggagtgggccactgcacctggccaaaactattagtgattttatgtcctccaatattgacataaaaatacatgaacaagttcctttttgatgcttggacatttcacattaattcttttttcccttaaaattatatctttatttatacctcagcttccaaattttatccaaatgtaatcttaggcttaaaagtctaaaattggtcactctaaaatatgtgtaaattaaaactttttttaatttcttgtaaccataaggatattaacatactgtacaaagttataattacaatgattcattgtatataattaatcaaaaaagttgagtattatatattttgattactaaacacgaaaattaagttttttgcaaacacatctcttaatgagaaaggtggggttattttcaagtagttcatgtatcaacaaatgaatatttattgctggaatcacagcatcagggctattttctctctcttttcttttttcttcctttttggagacagaagcattaagaaatcttgctaatacaaatagatagttgggaacaaaagcggttttgtgatagctttgccactctattcttcaaacgctcttcaaaattacagaccaaaattcatatactgatctcataaaaaaaaattaaaaaaactttttaaattacctgtcagctaacaattcaagtaggtcctccttcaattttctaaatgctgagaactgttaagactccttgactttaaaaaggacctgttcctcagtcatcaaatcaaagttacttactttctcaacagtgacatcaacataccagaatttccatttcattggcaccccagatatttttacattttggggaaaaagaaaacacaccatggtagccagtgagaagtcttcttttcagaatagaaactccttgctagggcagacccatttcaggaaagattcagatggaggtcgagaattcccttaaaactagctgtactcaagaattagtgggaaaaccttttttttattattgtactttttaatatagaggcacagttccaccatgttggccaggttgatctcgaactcctaggctcaagggacctgcccacctccgcctcccaaagtgctgggattacaggtgtgaaccaccatgctcatccagctacaaacagttttattgaagaggcagtgttacaactccatgactgctccagcagagcagggctacccataggcagagtgtagtggaaaacctttgtgtatctcccaagtgcacatgtatcttggttggaagagcactgcaatatatttaaaagtagacctctataaaggaaaaccccgtacatgtacattttgtattcttgcgttacctgcattgctccttttgaaagcaagttctgccccaacgggtcccagtgacttggggaataactggttgctccaagtgtgggggtttatttcctttccactggctatcaaggacaccttcttgggattcacacctgagaagaacaaaacaaccacttcaaaggttagagcagatcataaacttaaaggaaacttatgtaatacattcaaacaaagactagagacaccttggacaggagaatggaaataaatctaggtgaaaatgtagcagatacttgctttctgatgaaccctaacatgataccaagcccttagcacaaccacctggaatgttgacagtgtactttataggcagaagatattttctacaatataataataacacttgatgttcttgctaagggtcttgtaaaaattgagatggcacaaaaatttttcttcaacaacacgacgttttttttgttttgttttgttttgttttgagacagggtctctctctgtcgtccaggctggagtgccatggtgtgatcttggctcactgcagcctccacctcccaggttcaagtgattcttgtgtctcagcctcccgagtagctgggattacaggcacccaccaccatgcttggctaatttttgtatttttagtagagaggggatttcaccatgttggccaggctgtctcaaactcctggcctcaagtgatccgttcaccttggcctcccaaagtgctgagattacaggtgtaagccaccacacccgacccaacatgacattttcatgtcacttgttttgagcgtatattcttggcccaacccttggtgtagcagggaaaacagacacgtgactaagaactcaggaaaacctttgaagttcggaggtatgaagctccacctgaaacgcttatttgtatatgagatacagtaaaatggaaacagtttatcccctgtgcgccagaaagaagtcattgcaaatgtacttggaaaaagaacagtttaaattacttatgattttctgaaatctgtgaaatgtccattcagccttgggccgtgatactagtggtcaaagggagttgtttcaacctgttcttaagagactgaaaacttcttgagcttgttttcttttcactgataattaaattagagtgaacttgagcagtctatgccttttggtcattcacggagagttttctttatctagtgtagaaatcatcactgaggactccactgatttaggaagtcagaactgtctccaggcagttgagcttttgctttccgcgagctggattccttagaaaggtttcatatgtatgagatatataataatatcccttattttgaaaccagaaatactgcacctcaaaagttacccattatcagttctctaaggaaacacttcatcaggcaagtaatttccctttctttataggatataacttccctaataaaacacctacaaatcgaactattataggcaactaccagctgggtgcggtggctcatgcctgtaatcccagcactttgggaggccgaggcgggcggatcacgaggtcaggagtttgagaccagcttggccaacatagtgaaaccccatctctactaaaaacacaaaaattagccaggcatgagacaggagaatcgcttgaacctgggaggcagaggttgtggtgagcccgagatcgcaccactgcactctagcctgggcaacagagtgagactccatttcaaaagaaaaaaaaaaaaggcaactacctaaccataaagatgcacttggtggcaattactcatattaaaacatctttaggccaggcacagtggctcatgcctgtaatcccagcactttgggaggctgagggaggtggatcacctgaggtcaggagttcgagacaagcctggccaacatggtgagaccctgtctctactaaaagaatacaaaaaaaattagctgggtgtggtggtgcctgcctgtaattccagctacttgggaggctgaggcacgagaatcacttgaacccaagttgtggaagttgcaatgagctgagactgtgccactgcatccagcctggtctacagagcaagactgtcacaaaaaaaaaaaaaaatgtatttacccaaaaaggaagtgcaaggtaggggtaaaacattaaaaatctgtgtgaacacagttgtcataacaaagaatgagttctgaatatttaaatgatgttgttaatccagttggccttggcaatattcctaaataggctttttttttaagtattttaaagtaaaaggtaagtaaattattgaagataactagtttaattcaaggtttgttttgttttcttttgttttgagacagacttttgctattgttgcccaggctggagtgcaatggcgtgatctcagctcaccaaaacctccacctcccaggttcaagtgattctcttgcctcagcctcctgagtagctgggattacaggcatgcgccatcacgcccggctaattttgtatttttagtagagacagggtttctccatgttggtcaggctagtctcggactcccaacctcaggtgatccgcctgcctcagcctcccaaagtgctgggattacaggtatgagccacctcgcctggcctcaaggtctatttaagataaagattccaattttgttggaaatagatatatcctagaattttgttatttatttgtttataagttttcactgggtacctcctacaaaccaaacactgttaggaagaagcataaattaatttgatattataatgatagatgtcattacatgatgataatcacttgcctcaaaggacataaaaaagtcagttagcaaatatttactgagcacctaccagtgccaggcagtgcgtggcattggagaaaaagtgctaaacaaaatagaccagtttctactctttggctcttagaatctaatgagaagggagacagttttagtcataactaagtaaatacataatgagcagggtgcatcatgtttagaagaatctggggtggagggggcaaataacagaagcaactcagccagtctttctttcaaataagcaattttaagctgaaatgtgaatcatgattaaccctcatttatgcctgaggttgcaattttttgaaattttgcaatcagaccttggcgatgaccttcagcagtaggatacaactcccacatgcttagcgttccaataatggaacactaggcataaatgtgttttaaggggtggggaggtgcgatccttgaagaggcaacagtttgggcagaggacctgagatgggaaagaactcagagatggccagtaaggctgcagcaagaacacggggtggtataaaatgaggctggagaggggaggaggggcaggccacacaggattttgtgtgccgtgttaagaaagtgaaaaagcagaggctaatgtagaaatgacacaggatgttgaataaacagggtggaaggaaagatggtgaataatgaatgggaagagagaaggatgcacagatcagtttcataagtgctatggaggccaggtgcggtggctcatgcctgtaatcccagcactttgggaggctgaggtgggcggatcacttgaggtcaggagtttgtgatcagcctggccaacatggtgaaaccccatctctactaaaaatacaaaaattagctgggcatggtggcgtgtgcctgtagtcccagctacttgggagtctgaggcaggagaatcacctgaacccaggaggtggaggttgcagtgagctgaggtggtaccactgcactccagcctgggcaacacagcaacacttcgtctcaaaaaaaaaaaaaaaaaaaaaaaaaaagaagtgctatggagtgagctgctccggccagcagtggtggcatcgattcatgcccagagtcccggctctaggagcagggggtgagaccagagggcactgctgagagattagctttcaattgcatactgtatttgcaactatcttgtgataattaaagtacctaaggcttacagagtgagctgacagatggtgcagtcccatcgtaagttacagaaaacagaatcttgctccaagtacacagccggttagtagtagcaggtcagtaactatgactcttgcgtctctttccctgaaggccagtgtcacagatccgccagtccttgtagtataatgtcatgctgccctgcaattatatggtacatttctagagctcccagaatcctaaaagtcgatgcttaataagaccttttatacttggctttagggtaaagagggggccccaaaagatattagtattttttattcctgaagatactcaattacaaaaataactatggatcataaataaatgtcaaggattgtttctttttttaaatttttttattttttgagacagtttcactcttgttgcccaggctggagtgcaatggcactatcttggctcactgcaacatctgccttctggattcaagtgattctcctgcctcagcctcctgtgtagctgggattacaggcacccgccaccatgcctggctaatttttttgtatttttagtagagacggggtttcattatgttggccaggctggtctcgaattcctgacctcaggtgatccaccggctttggcctccccaaagtgctgggattacaggcgtgagccaccgcacccggccaaagattgcttcttattcaggtttctatcctctgcatagttgctggttcacaataggtgctcaataaatgtctgtccaggtgactgaactgagcctgattctagttttaaatttcatccagctccagaggggtcatcttcaaaaccacgaccgccaataggtgacagtaaggctcaagtttacattccaaacaattctttgtaattgagtttactttttaaatctcaattatagccatccttctgatcccaagtaatttgcagactttgttagatttctagttaaaaaggaaatgatcaaacaggtctcagaaaaccacattaggaagcagaactatgaaaacagggtgctttggctcaaaggataaatatcctttgacaaaagtttgcagtagtgtttcctactactcacttctgtaagtaagaagatactgatttgcaatatttcagtcagtgaaatgtactggttttttttttttttttttttgagacagagtcttgttctgtttccaggctggagtgcagtagggcgatctcagctcactgcagcctccacctcccgggttcaagccattctcctgcctcagcctcctgagtagctgggattacaggcacacaccaccacgcccagctaatttttgtatttttagtagagacggaatttcaccatgttggccaggatggtctcaatctcttgatctcgtgatccacccgccttagcctcccaaagtgctgggattataggcgacagcacccggcaaaatgtaccaatttaaacaaacaaaaaaacaaaaaacacagtgaaaactatctctcatgaacctatgttttgaaaactttcttccatccttgcttttgcagtcagattaaaactctctcagaatttcttttttctttttctctctctctcatgatttcaacaccaaaatttacacacaggtgtctaaagattacaataacaaggatttctgctgctttcaaaagtgtgccccaaccctggtcttgatcccaactcctctcccaccttcctaagctcttcagtccctcactcatcccccttcacctcctgtgttactagttcctcctctgtaagggatcttgctcctctacacgcaaacctgctcggagcactgctgaaatgcttcattccatttctaagctcctcttcacagccatctaagatgaagcagccaaaatgaggcctgccatgtttacagtctgattatcaagaaatatgggcagatttctcattctgtgagtgtcatgatgtgacaacttcctatacaaaaatgttagaataacttattttctctcactttcaagaatcaaagcataatgtcacaaatagaacagttttcaaactgtaggtgaaactatagtcaggaaaatttgacctcgtgaggaagaaaatacagacttcaaggtcaaaagtagattttttttttttttttttttgagacagagtctcactctgtcacccaggctggagtgcaatgtcacaatcttggctcactgcaacctctgcctcctgggttcaagtgattctcctgcctcaccctcctgagtagctgggattacaggcacccaacaccacgcccggctaattactgtatttttagtagagacagggttttgccatgttggacaggctagtctcgaactcctgacttcaagtgatccgcctgcctcagcctcccaaagtgctgggattacaggcatgagccactgcacctggcctcattaactattttaataagatacttgtaaattgacttggcatatactaccaataagatatgtatacattttttcatctgtttctctatccagacacacacaaacaagacccaggttttttcaggcccacttcccatgtctcactctggtgccacagagcctaaaaatgtgcttacatcaacaacgacaaaaaatattatagggctgggtgttgtggttcacgcctgtaatcccaccactttgggaacgaggtgggtggatcacctgaggtcaggagttcaagaccaacctggccaacatggtgaaaccccgtctctactaaaacatacaaaaattagccgggtgtggtggtgagcgcctgtaattccagctacttgggaggctgaggcaggagaatcgcttcaacccaggaggatgaggttgcagtgagccaagatcgtgccactacactccagcctgggcaacgagtgaaactctgtcacacacacacacacacacacacacacacacacacacacacacacacagacacacaccaaaactatttaacctatttagatcgccaaatacccagggttataaagtttttgctgttcttgatggcttcatgccaatttcttcaacctctcaaatacaaatacgtgtcttcctccttacaaatcagcacaggactgcagtcctaaagcctcaattcaccccctgtaagtttatatcaacttattcaacacctgtggctaaacctatacacccaccgtgccttctgttttctctcccattcatctctaaaccctctacttgctttcattttttttcttttccccaattactaacagcaagagagggtcccaactggatttttttttttttttttttttgacacagtcttgctctgttgcccatgctggagtgcagcggtgccatctcggctcactgcaacctccacctcctgggtcaagcaattctcctgcctcagcctcccgagtagctgggattacagatgcccaccaccacgtccagctaatttttatatttttagtagagacggggtttcaccatgttggtcaggctggtctcaaactcctgaactcaggtgatccgcccacctcggcctcccaaagtgctgggattacaggtgtgagccactgtgcccagccctagctggattcttagaactgaaatttctatgtttgcctaaaaggtacacagggaagtgtgttacagatccatcttttgctggcaatcctgtctcaaccttttctcttgtttgccatgccccatcttcccaaacaagcttctgggaaatggagactgtgtcttgcttcaggagacttagatgtgaaaagcaaatcttcctcagttaaacagtggcccactcgtgtttagaaagttataaatgaccatgcccacaaaaacacaaaagaaaaagatcatcttctccctcactggattaaagatgtatctgtgtagatacaggacgatttaaaaatggattatcttttagattaaattgaattgaaacatttcctttttatttggatttagaggagaaaatgctatttgcaggcacatgataaactccccactgtctgtccagatctttctcccaagctccagattcatatacccaggcgcccattagatggatcaattcagatgtttaacaggcatcccgcactcagctctccattctctacttccacaatcttctcctcttctaatcttccctttctcagctaaagtcaccaccgttcacccagttcccaagtcaaaacctcagatgctgccactaattctttccaccaatctacccacaagtcctattggttccagtaccaaaacatgtctaggttttgcccacttgtacctctgccacttccactctggaaccagccatttacattaccccaccccatccggacataagcagtggcctcttagccagtgtctttgcctctcttgagttcccagcatgctcttccgagcaggcagaatcttttaaaaatatacaccagattggctgggcacagtggctcacgcctgtcatctcagcactttgggaggccaaggcgggcggatcacaaggtcaggagatcgagaccatcccggctaacacggtgaaacaccatctctactaaaaatgcaaaaattagccaggcgtggtggctcgcacctgtagtcccagctactcgggaggctgaggcaggagaatggcttaaacctgggaggtggaggttgcagtgagccgagatcacgccactgcactccagcctgggcgacagagcgagaatctgtctcaaaaaaaacaaaaaaacaaacaaacaaaaaaatgtacaccagatcatttaggaaagagtatttgaaaatctacattttataaaaagttgtaatgggggcatagaattggcttaataaaatttaggatttactgaatgcatagctttggtggggggtgggggttggtgttttctggaagcatattcatcatcttgatttttgctcctaagcatttcttgagcagaattctactagtggtagaaacaggaggtccagaaaagtccttggcgacagactgagctaccaaagagctctgtgattagattttttgcttcactgctgccctttctttggagattccaagacacttgaacctgacctatctatactctagttagcagcaaacattttctttgctctacttacctggaagatatcttgattgtttcaagtagtactgtttagaggttggagcagttgacaattcggaatcagattttagggaagtaacagcaggtaagctcttgttttcccctgtcgagtggttggagcctgagggtactggctctggaagccttgaaagccaatgaaaggtagcattacagcacgaacaacgagaggatctcgcccaccctctgcacatctcgcccaccctctgcacatcttcctaagccagtcaatctgacctcacttaaatggtttccatcagtcttttggctaagtgacaacttcccctccacccgcgtagatattgggtcgtgcacagactcatttctgataccagtatgtgacaggaacctttataactgagcagcaatttacttgtgtgtaacatgtttctatctgtcctgcaacggctgcagttggattcataacgtgggaaactggtgtgctgagagggaaataacagccatcttcacctgttgactaaaataatttacaatcaatgaggttgtttggggcatggtttggatggcctaaaaaactgaaatggggaaagaagtgctagaaaagctcccgtatacaatttcccgtcaccctagtgtcaggcacagaaaataggtatttgtggagacatgcctgtgtctcagccagaacagacttgtgcagtggctaagcacctcgctagctgtttagtggtgtttgttagtattaagactgactctctgcctgttggtccctaactcccacagtcctgtttctgtgtacggactgaggactttctgcttcgaggcttagttctgtctcattcccgaggcctgtccctgaggcctgtttgaccaggcagcagtgcgtgaggcggccattgctttgtgttgctgcccatccctctgtgtgctgtaatgagccctccacgaccaaccttctccccaccaccctccgactgggctccttctttgctggggcctgaatatactgcccaatttccatcacttgttaactccaagcatccatggtttccacctagaaattcatgctaccaaaccctactcaccaagttggctcccttggaaatggatactcacttgggtggccctttgaactgctggccacctgcttgggggcagttctaggcacaggtgcgtctgcttcaatgggaacagtcccgccatttctggcaactttcccttcccctgagcccactgctgttatatcactaactgaaattctacccattcccaaaactactcactctaaaaagacttttctgtcctcatcagagggatctctgcccatagacagaactcccagagctccttgcagctgtcactagtggcactaaatgcacacacttgtcatgtgttatagtcctctggaggtcttatttctgttgccatatatttgatgagttgaagagaggcttaattccaactaggtatttagtaaacatctactgaatataaatacaagtataaatctaaatataaatatcttgctttttgttcacttttaagaagacaaccaggctgggtgcagtggctcacgcctgtaattctagcactttgagaggcaaaggcaggtggatcacctgagatcaggagtttgagaccagcctggccaacatggtgaaaccctgtctctactaaaaatacaaaaattagctgggcatggtggcggccacctgtaatcccagctacttgggaggctgagacaggaggatcacttgaacccgggaggcagaggttgcagtgagccaagatcgcaccactgcactcagcctgggcgacaagagcaaagctccatctcaatcataataataatttaaaaaataagacaaccattaaataaaaggtatacatgttagtatttggtactctgtattctttatggggaggccctggctgcctgagagaccaagcaggggatggcagggtctgttcaatgcaccagttcacctcctattcaccactccactaatgcaccagttcacctcctattcaccactccactaatgcaccagttcacctcctattcaccactccactaatgcaccagttcacctcctattcaccactccactaattcaccagttcacctcctattcaccactccactaattcaccagttcacctcctattcaccactccactaattcaccagttcacctcctattcaccactccactaatgcaccagttcacctcctattcaccactccactaattcaccagttcacctcctattcaccactccactaatgcaccagttcacctcctattcaccactccactaatgcaccagttcacctcctattcaccactccactaatgcaccagttcacctcctattcaccactccactaattcaccagttcacctcctattcaccactccgctaattcaccagttcacctcctattcaccactccgctaattcaccagttcacctcctattcaccactccgctaattcaccagttcacctcctattcaccactccgctaatgcaccagttcacctcctattcaccactccgctaatgcaccagttcacctcctattcaccactccgctaatgcaccagttcacctcctattcaccactccgctaatgcaccagttcacctcctattcaccactccgctacttcaccagttcacctcctattcaccactccgctaatgcaccagttcacctcctattcaccactccgctaattcaccagttcacctcctgttcaccactccgctaattcaccagttcacctcctgttcaccactccgctaattcaccaattcacctcctattcacaaatccaccaattcaccaattcagctcctattcacaaatccaacaattcaccaattcagctcctattgctaaagaagcagtgtggggtagaagagagaaagacctggatttgaattaatccttacctgatcttgggcaagaaacccagcctatccaagtctcagcatcctactctgcagatatttttactgaagtatgaaaattataaagtttaggcaggagcttaacagatggtagtatattaataataatgatgatcataataataaccatatgcctagaattgtacaagaccattgaaagataccaaaaaataaaaatgtagaagaaatggctgggcgcagtggctcacgcctgtaatcccagcactttgggaggctgaggcaggtggatcacgaggtcgggagatcgagaccatcctggctaacatggtgaaaccctgtctctactaaaaaaaatacaaaaaattagccgagtgtggtggtgggcacctgcagtcccagctactcgggaggctgaggcaggagaatggcgtgaacccaggaggcggagcttgcagtgagctgagatcgcgccactgcactccagcctgggtgacagagcgagactgtctcaaaaaaaaaaaaaaaaagtagaagaaatacccacatgaaaaattcactgtcatacagtttttctaaagaatttcaagagaaaagggataattaatgttgaagaaatttactaattgttcccttgctagaaacaggtatatagactacaaccttgatctttttttgattttttgagacagtgtctcgctctgttgcccaggctggggtgcagtggctcggccttccaagctcaagcaatcctctcacctcagcctcctgagtagctcgaactacaggtgtgggctaccacatctggctaatttttgtatttttttgtagagatggagttttgccatattgcccaggctggtctcaaactcctaagctcaagcaacccacctacctcggcctcctaaagtgctaggtttataagtataagccaccatgaacagccacaaccttgatcttaactataggttttgattcaaacctctaccatcctcaaaaatatatgactaaaatttatgaataaattatgaataattataaataattatgaataaaatttagctgaaatcagaatgacatgggttttaaaaaatgttttcaagtcgccaggtgcggtggctcatgcctgtaatcccaacacttttggaggccgaggcaggtggatcacctgaggtcaggagttcaagactagcctggccaacatggtgaaacactgtctctattaaaaatacaaaaaattagccaggcgtggtggcacacgcctgtaacaatctgagctactaaggagactgagacaggagaattgcttgaaccctggaggcagaggttgcagtgagccgagatcacatcactgcactccagcctgggcaatgaagcgacattccgtctcaaaaagaaaaaaaagaaaaaaaatgtttcaaatctcccatatactacatcagtggtcttcaaactcttctgttcctagacccaaataattgttttttaaattatgtaactccctgcacatctttaaatagacatctataatttttcatcataaatttgttccttatttcttgttaacagcagatagaaacagtattttataagatgaaatattgtgaggattgactgcaattggagtatttcatggtatggcttgataaaataagttttaactaccttatccataatacactctgatcctcaaataagtaaaattttaatccatgtgttttgaaaacccatggattaaacacacagattaggaaggagtacctatggaatgtgaagacctggaaacggattgcctaagagttatccaagcaaaaaagaaaaaaaaaaaaaaaagaattatccaagcatatgcactccttagagattcctcgtgccccaaagtgaagacttccatactataccatgccaaagagctcctggataagttttcctgactcataacacaactgttcttcctattcttctgtttcaaagaggaaacagagcattttagtatatttgaaagaatacacatcactaacgcctggtgcttcagtgtttccaaatcaccatgctttccaacatgggctaaaatacagtagcccccattacgtgtgggggatatgttctaagacccccagaggatgcctgaaaccacagatagtatcaaaccctatacagcccatcttttcctatatgtatgtgcatagatacctatgaggaagtttaatttataagttgggcacagcaagagattaacattaataactaatactaaaatagaacaattaaaacaatatattgtaataaaagttatgtgaatgtgctctcaaaaatatcttttttttgttttgagacggagtctcactctcactcaggctggagtgcagtggcacaatctcggctcaccacaacctctgcctcctgggttcaagtttctcctgcctcagcctgctgagtagctgggattacaggcgcccgccaccacacccagctaatttttgtatttttagtaaagacgaggtttcaccatgttggccaggctggtctcaatctcctgaactcaggtgatccacctacctcagcctcccaaagtgctgggattacaggcattgagcctccgcacccagcccaaaatatcttattgcaccgtactgcaggtaaatgaaaccatggaaggtgaaactgcagattcaggggactactgtacccaatttctgtaagacaagaaccaacagaaagccagttttctgatttgtccctttatttagtaaccctatgccatgtaagagttgaaataactgagaggtgtgactttcttgcctagagtggaagaggacttgagtgggcttttcctccagttcatgtatttttaggaaagagtacctatggaatgtgaagacctggaaacggattgcataagagttatccaagcaaaaaaagaattatccaagcatatgtactccttagagattcctcgtgctccaaagtgaagacttccatactatgtcatgccaaatagctacttgtataagttttcctgactcataacacacttgttctttctattcttctgtttcaaagaggaaaacaaaaaaaaaagaaagtatctttccaaaatattcaccaaaacttaacccatcctaacttcaaagtcgaataatgtactaaggatgacctcacttataaaaagtaaaggaactgctagagatattaaacttccagaaaaggctcagaaaatgattgaaaaaagtttagaatagcgaggaggcagttagtgaaatcttaacaccatcagaagaagctgttaacttggcacgtggtgctctacttcctgcaacgaggcatgtcaatttcaaatgggaataatgattgtcattcacaagagcatcgtaaaaatggaacaagatcccctctgatacgttttggacatctgtcctctctaaatctcatgttgaaatgtaatccccagttttgaggtggggcctggcgggaggtgtttggaccatgggagcagatccctcacaaatggcttggtactatccttgcggtaacgagtgagttctcactctgagttcatgcaagacttgatcgtttaaaagagtctgggacctcctccctctctctcttgctccctctcttgccatgtgacaggctggatcctctgccaccttctgccattattctaagtttccaaaagccctcaccagaagcacatgctggcactatgcttcctgtacaacctgcagaaccatgggccaacacattctttatagcaatgtaaaaacggactgacacactctctacacacacacacagacacacacaccccactcatctgttaatactgagaactgttactgtgagaagattcttaccttttcagaagtatgtggaaagatttgtgttttgtggaaggcaccaatattaagcaaatttttttctttttttcttttttttgagacagagtctcactttgttacccaggctggaatgcaatggcacaatcttggctcactgcaacattcacctcccaggttcaagaaattctcatgtctcagcttcccgagtagctgggattacaggtgcacaccaccacacccagctaatttttgtatttttagtagagacggggtttcaccatgtcagccaggctagtttcaaactcctggcctcaagtgatcaacctgcctcggcctcccaaagtgctgggattacaggcctgagccactacacctggcctgttaagcaaacttttcttcttttagggtctacatgcatttatatttaatgagtaaaataaagttaatgcatggcaaaaatatttttctgaggaatttgaaatcttaccgaaatggagaatcttttttccttttttctttaaaaacacccatgcttggcttcttggaatgggaggctccgaaatcatagtcctccaactcttcccagctatctccagacttgaagatagtctgaccccaacgcctcctaccacttttatgactcagtgtgccatttggcttctgtggtggaaaatcagtcatcataatctttaatcatgtactgaatgcctttcatgcacaagctactatctatgtaagacactaacagtccccattctcaaggagcgttccatacatgtaagggcataacatatatacacatttaaaagcatgaacaaaaatgggcggtacatgccaaaaatatgataggtgttcagaggagagatctctgtgaactaggttggtgagagacttgaatatttaggatctgagttgactcttcattgacaggaaggatctggaaacctgagacttggctatgctctttgggcaagtgacttaacttctcaaagccttagtgtcctccttaagtggggacagccttaatgagaaggacactaaggctggcatgtgccagcatcttttactcttccccctccttgaatgcagacacgacatccaaaggaacaccagtcatcctgtggccacaggaatgaaagccacctgctcagggtggtggagcgggaagccagcagcagcctgcctcctctgcaagcttcatgagctccagctacccaccacccgatttcttgttatctgagaacaacaatccctattgtttaagccacagtggtcgagtttttgtcataagtccctgaatgtaatcctaacggaaacagagagggaagtatgagtctgactgtcacagaatggaggcatcattaacagaaataaggaatgggaaagaagtcctggcttagagcacacaatgaattggttttatacaaatttacagaaagtggtttgggggcacataaacagaaaaatccaaaaggcaactcaaaactagggaagagagcatggaaaattttcagaaaatacacctatgttgggtgcagggagattcttaaagaatggacatgctattgcttgaagctgacggtattacagtgatagtgatggatgataacaaaaagcagtatttgccagcttctctacactattactttctctgccaggcacaacaatctccagaataaagagaataaaaaaaatgttaagctccagatgagtagggttaataaaaggttacccttagctgagtttgagcctcccttctgttgaattgtattttagggtactgatcctgaacactgctgaacaatatcagtgatatgcaagaatctggtatggctgagaagactggaaaggggcaaatataatacttttaataaagtagaagatttatttttgcaaactccacatcagtaagtttggtagaggatgagggcaaagattctaaaatcaattattaaaggggatgtttgtgagcactaaggaaaaacagtgatagctcatatagaccacactttttcataaaaggcaaacaatgaattcattcagtgtagtgtatgtggacttcagcccagtgggtgaaggcagcaaaggggatcagcacatagttgaagaacttgaccaacagtactgacaaatggatcaacgtcaatctagagaaaggttctagtagcctgcccaagatctcacggtcgttctattcatcatgaagattcaggagcaaaacagacaactaaacaaatacacagctggcaacaagctgggcagaatgggtaaactgagaagaaaaaatacagattcaaaaataattagaaattgaagaggtaagagatcttgcaactttttgaatcctagagatgaaatacacaagtcagaggtacagaatatgcaatttaggagaagcatttgtgaaaaaacaggtatacttagaaattttagttaacacagtacttaatcccagctctggaactcacctatataaaaatgtgtgtgtggcggggctgggggctaggttattctctttaacttagagaatgcacacagcgtccctcgcatatgcatggcacttggaagctactcaataaatattaacttcctttccttccctcacaatatgagtcaacaattgatgcatcttccaaggggtcatggggaggactgtcatcgttggtggcacgagtgcacatatggtttagaatgtcggaggtgattcgccctgctctatattccctgcctgctgtctgcctctagctctggcaacctcattctaagtggaaagcaagatgagaggggacttaaagacacattcataataggaactgagagttatcagtcattggtgaatggtgttatatgcagagcccttaagggaattggagaagtttctctagagaaaagggcagataatataagggctattttcaaatatctaaaaggctgcctttctagaaaagtgattagccttcattaaaagctagaaaaccagattttacccagtattaaggaagaactttctaatattcagaactgttccaaagataaaagtggactccccaggaccccagaggtggtttacaagtcatgtgggcaattattcattccttcattcactgaacaaatatctactgagaatctaccatgtggcaggcactggtcggggtgctgaggctgtactgataaacacacaaacattcctgacctcactgagcttgctgcattccagaggaagagacaaataaacaataaacataagaagtaattaacagtatgttagaatgtgattagtgctattgggggacgaggaggccttgcttatctaggttggtggggcagttggggactggaaggaaatagatacagtgctgtataagaccgatttccatcctaaaatgccataatgcaaacacatttgggagtgtatacccagtgggacagctaaaatactacagcaactgaagagctcctggagctgaacaaaagatggaagaaaaagttttatactatgcctgacactttaaaaacctattctggccaggtgcggtggctcaggcctgtaatccaagcactttgggaggccaaggagggtggatcacctgaggtcaggagttcaagaccagccggaccaacatggagaaaccccatctctactaaaaatacaaaattagctgggcatggtggcacatgcctgtaatccgagctactcaggaggctgaggcaggaggattgcttgaacctgggaggtggaggttgtggtgagctgagatcacaccattgcactccagcctgggcaacaagagcaaaactctgtctcaaaataataataataataataataaataaaaacccattctctccatgttccttagcatttaagaacactgtaaaatgaaagtactgttaaaaattcttaagatttaggatcagtactctggagtacccgattcttttaaattctttctttgaattcttctgcattgaaagaattttaggccgggcttggtggctcacgcctgtaatcccagcactttgggaggccgagatgggtggatcatctgaggtcaggagttcgagaccagcctggccaacatggtctccactaaaaatacaaaaattagctgggtgtggtggtgggtgcctataatcccagccactcaggaagctgaggcaagagaactgcttgaacctgggaggtggaggttgcagtgagccaagatcgtgccattgcactccagcctgggcaaatagagtgaaactccgtctcaagaaataaaaaagaaaagcccaggtgcagtggctcatgcctgtaatcccagaactttgggaggccaaggcgggtgtatcacttgcagtcaggaactcaagaccagcctggacaacatggtgaaaccccatctctactaaaaatacaaaaaaatatccaggcgtggtggtgggcgtctgtaatcccagctacttgggaggctgaggcaggagaatcgcttgaacccaggagtcagagattgcagtgagctaaggtcgtgccactgcactccagcctaggcaacaaaagcgaacctccgtctcaaaaaaagaaaaagaaaaaagactgaagactgtagcatgtaaacttggttacttttatcctgaaagtttttctttttataaaccatattagaattttaagtgatctcatgtcaagctccaaccagaggactcagggtctttaacaaagaaaaatcttttatatcttttccaacattattagaaatgcctcgaaaaaaatcttaattgcacgagtcaaactatttcattgcaagtgtcatgactggctactcacagttggcatgtttttgacgatgctcgggaatagcgtttgtggcggtttctcctgactctgttgctttggaggttgctggacgctcaggttctgtggcggctgaatgggctgcagtggctgctggctagtttttggctggggttgtccaacaacctgatcgattatatccggcagaggcttaggctctacctcaactaaagatggctttgattctaatggttgcagctgcttatttaaagactgttttgattccagatgatttgacgaagggcctaatacctgaccaacttgaaaatatgggtgtttcaatgcctataaaaacacagagaaaacaacaaatggaaaacagttccacctaaatgtattgcacataaactatggttggccctgtgcgaggcatttatcattagcccacatgagcttcaaagatttagaaagcagccatcattccctatacagtgcctcttttaaaagataaccagaaaaaaatgatttgagaaataaattgcattaaaaaattaaaagtggctgggcatggtggctcacgcctataatcctagcactttgggaggatgaggtgggaggatcacttgcggtcaggagttcaagaccagcccgaccaacatggtgaaacccagtctctactaaaaatacaaaaattagccaggcgtgttggtggatgcctgtaaccccagttatacgggagggtgaggcatgagaatcgcttgaacctgggaggaggagattgtagtgagccaagattgtgccactgcacttcaacctaggcaacacagcgagactccacctcaaaaaaaaaaaaaaaaaagtactagtaggaaaaaatagaaagctcacttgttattataacatctaagcaaaacagctgttctatttatttaaagatttgttagtgaaaataaaatgtaatttatagacattggctaaattaatgtgattacttcaagctaaaatactacacaccaataatggtttagagtacactcaaagacattaaaaagtgaattaagaaaatcttccatatagattatttgaaatgattaaccagagctgtatgtaaaattccgggttactctcagcctgagtacaacaatatacctactagtaataaaaaaaaaatctaaagaggggacaacaaacacatactgttgaagtttatttcatcggtataccagcaaagagaagacatttatgggaagaaaatataaaaatattatgaaaaatgatcactgtttgagttttatctagatcagtcacctgactgcttgcatgagagggaaaggaccccctggtgtatgggtggcaccatctaatagcagtgcttcccaaatggaggcaagtttgccccttgggagatatctggcaatgtctggagacatttcttattataatgacaggggttgggggacgctactagtgtctagtgtctagagggccagggacattgctaactatcccataatgcacacaatagcaccccacagcaaagagttatctggttcacaacgtcagtaaggctaaaaccgaaaaaatattctacagaatgtctaaagcctgtgtagctcagctatggaaaaattcccttattggcatcaaatacctgggcaaagtagctggtcatttttggggggatgggttccttaagatggtcaagctctgttcccctgaacctcctgcctttagccagtccccacataggtgggaacatagccctgaccaacagttaactcctcccatgtgtaagggcagtttttagaggaacagaaggcagcttggtactttaaatggtcttcatattctacaacttaaccaacctctctccctaattaggtctttccacttccactaaaaagcagggctgtgaaacagagcacaagaaagagtttgttaagggttacttgcattctcagtggaatacacaaatatacataatttgaatacttcaatgcctagcacactgaaggtactcaaattctgaattaagtcacattaagtaattagtatgtcaatattcctaaattaatgatgcatattttggagctggaaactttgaggatgtgttttgtaatttcaaggctttatttataacaactcttccctttttttttttttttttttttgagatggagtctcgctctgtcacccagactggagtgcagtggcacgatcttggctcactgcatccgcctcctgggttcaagcaattctcctgcctcagcctcccgagtagctgggattacaggcacacgccaccatgcccagctaatttttgtatttttaatagagacagggtttcaccatgttggtcaggccggtctcaagctcctgacctcgtgatccgcccaccttggcctctcaaagtgctaggattacaggtatgagccactgtgcccggccaactcttcccttttaagatactttaagataccagttactatccttcaagaagagggaaaactttaaaaattaatagcatttattttttcctatttacttaagggaagcagtgatcattgtagagaatgagaaacgtatagagttctcaagacaaaaataaaaatttaacacccagagacaaccaagactaacattttttatacttttcggtatttttttctcatcatataaaatatatttttcaaaaacaaaatcatattatttgtataatagtattttagcatgagatttctcccaaattatttaaaaattttattttacaaattcactgttaatgctggcagtatattccaaattaaagatgcacataacctaagtttagaaacattatttatttatttatttatttatttatttatttatttatttatttttgagacagagtctcactctgtcacccaggctggagtgcagtggcacgatcttggctcattgcaacctccgcctcctgggttcaagctatccttctgcctcagcctcccgagtagctgagattacaggtgtgtgtcaccatgcctagctaattttttgtatttttagtagagatggggttctgccacgttggccaggctgatctcaaactcctgacctcaagtgatccgcctgcctcggaaagtgctgggattacaggtgtgcggcactgcagagccaccgcacatggttggaaacattttgattaactttcaatgtacagttttctattggaattgaacatctttgagcataatttctgattgtcttcaaggctctttttatatactacaaaattactttctcttactaagagagataaatgaaaaacggtatctcatttctacttgcattttataatagtaaacaaagactgaacatttaaaaaatattttttgtaatctgtatttcttttcctgtgtttctttttcatgtcccattactacttttctttttaaaatacatttgaaaaacttattatgtctttattatgaaggtaatgaatgtttagaaaaattagaaaatatgggccaggtgtggtggctcacgcctatattatttcagcactttgggaggccaaggcaggagaactgcacgagaccaggggtttgagaccagtcaggacaacatagtaagaccccatctttaaagaaacaaaactttcaaaaaattttaaaaaagaaaaattagaaaatacacttaaacggctgggcacagtggttcatgcctgtaatcccagcactttgggaggccaaggcaggcagatcacctgaggtcaggagatcaacagcagcctggccaacatggtaaaactccgtctctggccaggcacagtggcacattcctgtaatcccagaacttagggaggccgaggtgggtggatcacctaaggtcaggagttcaagatcagcctgaccaacaaggtgaaaccccatctctactaaaaatacaaaaattagccaggtgtggtggcaggcacctgtagtcccagctactagggaggctgagacagaagaattgcttgtatctgggaggcggagggtgtagtgaaccgagatcacgctactgcactccagcctgggcgatggagcgagactccgtttcaaaaacaaaaacaaaaacaaaaaaaaactaaacaaaaaaacccctctggtctctacaaaaatacaaaaataagccaagcgtggtggcgggcacctgcaatcccagcaactcgggaggctgaggcaggagaatcgcctgaacccaggaggcggaggttgcagtgagtggagatcatgccactacactccagcctgggcaacagaaactccatctcaaaaaaaaaagaaaatacacatacacatttcagtatttttcttgtgtttctgtaggagtattatattaagaattaaaaataattttctctgtcttatctttccattttaagatttttacatagagaaaaattttactttttatgtaatcaaattgtttgaatcttccttttgtggtttcttctattatttttatacccgtgttttttcaccttgagatcaaatacacatgtatgctttccttttgtttctaacagtttagggtgcttttttttttacactttgaaaatgtaatcctggtcgggcgcggtggctcacacctgtaatcccagcactttgggaggccaaggagggcagatcacctgaggttgggaggtcgagaccagcctcaccaacatggagaaaccctgtctctactaaaaatacaaaattagccaggcgtggtggctcatgcctgtaatctcagctactcgggaggctgagggtgggagaatcacttgaacccaggaggcagaggttgcggtgagccgagatcatgccattgcactccagcctgggcaacaagagtgaaactccatctcaacaacaacaacaaaatgtaacccttctgtgagttgtaaagtatggtgagcagtaaggacctcaatttatttttttccctaagagctaatgaattttcccagtatcacccactgagccgtcctcccctctttgtgatgccacgtttgtttaccttgtgctgactcatatgttctgcaacattcagctatttgtcaattcttatgccagtacttccactgttaccatcatcaatttaaagattactttaatatctgatggggcaagctgtccatccctatcaccgctctctaattccttattcttgttttaacatatcttgactatcctttcccatttgttcttccagatgacatttagaaaacattttctcaagattaattttaaaaaaagcaaaataaatttttgtaattttcacatggaatttatatttaaatgatgagaatacaataaagtttattattgcctttttattgaagccttgcagacaaaaacactgggtttaaaggccctagacttggaatacatctgtagatatgtcaggtgtagtcacaaaggaacaaagcctgggtgccacaatgctgccctcttgtggcagccagaggctgcacactccagtcccagcaagggatgatactgttgtataaagtgaaccagaatcccacccctaaactgtaaaggcagcataggaaagtctactatgtggaatgattcatgagatgcctttttgcttccatgacagattccttcataactagtctgtcgcaggtctgaatttttatcattgcagattgattccttgttgcaacctcagggttcttcatttgaaccacaaaactcagaaaatcattggtgtggctatttctgcatttctcccaatgatattatatgcctagaaattaatttattacatacgctggatgcctaggactttgtgtttaattctcttagtaaaatcctggttgagaatagacctgcctttgtaaatgaaaacatccctgatattacaaaacctaaacatttttaaaggtctaacaggaagactcctcttacctggcttgctgtcggtcgtttctttggatcccaattcaacatttcggtcatgagctgaatagcttcattactggcattgggaataagagtttttaagtttataggaacacactggggaaaacggaagttcatagaggatgccagctggtatccttctggccagtcactctgtttcaggaatatataagtgcaggtggggagggcaaaacaaattgtttttagtaatccatttaaaaaacacagcagtaatataaacatcatttatgtttgaacattttcatgttgatccatataaacatgaaaatgaaataccagaccacgtctataatttagtgctacgacagtatagaaagaacattaagctgagagttaggaaacaatgcgaaaagcacttttatagcttttttttgtttgtttttttgtgttttttttgagacaggatctggctctgttatccaggttggagtgcagtggagcaatcatggctcactacagcctcaccctcccgggctcaaaagatcctcctacctcagactcctgagtagctgggactacaggtgcgcaccatcacacctggctaatttttttttgtggagacggggtttcactatgttgcccaggctggtcttgaactcctgggctcaagtgatcctcctgcctgggcttcccaaagtgctgggactacaggcatgagccaccatgcccgcctttataaattttgcaatattaagctcttgtctggttttagatcctgatggtgatgttgctgtgatgatacctgggttaactctgaacaaataaggaaaagtgctttacaaagaggctgactgtgaacaaagatccttgtcgtgtatattacccattgcatacaatgttaaaaatgcacatatctgggaaatgacaattacattaaagctttaatatctacatttacttgtgtaatgttaactacaaggcacttactaatttaattaggatgtcattatatacacacttataaagcacatttcagaaagaaaggtgtagatgaaatatagttaattgaaaagcactcagttcaagaagtcaaatatccacaggggagatataaaaaaggaaacaagaaacggttaagaaaaaacaaggttcaagacaccaggggttaacaggtgatgccaatggccagccacagaatgagcaggaaagagctcaagcaaggctgtctgtacagtgtcagctgggcatcacccccaagttacactctaaacacacagaatttttcctgaagttcttaaggaaaggcaagcacctgtttttcttcagctggtgggattctggcttcttgcaatccttaacccactccgattaaaaaaataaggattacagccgggcgtggtggctcacaccaagtaatcccagcactttgggaggctgaggtgggcagatcgcagatcgcttgagctcaagagttcaagaccagcctggccaacatggtgaaatctcctctctactaacaatagaaaaattgaccaggcgtggtggtgcacacctgtaatcccagctacttgggaggctgaggcatgagaattgcttaaacctgggaggtggaggttgcagtgagctgagattgagccactgcactccaacctgggcaacagagcaagactccatctcaaaaaaaaaaaaagaattataagaaaattaatcattaaagtatgagcctatttcaaaatgaaaatatcagatatctaggcaaaagttgtaaataatcaaaattataaaattaaaagcaaagtagcaagatagaaataatcaaaagttatagcaacttagggacaagagtacttacttttttgggagtccctaaaacttggcaaattttaaagatttcatcgacctcacttgtccctgggaaaagtggccttaacatatagagttcagccatgatacttccaacagcccacacatcaatgggagaactataaactgaagatctcagtaaaacttcaggggcacgatacctatgaaaatagagaacaaaagaggtaattttgattgcaatttcaaaggtggatgggcagtagcattctacgctgtgtggtcatgcatttccatcaaggaacaggtattcagaccctgttccatctgtgtgtcaggcatttgtacaatgttctggggataataggacacaacacatgttccctgatcacagacaatgagtggggctggagacaaatgtctatgaaatgtccatcaagcctaagacaggaactcaactgaatagatatggaaataagtgccatctgatatattaagaaaaaaagtagaaaaactatgttacaaagcattatattcagcatctattcacaaggaagcacagaaaacaaaagatgaacaggattatatcctgagtagtggagtttttttttatcagtttgaaagtactgatatcctcaactgactcctcttctgtagtcaactatatttattgagtggagttttgctcttgttgcccaggctggagtgcaatggcgcggtcccggctcactgcaacctccgcctcttgggttcaagtgattatcctgcctcagcctcccgagcagcggggattacaggggcacaccaccatgcccagctaatttttgtatttttagtagagacggggtttccccatgttggccaggctggtctcgaactcctgacctcaggtgatcagcctgccttagcctcccgaagtgctgagattacaggcatgagccactgcacccagcctaacaatatttttaattgagaaaaatactcaatttacaagagcaaagtgagctggtgagtccaacacaaagtctgctaaatggaagacactctcaattctctttttttccaaccaaaatgtgtaaatatttcagtccaaatgtttggcatactgtctttttgctttcattgagaatactgcaagccctcaaataaactagttttgttcactgttgtttttgctcaatgttgtttcattgtaatgttgatgagaaagaaaaaaaaagaaaggcatttctggctgggccaatgtgtggggtttgcacattctccccaagtctacaagttttctccaggactccagcttcctcccatatcctagatatgtgcatgtcaggtgaactggggtgcctgtgtggccccaggatgagtgtgtgcatgtgtgtgtcggggggggggtggggagggggcgtgctgccatgggaggctgtcccgtccatggttggtgctcaccttgcacccccagcttccaggacacgctgttgccacctgtgaccctgaactagaataacttggcgaataattatcttccttgtttttattaatgtttctcaaatgtatgtatagcttacatgtatttcaatgttcaatattagtgttttggtcactatttagaagtttggtggccaggcacagtggctcacacctgtaattgcagcactttgggagaccaaggcgggtgaatcatgaggtcaggagttcgagaccggcctggccaacatggtgaaaccccgtctctactaaaaatacaaaaacttagctgggtgtagtggtgggcgtctgtaagctcagctactcgagaggctgaggcaggagaatcacttgaatccgggaggcagaggttgcagtgagccgagatcgtgccactgcactacagcctgggtgacaggaaaaaaaaaaaaaaaagaagtttggtgatgtttttgtgaccagaaacgtgccataaaattgtttactttaattagcctatggtcgaattggtttcatcatatgttgtttcacttaaagtgaaactttccaagaacctactgatgatgttaagtgagaacttactatactttgacgaatatttttacaagctttattgatatataattcacataatatacagttgatccatttaaagtgtacatcacactgctttctcccaaggtgccttcacgtgtcttccctcttccatctctctgtctgccttctttttataaggacatcagtcttactggattaagaccagccaggctgtggtctgacctcatcttaatctgattacatttgcaaagaccctatttcaaaataaggtcacattcgcaggtaaccagggcggatccctcatgaaaggcctggtgctgttctcacgtagtgaatgagttctttttcaggcaagatgaaattagttcctgagagagtgggttgctccacggcaagcttcctcctcttgtttgttcccttctcgcacgtgcccatttcccctttgaccttcaccccgccatcttttcttttttttttttttgagacggagttttgctcttgttgcccaggctggagtgcaatggcgcgatctcgggtcactgcaacctccacctcccgggttcaagtgattctcctgcctcagcctcccaagttacaagtatgtgccaccatgcctggctaattttttttgtttttgagacagagtcttgctctgtcacccaggctggagtgcagtggcgcgatcttcgctcactgcaagctccgcctcccaggttaacgccattctcctgcctcagcctcccaagtagctgggactagctgggactacaggtgcccgccaccacacccgtctaatttttttttttttttttttttttttgtatatttagtagagacggggtttcactgtgttagccaaaatggtcttgatttcctgacctcgtgatccacctgcctcggattcccaaagtgctgggattacaggcgtgagccactgtgcccggcctaatttttgtatttttagtagagactgggtttcaccacgttggccaggctggtctcgaactcctgacctcaggtgatccacccgtcctggcctcccacagtgctgggattcaggtgtgagccaccacgcccggcctgaccttctccaccatgttttgatgcagcataaaaacccacatcagaagccaagcggatgccagtgccatgcttcttgtacagcctgcagaactggaagccaaataaacctcctttctttaccaacttcccagccgcaggtgttcctttacagcaacacaaaaaaacacactaagacacggactcctttctttcagcccccacatctgattcattagaatcccacatttctcactacctgcatggccagcaggtccaagtcactatcatttctggccactctacaaactctgcccttgtttcctacgactgccctccttattcattctgcactgtgcagaattcacgtgtggcgtgcacctgtctcaaggcttttactctgcctaaaaaaaatcctgctggccctggcatctccatcagggctactctcagtcagaccctccatgtaacattcctttctctccccatctcccccaactccctgccccctttcctattttatttttctttataataatgtatcaacatctgatacacatatattccttttttttttttttttttttttttgagaaagagtcttgctctgttgcccaggctggagttcagtggcgcaatctcggctcactgcaacctctgcccccaaggttcaagtgattctcatgcctcagcctcccaagtaactggcaccaaggcgcgtgacaccacacccggctaattttgtatttttagtagaaacggggtttagccatgttggccaggctggtctcgaactcctggtctcaagtgatcccccacctcggcctcccaaagtgctgggattacaggcgtgagccaccatgcccagcctgatacacatatgttcttgttttcactggagtataatattcacacaggcagaggcatgtgttgtaagagtagagcttgatgaattttcacaaatacaacacatccacagacccagcacccagatcaagaaagacatgttatcggccgggcccggtggctcacgcctgtaatcccagcactatgcataggaggccaaggtgggaggatcaccggaggtcaggaatttgagaccagcctggctaacacggtgaaaccacgtctctactaaaaatacaaaaattagctgggcatggtgatgggtgcctgtaatcccagctactcgggaggctgaggcaggagaatcacttgaaaccgggaggcagaggttgcagtgagccgagatcacgccattgcactccagcctgggcgagagagcgaaactccatctcaaaaaaaaaagaaagacatgctatcagcacccagaaggccccttgtgcactagtccaggcactacacacatccccaccccatagaactgcttgctatcctgactttcatggcacagattagttttctctttttttgtactttgcataaatgaaatcatatggtatgtgctctttttctctttgggctcttgatctcaacattgtctaagattcgtccacattgctgcatgcagtcatagacccttcgttctcattgttgcaaagcattccactgggtgagtatacgatgctactgttcatggacgtttgggtggcgtgcagtagagaggattcatgtcttctggtgaacacgtgtatgtctttctgttggtgatccataatatttttaacttgtttatctgtctattggctgtcatgtaagcagcataaggcagagatttttcttttctttttttatttcactgctgtgttctctgtgcctaaaatgatgtttggcacatagtaggtgttcaataaatatttgttgaatgaatgaatgagtgaataaatgaaattctttttcctttttttttcagtgatcagaatagcaataaaccaatccttcgctttctttaaagaatataaaattcaattctgtgttttaaatattcaatatggaacttccagaaatatgtaacaatccatcgtaggaaaatttcaccataggcttatgcctcaggagggctgcataacccctactcaccatctggtagatacataatcagtgtatggtggctgtgaccttaattctcttgcaagtccaaaatcagcaattttcacaagctctggacccatacaaagcaagttttctggtttcatgtccctatgaaaaaagccttgatgatatacggagaaaaaaaaatacagtaaatcattacgtttaaacatagctttatttgatttataaacaaaatataaatgaaccccctcttttataattcaaaacatcatcttaggaaaaaagtaaaccatatttattgtctaagaagtaaatggggcgtagggaccctgcttttaaaatgctttggcaagaaagttcacacagtgtatgagataattaaaaataaccacccatttaacatttatttttatttgtgactccagtgggtgttcaggcactgggctaggtattaccacactatgattatctccattcatttgcacaacaacctgaaggaggtactgttatcactattgtgcaatagaggaggaggttgagggccagagtgaagtcacctaattaacgtgtgagaagtgtttttgtttttaagataggtcttgctctgttgtccaggccagagcgtagtggctcgatctcggctcaagcaatcctctcggcccactaagtagctgggaccacaggtgcatgccaccactcccacctaatttttggtatttttgatagagacagggttttgccacgtcacccaggctgagaagagcactttttaatcaggcttgagtcagtgcagctgacttcttgagaaaaatcacttgtttaaaaagtccattcaataaaaatggaactccacacatcagaactaatttcttcatttaaaattattttatctaatgttcagttttcctcaatagctgtgtcgttgcaaaatcccaataattataatgtttatattagcaattcaatctataaaataaatggttatgaagctaaaagggaaaccaaagaaaatgaggcagaaagcccagtgggggccaggcgtggtggctcacgcctataatcccagcactttgggaggccgaggtaggtggatcatgaggtcaggagtttgagaccagcctggccaatatgatgaaaccccgtctatactaaaaataccaaaattagccgggcatggtggtgtgcgcctgtagtcccagctactcaggaggctgaggcagaagaatcacttgaacctgggaggcggaggttgcagtgagctgagatcatgccaccgcactccagcctgggcaacagagcaagacactgtctcaaaaaaaaaaaaaaaaaagaaagaaaagaaaaagaaaacccagggggaaaagaacaaacattaaagccctcctggcagatgagatttgtcttaagggaggctttttctaagggcagtctacagcattctggttatatccaaatggcttgggttccaaaggccttgggaggcagggagactgcaggtgatcacttgaagagggttttcatgtagctttggagctgggaagactttcttttatctttttctttttttttttttttttttgttttgagacggagtcttgctctggagtgtagtggcgcaatctgggctcattgcaacctccgcctcctgggttcaagcgattctcctgcctcagcctctggaatagctgggattacaggcgtctgccaccacactcggctaattgtttgtatttttagtagaaactggattttgccatgttggccagggtggtctcaaacttctgaccttgtgatccacctgcttcaccctcccaaagtgctgggattacaggtgtgagccaccacggccagctggggttgggaagcctttttaagcctaaatgtttttaatcacttcaaagccagagtgggctctgtttgtgacatctgtttaacagttttgtaatctgagtttatccagtacttcttactctaaatagtaagtaacatccatttcactatgtccaagagacattcagatacttttgtaatgtaacgacaggaatgggaccatgtgatgcacagcagagtgacactaatccataaagtcttagagaactaaaccaattacatatttgtacagctgaggttttccccatcctaatatacatatattaataattcagtcctatttgaactaaatattttcatttttttgacagcaactattttattttatttatttattttttgagacagagtcttgctctgtcacccaggctggagtgcagtggcatgatctcagctcactgtaatctccgcctcccgggttcaagcaattctcctgcctcagcgtcccaagtagctgggattacaggcatgtgccatgatacccagctaatttttgtatttttggtagagataggttttcaccacgttggccaggctgctcttgaactcctcacctcaagtgatccgcctgccttggcctcccaaagtgctgggattgcaggcgtgagccaccacgcccggccaaacaactattttaaaatatctatttcttgaagtattacatctgagatgcttagcagcaagaattatgtggctttcgtaaaaacgtctaatcatccttataggctggtttcccaaattactatgtagccaactctacagtcaactgttgattattcatgttatttctttcagtcacaatttttaaatcgtaatcgaacttcctccttcaatcccttatgcttcagacgttgctgacagcataaatcaacccaggcaaatgtcaagtgttaccatgctgaccagagtttaaaacaattaaaaatcaggaatccattatgaataattaaaatagcagatgtcccttatttccatataattaatacattactgctgtttgccaataaagtgtagtatatcattacaggatttagacttttaaaagaccccaatagtttacatatggtgcaaataaaaagtttttttttaatgttcttaaaacattctaaacataccctttttataagtttaagaagtgttcttaaaatatttatatggaatcctgcatagcatttttggaaggcaaataattcctgtagcagttaagaaaataaaaaaaacaaaatataaactacaggaggaggatgggtgtgatggctcctgcctgtaatcccagcacttccggaggctgaggttggaggatcacttgagtccaggagttcaagaccagcctgggaaaaatggcgaaacctcatctctacaaaaaagaaaaaaattagctgggtgtggaagcgtgcgcctgtagtcccagctactagggaggctgaggtgggaggatcacctgagcccaggaagtggaggctgcagtgagccatgatggcaccactgcactccagcctgggcatcagagtgagatcctgtctcaaataataataataatagcaataaaataaaatacaggatgagacatgaagggaaactaatggtgattttccagtgcctatgttcagaacacagcaatggtatgggacaaacttttctaatttagtatctaaacatctagtgattctaaacaaatgtttttaaaaaataatcatattaactttttggactaataattattttgatttgatagatatgaaaaactacattaattgaagtacataattcatagaaaatagatcaagtattaatacttgctttaatttcattcacagaatagaaacaactaaatgtaaaaactaaggaaaactataaaacactgctccgtgggtgctacaaactatttaagtgttaataattggtcatgctagatcaaaataatctaatcttttccaaaagaaggtcctttttttttcatttccacgataaaattagggagaatgaggttgcaagatgggtatatgatgactgagactaaaggctgatgatgattaaactgttaaaaaattctgctgtggtggaagataattatagattatagaaattctatttttttattttttgagatggagcttcgttctttttgcctaggctggagtgcaatgccacaatatcagctcactgcaatctctgcctcctgcgttcaagcgattctcctgcctcagactctcaagtagctgggattataggcgcgcgccaccaagcctggctaattttttacatttttagtagagatggggtttcaccatgttggccaggctggtctcgaactcctgacctaaggtgatccccccccccgcctcggcctcccaaagtgctgggattacaggtgtgagtccggcctggtatgtatgtatgttatgtatttttatatatatatatatatatatatatatatatatatatatatatatataaattttttttttttttttttttttttttttttgagatggagtctcactctgttgcccaggctggagtgcaatggcatgatctcagctcactgcaacctccacctctggggttcaagcaattctcctgcctcaacctcctgagtagctgggattacaggcgcccgccaccacgcccagctaatttttgtatttttttttaacagagacagggtttcaccatgttggccaggctggtctcaaactcgtttgacctcaggtgatccgcctgccttggcctcccaaagtgctgagattacacacgtgagccaccgtgccagccagaaattccattttatacagaatcacagaaattgataaagtttttaaataaaaatgtcagtgtgtataggcacatactccagattcatagttatccaatataacagttatttaacagtttaataaatttgtatgcacaatctggacagtaatctaaagaggtagggaaattaaacttaaaagaaacctaccatgtttatggataaaagccagcccttgcaatatttgatacataatatttctgatgactgattcagggaacaacttgtttctgtaaagaaatgaacagtcacataattctgttaagcaaccagccaaccaatccaaagaaggtttatattccccctgccttggagcctctactggcctcacgatactggttaaacctatgatttatagatttatactcttaaagctcacacatttaaaacatgaaaattagatttttttttgttttgatgtgaggtaaaaactcaaatccaaaactgaatatattgcacacatattaaatagctaatttttttttttcttttgagacagagtttcactctttgttgcacaggctggagtgcagtggcgcaatctcggctcactgaaacctccacctcccgggttcaagtgattctcctgcttcagcctcccaagtagctgggattataggcatgcaccacgatgcctggctaattttgtatttttagtagagacagggtttcgccatgttggtcaggctggtcttgaactcctgacctcaggcgatctgcccacctcggcctcccaaagtgctgggattacgggcatgagccactgcacctggcctaaatagctaaattttaaactgtcccaagaagagcaaagcaagttgaaaaactgaattactaacagataagccaagcatgcaaatctgtattatgcaggcttgaagaatttgagagatggccggatgtggtggctaatgcctataataccagcactttgggaggccaaggtgggaggatcgcttaagcccaagagttcaagaccagcctgggcaacatggtgaaaccttgtgtctacaaaaaatacaaaaattagccaggtgtggtagcgcatgcctgtagtccagctgctggagaggctgaggtgggaggatcacttgagcctgggaattcgaggctgcagtgagctgtgactgtgccactccactccagcctggtgacagagtgagatcctgcctccaaaaaaaaaagcgggggggaaataaatttagagatataaataaatgcttcagttctattctgcatattggtgttgtccagtagaaatataagagccggctgggcatggtggctcatgcctgtaatcccagcactttgggaggccaaggtgggtggaggtcaggagttcgagagcagcctcgccaacatggtgaaacctcatctctactacaaatacaaaaattagctggcgtgatggcacatgcctgtaatcccagctactcaggaggctgaggcagaaaaatcgcttgaacccggagggtggaggttgcagtgagctgagattacaccacttcactccagcctgggtgaaagagcgagactccatctcaaaaaaaaaaaaaataaagaaagaaatatatatgagagccacttgtgtacttaacatcatttttctagcagccatgttaaaataaatcaaacaggtaaaattaatttttaacaatatatttaatttaacctaatatatgccaaatattatttcaacatgtaatcagtataaaaatgagctgactgtaccactgtactccagcttgggtgacacagcaagactatgcctctaaaacaatgtttttttaattatttatttttaaaattttacctttttaatttttattttttgaaaaagagatgcgggctgggtgcggtggctcccccctgtaatcccagcactctgggaggccaaggcaggtggatcccttgagttcaggagttcaagaccagcctgggaaacatggtgagaccctgtctctactaaaaatacaaaaattagccaggcatggtggcacgtgcctgcagtcccagctacttggggcaccgaggcaggggaattgctggagcccaagaggtcgaggctacagtgagccatgtttgcaccactgcactctggccctccagccaaggtgaaagagcaagaccctgtctctgaaaaaaaagagagacacatggtctcgctatgttgcctaggctggtctcaaactcctggggctcaagcaatcctcccgccttggcctctcaaagtgctgagattacaagcatgagccatcaagcttggagtaaaaattattaataaatttgttttgtaacaagttttcaaaatctgatgtgcaatttattttacatttacaacactcttcaatgcaaacatttcaggacttcaatagccacatctgactaatgggtactgtattagtgtagctttatacagtatatatatatatatatatatatatatatatatatgtatgttttcttttttgtttgagatggagtcttcttctgttgcccaggctgcagtgcagtggtgcaatcttggctcactgcaacctctccctcctggccaacgcagtgaaaccctgtctctactaaaaatacaaaaattagctggcctcctgggttcaagcaattcttctgtcttaccttcccgagtggctgggattatgggtggcctcaacctcctgggctcaagcaatcttctcacctcagcctccaagtagctaggactacaggtgtgtgccaccacacctggctaattttttaatttttttgtagagatggagtctcactatgttgcctaggctggtctcaaattcctgggctcaagtgatcctcccacctcagcctcgcaaagtactggattaaaggcaggaactaccacatccatccagatttatatatatttcaaaaatagatgaaaatttaatatttcatgaatttacatgtatttcatttttttcttcaacaagggtatcttgatatttcatgtaagtatatatcatttcaatattttaaaggacaaaatttattagaggctgaaaattaagattacccataatcccaccacctgattaagaaacttttaatttttcagtattctaatccagtcctaatccatctgcatacataacttttatattaggaatgaaagtcacatacacacaatttggtttgttttttcacttacaagcgttttcataacccttataattatcacctttaatggtaataattccatcaatattatatacaataattaccaacctattttcacactaattatttattttaaatagttcaaaaagtgaagcttagtatagccatttaacagaatatattatttataactataaagactaagtatccacataaaaaatacttgtaagtaaattaatcaaataaaaaactttgtcccactaaaattacaactaagtaaaaaggcgtgcatgtctatatagaaggcctagaagggactctgaaaaagtaaaaactgatttgaggggcagaaatttacttttattttaattgacattaatgttatgatgatttcggcctggaacataagaggcattcaataaatatgttttgagaaagggaaaaatatgattaaagaataattcaagtaacatcctcagaccttgagcgagagtgtgtgtgtgtgtgtgtgtgtgtaagaatcaaagagaaatcaacatcattacttcggaaaattatttctaagtatttcagagtttgttgttgaacatttctcactttaaaagcaggcaaaatggatgttaatctcccagacatgaccagaaccaccaccaaaacattatctccccaagcccagggcggaagaccaaagctctccctttacagattctgcccacacatatttaaaaattgtgaatttccttgggattggtaacacatcaagtcttatcactgacttgtgcattctaatgactgagctttttagatcctttcttgaaagcaacttcattcctttctccattctttcattaaccttcacaagatgcttgggagagcaaccaagataattttctcaataatgcccaaggccagctttattattgagtaataaactatacataaatttgtattttaaaaagcataaatagatagtatgtgtatttatatgagatactggccttcactttcaaggatttacaacagaaaaatgctggctatgtcacagctggttcttcagtgttaaatgttaccctttgataaaggtaacagaactggttaatttaaatttaccttttggagcaatcaatctttctctcataaagtatgacatatcaaaaggatccaaagaactcatggagagaataacagggaaaaacatgaataaaaacatacctgtctttcattaattgatagaggttttctttcatatattcaaatataaaataaagatggtcattttctctgataacttctttcaatttaataacattggcatgattaagtttcttcagagactgaaaaataacaaatatgccttaaaatttcttaaaaaaaacttacagaatttggcaaaattgcatcaatgctaagtgtaataattaccttatgtaattttccatttctcctgggttcattaattaattacattttaatatctacataattgctttaagtaatgaacgttaagtgcaaacaataaatcaagccaacaatagctattaaacatttcaatctgttacgtttttcccttggtttataaataggtctaacttttgtctgacttaaccatgcaaaggtatccaaaattgtatccaagtctttaagcataaaatctaaggaaatggtatgtagtaatttaaaaagttgtctttggtggctgagcgtggtggctcttgcctgctatcccagcactttgggaggctgaggcgggcagatcacctgaggtcaggagttgcagaccagcctggccaacatggtgaaaccttgtctctactaaaaatacaaaaattagctgggcatggtgacacacacctgtagtcccagctactcgggaagctgaagcaggagaatcacttgaacccaggaggtggaggttgcagtgagctgagatcacaccactgcactccagcctgggtgacagagtaagactctgtcacaaaaaaaaaaaaaaaaaagttgtctttgcataatatgattttaagatgctcttttaaaagtgaaagtgaattttcaaatgtgaggatataattatacgctgttctccactgacatcagaaccagaagaaatgagaaattaatttaggaatataaaggaaaaacaaacaaaattatcttcagaatgcttcccacagagaataaaatcatcttaactacggtcctcaggtagtgttaaggccttctcaggttcttttcatctttaggattttaccttaacttctctcaagttcatgcattcatcccaagaatagaactttctcttcatcctaaaataaattagggaaagtttagtgttcagggattgaggattcaaagacacacattacactgttggctttcttactccactactggttcactttgggcgagctatctttctctgtcctcatccttataaggaaatcacctcctatacctcaaggctacttggtaggcctacgtcacatccaaaattcagctttaatcaaaagtgaaaaaattaccattaatcttcttttctgggtgagttcttaacatttctctaatcagtttaattgtgcctttcttaaagggtccttttcaagattctctctttttagaacttaagaggcccataaagttaaatgtctccctacttaaatgatttaagttggcaaaaattcagaagtaactacaaacgttagaaatggctttcttggccgggaacggtggctcacgcctgtaatcccagcactttgggaggttgaggtgggcggatcacaaggtcaggagttcaagaccatcctggctaacatggtgaaaccccgtctctactaaaaatacaaaacaattagctgggcgtggtggcaggcgcctgtagtcccagctacttgggaggctgaggcaggagaatcacttgaacccaggaggcagaggttgtagtgagccaagattgcgccactgcactccagcctgggcgacagatgagaaatggctttcttgaattttgttctttacttcccctctttcatcccaatgttggtttctattagagataaatataccaaaagtgtatttaagagtaaaaactatttccactatatacaccagttagttgttgtttttatatgaacatgtgtttttatatgaacagatttttagtcaccatacaaaacaggggataataaacaggattcatggccgggcgcggtggctcacacctgtaagcccagcactttgggaggcggaggcgggtggatcatgaggtcaggagatcgagaccatcctcgctaacacagtgaaacctcatctctactaaaaatacaaaaaattagccaggcgtggtggcgggcacctgtagtcccagctacttgggtggctgaggcaggagaagggcgtgaacccgggaggtggagcttgcagtgagccgagatcgcgccactgcactccagcctgggtggcagagtgagactctgtctcaaaaaaaaaaatttaaaaaaaacaggattcatattctaaaaaatgtttcttcaggcatgggaattataaggctgggctgtgaaaaagaaaaaccaaatatgccatgctgctttcatttagtattataatctcctatcgagatgttccagaagatccttgggaagcttagcgttgtctttattaattacaataatccttaagatccagaggctctatgggggtataatacacaggtgaggaaatgagtaaaaattggcagcacaacatcacagccaagaacagaggctgtggaaccgcactgcctggattcaaatccttgcccagtcactcaccatatgactttggacaagtcacctaatgacctgtctgtgcctcaaattccttagctagccatacagtagaaactactgcataagaaaagcatcttgcaaactgcttagttcagcactcaataactactagatgttttcatgtttaccaatatctatgattgactataagacgaaataaaggacatcactgagatgacctcaagggcatcactgctattatttctaaaatatccttagtgaatcagaatttcatttgcagttactcaggtactagatatttatgaagaagcgtgatgaaatgggggtttactagcttattaaaagatacttttcagtgccatagatttataaaatgtcttgctaaaatgtaaaatgtaaatctagcacaatgatgaatttaaaataaaacagaagccaattcaaatacagctatgaaagaaaagttgattaataaaatgatcatatccatgtgaaactgcacatataatctgctatgattctttttatttattttattttttttgagacatggtctcattctgtcacccagactggagtgcagtggcctgatcatggctcactgtagccttgacctcctgggctcaggtgatcctcccacctctgcctcctgggtagctgggactataggtacatgccaccacgcccagcaacttcttgtattttttgtagagatggggtttcaccatgttgctcatgctagtctcaaactcctgggctcaagcaatctgcccacctcggcctctcaaagtgctgggattacaggcatgagccaccacacccagcctgctatgattcttgaaacgtaatttcagaattttatttcatttttgagatggagcctcgctctgtcacccaggctggactgcaatggcgtgatctcggctcactgttacctctgtctcccaggttcaagcgattctcctacctcagcctcccaagtagctgggatgacaggtgtgtgccaccaagctcgactaatttttgtatttttagtacagatgcggttttgccatgttggccaggctggtctcgaattcctgacctcaggtaatccgcccacctcagcctcccaaagtgctgggattacaggcatgagccaccactccaggtctagaattttaaaagtatccaatcttttagaagccaaataaaaatacgttcaagttacttttcaagcttcagtgataactgaaactttcattctacctgtaaaatctgcactctcactggcatgctggtgtgcgcctgtagtcccagctactctggaggctgaggcaggcggactgcttgagctcaaaagttagaggctgtagtgtgctataaccgagcctgtgaatagccactgcactccagcctgggcaacacagggagactttgtctcttaaaaaaaaaaaaatctgaggccgggcacggtggctcacacctgtaatcccagcactttgggaggccaaggcgggcggatcacgaggtcaggagatggagaccctcctgggtaacagggtgaaaccccatctctactgaaaatacaaaaaattagccaggcgtggtggcgggcgcctgtagtcccagctacttgggaggctgaggcaggagaatggcgtgaactcgggaggcagagcttgcagtgagctgagatcgcaccactgcactccagcctgggcaacagagcgagactccgtctcaaaaaaaaaaaaaaaaaaaaaagctggccgggtgcggtggctcacacctgtaatcgcagcactttcagaagctgaggcaggtggatcacctgcggccaggagttcaagaccagtctaaccaacatggagaaaccccgtctctactaaaaatacaaaaatgagctgggcatggtggcgcatgcctataatcccagctacttgggagacggaggcaggagaatcgcttgaacctgggaggcagaagttgcagtgagccgagatcgcgccattgcactccagcctgagcaacaagagcaaaactccgtctcaaaaaaaaaaaaaatctgtattctcttcatccatccagatgtactctcttcatctcttcttctttccagcaattaccacttctcagcagtacttcccttccctaaggcaatgcatgtatctatttacaacaaatacagaagtttccttacaaaatgattatcccaaaggtaaaccaattgcttagaatagctaagaaaaggcatttccttttaggttccttgccatcttttgtcatttattaattcgtcaatatccactccatgccagggcaatgaacaaataagagatggtaccatggtgttcccatctgacacaggaaatcaacttcagaaatagaactacctctcaagttcttaaagggcagagggcttaatagatatttattaacttaattaagtgagggaatctttctaccatcctctatcataaagtaaataactttttttaaaaaaaattgcagaaaagacaagatttcagtgatctaaattaaaactccccaaaggaaacattcaaagaaacctcttattttgttcagtgtagtgttctcccaacttctaaccattccccctccaacacatcctagccagttttgactgcatttctagaccgctcaaaaggtttgcctgctgaattaagcacagactttcttctccatgtttacattagcagattacaccaccctgtccatcatctaccaactgccatgccatgcccttgcttcttcaggccaactcccaaaagcagagggccagcattcagcttcttctctgcttctcaacgtaattctgaacttgtttacttcctacttgttaaattccatatggaacttgttaaattccatatctaataacacatggaacttgttaaattccatagctgaacttctctaattccaatagaaacccccactcccagcccccgacaccggctcttttgtttaaaaggtttttagaatgaaaacaccttccaggtaatcaatttccctttaaggggacatgtttactgcccactctgaaaattaagaataggcagctcttcttcagctactccacaaaatgtattcaatgtagaacgtatttatttatttatttagagacagagtctcactctgttgcctgggctggaatgcagtggtgtgatctcagctcactgcaacctccgcctcctgggttcaagtgattctcctgcttcagcctcctgagttgctgggattacaggcacacacgaccacacccggctaatttttgtatttttagtagagatgggatttcaccttgttggccaggctggtctcaaactcctgacctcaggtgatccaccccacttggcctcccaaagtgctgggattacaggcatcagccaccacacccggcctggaatttatttttaattttaggggaaaagtatcgatggatcttaaagcggtatctaacaagttatacctagaatatttatagcctaaattggaaatgcctaaaattttatatcaccaagcaaaagattgataggatattatgggatgtgaattgttttggtaacaaacaaaaaaaaaaaatgagaagggagaatgaagactctaatatctgtaattttcaggtaaagtttatccctctatatcgggctttaaagagatggcaaagcctgcttgtatgactcttgtagataacaatcactgtctcattcagacttgaggagtaacggctatagtgaatattcaatgtaggttaaactgataaccctgccagtagcctggcttcacagttgcttaactcctaagagatgttcacctctgtcttaccacagttaccataaactccttgttatgaggaatggtcctactgtccaagacctaacaacctaacttcagactcttgatcataacctcctatccttttcaccgtcgctaccctcaaaacttctttatacaacctctttcttgttcaacttgtggctattcctacaaccacctgtgtggcgtggtttgcctcctcatccagcttggccccaccatcagcctttcacccactacactctcaagatcacacacacgttctgaacatccccttctcccaccgttccactgctcctgccttgtcatcctccagtctcccctctcctgccttgtcatcctccagtctcccctctccatacagatgggtggaggtggaaagcaaagtcatgaaaatgctcccagcggctccactttcacattcgtccatgtaatttcaggcggactcttcctgacactgggcaacccctttgtggctttcttaacaactcagtaactcatccttcacaactctccaaagctccatgcctccactgccgtacttcccgctactccttgtcccactgcagtctggcttccactattccactggaacagtgctcaccgtggccgccagttatgtcatattccccaaacccaaggaacaccacagccgatgatattgttgaaatatcacaaggccatttccagcccctttccttctgcctcctaatatagagactggaagagtaaatactcactctctcagcctcctttggaagagagaccacgtgacccaatactagccagtaagatgtaaggggatgtccttgaggacttctggggaagaattatcactagctgataaaagatgagaagagtttgctcgtattattctgccctcttccctccttgaacatggacgtaatgcctggaggtgaagtagccataaggtggtcattaggtgacacatttgaggacaaaaacaatgctaaccgctcagcatgaaaatcatagaaaacatctgaatttcttgggtacaatgttgagccattgaaagagctctggaatcatcacactccagacttcttgatacgtgcttctgcttctttagatctttcccttggtttcagatattttctacattctcctggtttctaccctatttctctggtggctcctcagacttttttgtaagatcctattccagggcccatcctttatatgccatggtttctcggtgccctaaatgaggacctcttttcttctccctctaaagagtttcaattgccatctgtagactaaccattccaaatcattagcctgcacctctgttttgagatttaaatgcaaatattcaattgactaaaagtcatcatgccccagactgaattcagctttacccctaagcctgtgattttcccctccttgacatggtacatggtacatggcaccaccactatacatttaagccagaatcccaggagttagcctggactcttccccattttttactcctccctccaccctcatgcccagtcaccagtttctatagagcctgcttcctacatgtcccttgactgtatccacttacatccatccccaaagctattttcctgtcaggccaccaccacttctaaccaacatgactgcactgaccttctaacctctaaccaagatgactgtattgaccttctaactggccacctggtgtccagtcttgacctcttcaatcgtctccactcttctgctaatcagccagttccaaaaatttgatcacatcaacaattctgctgaaaatccttcatgaccttctagtcttcaagatatacacgctccttcatctggcttcacgacttcacctgctagcctcacgtccctcctctgccccactcgtaatccacgctccagccacctacacttctttcagttactcagccccagttaggccctcacacactctctctcgcctccagggcttcatacgtactatttcttactccctggagcatttccccccacccccccttttaaaaaaataattttctctcattcttgaggtctcaatgacttgggaagacttttgtgatacttctccagtgtggcttatctaggctcccacaggacccaatattcccccatcataggacttagcatacttgatgttgtaacttcttgaatctgttggtcttcctgagtatattgtaagacatctattttgtcccgatcatgaaatacaacaggagtttaacaattttgtgctaaatgaatttttcaattttcttcaagtcttccatgggactcctcttctcattcatttttgctccatctttgcctaaggtggagcactgcccaacacacagtagatactgcatgtggcagacacacggtaagctgagtagctgaaagccctccttctctacctcttcattcacagagtcagcttttacacaggaatataaaatgctcagctaagtaatcagtttcccagcctccctgcagctaggggtgccatgtggtacacttctgatcaacgagaagaaaccctatgcattctggatgggatgtgagaaagcttttgctttcccaattaaaagagtacagtaggccgggcacggtggctcacgcctgtaatcccagcactttgggaggctgagactggtggatcacctgaggtcgggagttcgagaccagcctgaccaacatggagaaaccccgtctctactaaaaatgcaaaattagccaggcgtggtggtacatgcctgtaatcccagctactcgggaggctgaagcagaagaatcgcttgaacccaggaggcagaggttgtggtgagctgagatcgcgccactgcactccagcctggcaacagagcaagaatccatctcaaaacaaaacaaaacaaataccatatttttgaaggataaaacaaataccatatttttgccactcagaaaaaaatgatggacattttgtcatataaaaccagacagtaataaccatctgtgggactgtacccaagacccaacaccccttctgattcgcctaccctcctccccagaacccatggctatcatggattttgggtgtatctttccaggcctttaaaaatatttttgtatatggatgtatttgtatataataaagtatttctttgtgtgaatttacataatcatttaatctacaaatgtgggctatttcagctcattttgtctaataacactcatttcttaggtttctgtcttatagcagtagtaagtatccccaatgcaatcctaatcagcaggactgctagcaggcatttggggttttcaaacaatttgtactgatattacttctgatatttcacattaatatgaattatataggttttcgtactaattcacattaatatgaattatgtaggttagggaagtttctttttattcctatttgctaagtttttgttttgttttacttttgtttttgtttttagatagggtctcactaggtcacctaagctgaagtacagtagtggtggcactatcttggctcactgcagcctcgacctcctgggctcaagcaatcctcccacctcagcctcccgagtggctgggactataggtgagcaccacgatgcccaattaatttttgtattttctgtagaggtggggtttcaccatgttgccaagctggtctcaaactcctgggatcaagcgatcctcctgccttgccctcccaaagtgctgggattataggtgtgagccactgcattcagccaagaggctttatcataagttttttaagaaatcaatgtttgttttttttagttcatcaaatcacaaatgagcactgaattttattaagcctattcaatttatttttcatttccattattgtatattatatatttacttatctgatgataatgactatttaaaaatattttatgaagttatttccttgtacatgtaatggtttagatcataatattttaaaacatttgctaaagtatttaaattttagtttgtcataatttggttgatgtggtaatgtggagatgcgtatcccatgagtacgggactggttctggtggaagtcaactgccatgtcccgaggctattcaaacaaccctctggaaaggcccaaggaaggagcctctgtaaaagggaattgaggtgcctcttgccaacagccagtacaaatatgccaaccctgtgagtgagtgtgatgggttcaactgtgtcccccaaaactcctatattgaagtcctagcccccagactttcacggtgtgacagtatctgaagatagggtctttaaaaaggtaattaagtttaagtgaggtctttcaggtaggcccaaatctgatatgactggtgtccttataagaggagcctgggcaacatggcaagaccccatcactccaaaaaaattttttaaaaattagccacatgttgtggtacacgcctacagtcccaactactctggaggctgaggcaggaggatggttcaagcccaggaggctgaggctatagtgagctatgtttgtaccaccgtacctcagcctgggcgacagaatggaaccctgtcttgaaaaaaaagaggggggaaatgtggacacagacatgcacaacgagaagatcatataaagacctagagaggatatggctgtctacaagccaaggagagaggcctcagaagaaacaaccagcagataccttgatgttgcacttcttgcctccagaactgtgaggaaataaatctctgttgtttaagccaaccagtctgtgatactttgttacagcagccctagcaaaccaagagtgagccaccttggaagtagatcctgcagtcccagtcaagccttcggatgactgaaacttcggccaattatctgactgccatcagagaacccaagccagaactacccagctaagctacttctaaattcctgacccacagaaactatgtgaattaataaatgtttcttcttattttaaatcactaagctttgcaggtattttgttatgcagcaatagataaacacagtggattaaaaacaaacaaattaacaacaattctatttcataagttcaggaatataacatatatcattcagaactcaatttgacattatgaataccatctgattttgagaccttgttttaaagaaataataagccctactctgcactcaactttaaatgtgaaaaacaggtcaggaatggtggctcacacctgtaattccagcactttgggaggccaaggtgggtagcttgcttgagcctgggaagtcaggactgcagtgagccatgatcacaccactgcacgccagcctgggcaacagagtgagacccccatctcaaaaaacacaaacaaaaacgaaaaccaacaaataaatttggaagaacattccaaagatcacctgtagttttggtccaaatgtattatacatataaaaaaggaggcactcatattttttggtttatcagtgtagctggacaagccagacagttaaagtaatatagaagaaaaacagcagaattcctctttggcaatgttcttttccaagaatgacattccacatgagccagatgctatttgatctaaactagacctctttctgtgctcgtatatattctttttttttttgagatggagtctccttctgtcacccaggctggagtgcagtggtgcaatctcagctcactgcaacctctgcctcccaggttgaagcgattctcgtgcctcagcctcctgagtagctgggattacatgtgtgcaccaccatgcctggctaatttttgtatttttagtagagacagggtttcaccatgttggccaagctggtctcaaactcctgacctcaacccaaagtgctgggattgcaggcatgagccaccgcacacagcctgtgtgcacgtgtgtgtgtgtgtgtgtgtgtgtgtgtgtgtgcgtgtgcacgtatatatatatatttttagacggagtctcactgtatcacccaggctggagtgcggtggcgcgatctcagctcactgcaacttccacctcctgggttcaagcaattctcctgcctcggcctcctgagtagctgggattacaggcgcgtgccaccatgcctggctaagttttgtatttttagtagagacagggtttcaccatgttggccaggctggtctcaaactcctaacctcatgatccgcccgcctcggcctcccaaagtgctgggattacaggcatgagccaccgcgctggcctgtgctggtatatattcttaagcgaggacaggaaaataaagagcagagttttcaaaggtgaagttggcagtgtcacacacagtaccttttgatggccaccagctccccggattcattactcttgcccataagcacactcccatacgtgccgtcccccaactgtctcatggttgtgtatcggttcatcttggaaaaataatgcagcagaagttgttgattgaaatgacttccttgttgaatataaatttgaacgcttcttaatttttatttgcttttgtcctcacactgttgttgctacactggtgacaggtttgtcatcattaaatatagtctctcccccaagattacagaggttcatgagatatagcatgaaggaatcgggcaaggaaacaacacttccattcttataaacaccctaaagaaagaaaacaaggatatcatgaattttcattaacaagtctcttcaaaaattgtactggcaacttagagcaaagggaaaattataaataatataaatactattgtgttaaatatttgtcagtaagtcatttgtctatgtaaaatgaagttcacatataactcactggtaatactcacttggtaaatgcctcatttacatggtactgtgctatttatgttcaataatggcataatggcttgtatgattccttttttactaaatataatctacattattccaaatcagaccttggaaaattgatgtctatatgatatccattctttgaatcaatttttgtatcatatttaatttggcatattgtttaaaactgtactacttgtaaattttctgtggaatataagtaccccaattgggtaaggtaagtataaagcaaacttttgtttcatatgaaaggaatagcattattttaaaatttcatattctatttaaataacatgctactttattttacatcaaactaagaaaaatgtaaatactaattaggatttagtgtcacactaggttcatacaaagaaataagaaacatagccgggcgtggtggctgatgcctgtaatcccagtgatttgagaggccaaggcaggaggattgtagaggccaggagttcaagaccagcctgggcaccatatcatgcccttctttacaaaaactaaaaaactagctggacttgatggcacgcttgtagtcccagctacttgggaggctgaggcacgaggattgcttgagcccaggagttcaaggttacagtgagctatgatcacaccactaaactccatcctgggtgacagagtaagactctgtctctaaagaaaaaaaaattttttaataaataaaaagggaagtagagcctgaagatgtgactgaaatgttgtaacctcataatcaaacttgaatgaatgaggaagtgtttcttatggatgaacaaagaaactgttttattgagatggaatctacttctggtagagatgctattaacactgctgaaaagacaaaaaagaatttttttctttttttgagacagagtgagactctggttggagtgcagtggcacaatcttggctcactgtaacctccgcctcccaggttcaagtgatttttgtccctgagtcctcacccctgtcaccatcactcccccagtagctgggattacaggtgcccaccccgacccccagtagctgggattacaggtgcgcaccaccacacctggctaatttttgtatttttagtagagatggggtttcaccatgttggccaagctggtctcgaactcctggcctcagcgatccgcccgcctcggcgggattacaggcatgaaccagtgcccagtcaagaacaaaggatttagaatattacataaactgagttgacaaagcagtggcaggatgtgagaagactgacttcaattttgaaagaagttctactgtaagtaaaatgctatcaaacagtctcacatattacagagaaatcttttatgaaaagtctgtcaatgtagcaaataccattgttgtctcattttgagaaatggttacagccatctcaaccttcagcagccaccaccctgatcggtcagcagccatcaacacagaggcaaagccctccaccagcaaaaagactatgactcactgaaggctcagataatcagcattttttagcaataagatttttttttttgacagcctcccatgtagctgggactataggcgcaagctactacacccagctattttttgtaattttagtagaaacagggtttcaccacgttggacaggctggtctcaaactcctgacctcaagtgatccacctgcctccacctcccgatgtgttgggattacaggtgtgagctactgctcccggccacaataagatatttttaaattaaggtatgtatgttattttttctagacaaaatgctattgtatactaaatagactacagtataatgtaaacataatttgcatatgtactttaaacccaaaaacatgtgtgacttgctttattgcaatattcactttattgccgtggtctggagctaaacccacagtatctccgaggtgtgtatgtagtttgttttaaagtaccttttatgacttagttcttcattcaaagaatatttttctctcactggagcactttcatttaaatcatagaaattgctcctctattatttgcaggaatttaagaccaacaagggcacgttatagttgtcaaaatacttaagatttcccaaaacagcctttccgggaaaagaaacataaacatgagcagacataaacgtgcagagcagcacagtaaagttatgttgtttcctatttacaggaacgtatctgttcacagaaaacttgagaagaatcctgtggggcttttaataatacggagtgtgggctgggcgccctggctcatccctgtaatcccaacgctttgggaggccaagacgggtggatcacctgaggtcaggtgtttgagaccagcctgaccaacgtggtgaaacttcatctctactaaaaatacagaaattagctgggtgtggtggcgcaggcctgtagccctagttactaaggaggctgaggtaggagaatcacttgaacctgggaggcggaggttgcagtgagccaagattgcaccactgcactcccacctgggcaacagtgcgagactctgtctcaaaataataataataataataataataataataatagggagtacgtatttaacatttatcttacttcatgtaggtaacaatcccttcaaaggcacatataaaataatttaggctagctaactccatggccaggatcttgaaaaagagaacatgacagcagattccatctctatttaggggtttcttcctttttgtcagattaagcccgagctaataatcataagtaccagcaaatggttccccatttgcctgaaaaagaatagttttgtaagtcattgtcaccttattcatagacactgattccaaatattaaggtgttaatatagagaaaggcagtctctctctctgcacggttcctaatcaaaacatgaatttgcttttcttcattttgcctttatctgtataagcaaatataatttggaaaaatcttttgggttgttttgttttgtactacgttaaacaaaacatggactaaaatatatttcttctcatttaggattttattaaatcagtattttgcaatttatcaccagcatattcaattgctgtacactcttttctagctagcctatttaaggtgacatatatctatctcttttaggaaatatgtgatctctaggtttactgattctttctgattaagtaagcataaagagaatatatttgcacaaaaggccatcatgttccttatgacagtaagatcataaaataaaaacatggaaggattaaatgacctgtctaggatcaactagagaatcaacgatggagtcaatccaatagttgcatttggcttgatgttgttggtttttcagggtcgtctccaacttctaaacaagccattcttatgaactggtgccagctcttactatccctaatgaggctaaagaaatcatcctctttgctccaaaaccacacagactaagctccacaactcaagccacctaccccaacctccaccttaagattcctaatgcagctcttcactcaaacactaagatattgctgactacctggaaagtgaagtgggactactccatatcctgactaaaccctaatgctacatctgggtcattcagaccagtgaaaaataacagaaacagtgaagggaaagagtgagaccttagaacttgaatggttaagggagaaagaatctaggtggtgctcctctcatgaaaattattattattattattattattgtttgagacagagtctcactctgtgccaggtccgacccgcagaccctggctgaatgacagatcaaagaatgcactcagacacaggtatccagtgaaagagcgggctaggggaccgggcagcacacagaccccaggagggtgctgtaaaccgtggccctgctcagctggcgctgtgggcatttattcagcacagatttaatgacaaaggctttgagttaacacacttgtgggtaattaacatggtcgcaccgctcccccgccccacgcagtcctgcgtctggatgattaaaggccaggttctgaggcctaagtaaactaacttatctagattagtttctttacatccccttgttatctaacctaagctcttaagagaattcagctgccttcagccaaattttcttttgaagctttgcaaacccctggccttccaagaaggtttgcatctttctacgatttttcccaccaccctgaccaatctcctacagctcggatgcccaggctggagtgtggtggcgttatctctgctcactgcaacctccgcctcccaggttcaagggactctcctgcctcagcctcctgagtagctgggattacaggcgcgtgccaccatgcccggctaatttctgtatttttagtagagacagggttttaccacgttggccaggctggtcttgaactcctgacctcatgtgatccacctgcctcggcctcccaaagtgctggggtttataggcgtgagccactgcgcccagccatgaaaattatttaattcagaaacataatggtatgatagcatcatcttttcttttaaccaaattattttcatgttaacacctaaccaaggacaagcatttgagggtctaaaaggtagaaaagtaatgcagacaattctgaaaaaggacatatgacttgagaagggaatggaagagggagctgcctctggttgcatggtaatgatggtagcgagtgttattcaggaagtggaaacacaaagagtgacaaaaaaatcaccttcattggcccaacaatctaaaaattaagaattaattacacctctctcttccactattaaggccatcagccacccccatcaccaccgccctggggtgggagggtgacctgaagctgcaccagcactatcagcacaatagagcattcagtcactgatgactttcgacccaagcctgcgtgcacagtctctttgcgagtggctattttggcaacttcattccaagcctaaccaatcaacttctgaataaacaccggcaacaccaattgtctttcaacggatgatggctataggatagggtgtacttatattgagggaagaataagcaaggaacacgaccatttcccagctcctttctgtttgaggggtggagtgttgaggattacggacgtgacatagatttttaaaaggtcagattagtggttctgtgaggatctgtcccatttaagccctacctaacctttaagtaaaacaactttacatactgcgctccctaagaaaaaactttggaaaggcttcttttgaactacattaattacaaaatcaacagctgcccagggtgagacgctgatcattgcaactgttccttctatcccctgaacatacaattgtctaatgtagagacatagacatcaaggtaaagcttttaaaaaatcattattccatgtccctgctccctgatagcacataagcaactacttttatcaatgtggcatagcaactactgattactaatcaaaaagcagtctatgttccttaaacacaggcttcccatggttctccagttcacgcacaataatatttctctacaagttacatatattcttctctgttgacctatggaaaactaatctacaaaataggaatatattaacacagtttcttatgtacatgaatatatatagatatgatacatatgcaacaaaaaacccaagtaaatataactatcatcctcaatttaacagaattgttaaaaacttggaattttctacaatcaagctataacatttattgaccttcctatgggttaaagaaaaagatgcttatttagaggcttaattatagacctacacaaaaataaatacccttataatttatctctcattctagttttcaactttttaatctaagttcataattaccgtttctctaagtgcacaattgttgtaaatatagcctttactctcaacagcttttgccagctaataagagattcagataggattaaagaagattagcaaagagggcaaatgaagggtaaaacaagcgtctgccaaaaactgaagagataaggcttggatgtcttcaacgtggctttctagaacatattatgtcactccgaggctggcttaacgcttctaatacacaacaaaagagtaattaacgttttaaaagtcaccaaactctttaaaaagcaacgcaggaaaaaaagatcccaaactaaccaagtcgaagttttacagaaattaaatgagctattacaatgggaaaacaaagactgtatcttaaaatataaaagcacagttctctgtgctcatattcacaaattatttcaaagcttatacacaaaaaaagtccaccccgacgaagagattaaacgtcctgcccggtgcctgcagtggaagcaggcggtggcgcggttgggggaactttctccctcccggtcaagcctcgggaattgaagggccggggaggcggggcccgatcgaaaagctggaaagtcacttttgttttcaccattatttcacttaatgggttgtgtttctgaataaataaagtcagataactttggcttccctctttgagaattccgttatcattagaacaaatgtctgtttcttttaaacgattatctaaccacatttgcatacagctctttccttgtaggattgagattactaaccactaaaaaccagttttattgctctcgacaccgcactctcgacctgtccctaaattaaaacggattacttgcagaaaagggacagttttcgtcacacactttctgatccgactctgcaaaccagggctcttaaaaggctccagggaccgcgtggtggaaggagggggcgtccccgggcgccgggagtccggcgccgttgggggggacgggggtgtgcggaattccactttcacctgagcgtcctttgggatgcaccagcgagggctggagtcggacctaattcctgtttttctccctccttttagattttgcaacagttctgaactcagttccgctgcctccctgagacccaatcctgcctctctgtcctaaaaacagtttccaccgccagcccaagcagcaggggagcagaggtgggagatcccggaggagagtttaggggcgggggtctcaggctaagggacgcccggccgtcatcctcccacgccaggccggcccccgcggtccaggaggcgggaaagtggtcaagaggtctgggagacaccgaccgccttccctcgggctgaccactcccgcccgctccgcccctccggggaccctcctccctccagtccttcccctaccggcgtcagggaccggtctccgggcggagattggccctggtagcacagggcgccgaggggacatgcccggccagcctcgcaggtcgggctccggctgggtcggacagagggtggtggccctgcagcccgctggggattacctgtccgcgcctgctgcttacctcgttcgctcccttgtgaagctccggcgtcttgtgtgtttcatctcctaggaaacggcgggggcagcaggcgggcctacggccggcccagagagggcgtggcctcgcgggaaatccccgccaattcccgcaggccccgccttccccggggcggggcttcatggagccgggggactgtcggctgagctgcagcaagtgtgccatttagacttggggtttaggggagttgattaccttttcagtcaggtctttgtcagaagttggtttgtttgccctttattttgttttggttttgttccgattcattctacaaagtcttgattaattaaaatatggttcccagaccgggcagagcaagagaaggaagtctgtttgcctcatacttgcacttgtttacttgtgcctggggaaaaactgttcttgtatgcagttccttaaattggtcaattccttgggtatgtattacctcttgagctgcccttctaagtttgtttccatttattcattcagagaacctgcctagtatcagccacagagttagatagtggtaattccaagaaaaatgactgaatgtgtgaataaatgggtaaattgtaactagtctagaatttagagaggaaggcacacttgtgttactgcaaatagttcagattggctggcaaaaagggtctacgaaacagaaacataagtgatgaagcagtggtgcggcaagttagtaattattaggtgtcaggatgtgggcttgggaccaagaatagcgccaaggtagacacgacagacatgcctgtggccctcacagcttaaagtgaagtaggctttcacgcgtatgtttatggcagcacaattcacaattgcaaagatgtggaaccaatctaagtgcccattgactaatgagtggataaagaaaatgtggtatatatacaccataggctgctactcagtcacaaaaaaagaatgaaataatgtcttttgcaacaacttggaagagtgggaggtccttattctacgcaaagtaatacaggcgtggaaaaccaaaaactgtatgttctcacttataagcaaaagccaagctatgagtatgcaaaggcatacacagtgaaataatggactttggagactcagaaaggggaggatgggagagagcctagggataaaaaaaactatgcactaggtaccatatacactactcagatgatgggtgcactaaaatctcagaattcaccactatataattcatctatgtaacaaaaaaccacttgtaccccaagagctattgaaataaacatttaaaaacagacggggctcagtggctcatgcctgtaatcccagcactttgggaggcccaggtgagtggctcacctgaggtcaggagttcaagaccagcctggccaacatggtgaaaccccatctctactaaaaatacaaaaaatatctgggtgtggtggcacatgcctgtaatcccagctactcgggaggctgaggcaggagaatcacttgaacccaggaggcagaggttgcagtgagcggagaacgtgccactgcactccagcctgggtgactgagcaagactctgtctcaaaataataataataataaatggccaggcgcggtggctcatgcctgtaatcccagcactttgggaggccgaggtgggcggatcacctgaggtcgggagtttgagaccagtctgaccaacctggagaaaccccatctctactaaaatgctaaaactacaaaaaattagccaggcgtggtggcgcatgcctgtaatcccagctacttgggaggctgaggtaggagaatagcttgaacccaggaggcggaggttgcagtgagctgagatcacaccattgcactccagcctgggcagcaaaagcaaaactccgtctcaataataataataataaataaaagattcattgctctccaataaataagtgaagtaggcaggcaaagtaaaaagcataagttagataggtcatagcagctttatatacccagttatgaagcctaagctttaacatgtgtcaatgaggaagaccagtgaagaatctcccacagaagagtgacatgttcacatttgcatttcagaaagatcccaagaggagcagtgggtagggtggatttgagctgcaagtctggaggcaagagaaagattgggagtctttctcccaactgactgggaagaaatgataaggatccaactctagcagtgatgatggaaataggacagagaaagacagaattcaagggatgtttaggagttaaaatcggcaggaccatcaggcttagatgactggtggatagtggtatccatgaccaagttggaaaataatagaggaggagctgatttagggatggaggatgtgagagataacaagcccagttttgaaatttttgaattgagaaaaatccttatgcagattacaagaagggagtttgtaatatagatttgcaacttagggttcttttagagctagaaatacagatatgttgggatactgtggatgaaatcatggatatagatgaaataaacagtaagaagaaagaagggatgggattctggaaaactccatcctctaaagagtggagaaagaaagagtaggggtgaggaagagacagactgaaaaaagaaaagtcagggaagtagtaggagatccctcagaaaaatgatatttcagaatgaggaaaggtaggtttcccaaaagaaagagaaagagaaaggaaggaaggaaagagagagaaaacaaaaagaggacaaacagcatttattccttctgaagaactcttctgttttaaaacaagtagagcatgcacaaaacatattttttgtcacgtttcacaatagaagaataaaaattctccaagcactcctaaccccttctaaaaagtacctaatatctgagcagagcagtgaacgtacctgaaaggcaaaggtggcccaaaggcaaatcccatttcagcatttcaaccagctgacgaagccttggacccgtggcaatagggctgagctggaccagggactagaaaatcaaccaggggagcttagaaggggtcaaagtggtcccaggtcaggagcatcatctggatcccaaaggaaacaaacacaatcatctctgaagaaggcatcctcaacttaggcctctaggtttttcaaaaaatatgagctcatgaccacagaggaatgaacaccgtcaaatgagaatctagaaaaagcaacaattattcagactttccaggatttctgaaattggaaaaatcagcttgaatacaaaatagctatgtatgaaatatatacagaaatagaagaaggaatagcaaaaatgaacagaaatcaatcaggaatattagaaaaagaattaaataaactgttagaaagaaacgtaactattgaaactttaaaaatgagttacatgttatattagaacaaaagaaagaattagggaattggcacaaaatctgcagaaagtacctagaatatagcatataaaagataagaagatgagaaatactaatgagaaattaagagatacgatggataaaataaagtctaacatgggtctaaataaattctaagaagtagatttgttgttgataatgcattgctacagtagttcttttttttgtttgagatggggtttcactctgtcgcccaggctggagtgcagtggtgtgatctcggctctctgcaacctccacctcccgagttcaagcaattctcctgcctcagcctcccgagtagctgggactacaggcacacaccaccgtgcccatctaatttttgtatttttagtagagatggggtttcaccatattggtcaggttgatcttgaactcctgacctcagctgatccacccacctcggcctcccaaagtgctgggattacaggcatgagccaccatgcctggccagctgcagttctagtaaaatttatctatatggtagaatcaagcaaatattgatactgttgaaaatcagagttcttatttgggagaagagagataaagatgtagaatggagaaagaagaggaagaatctgtggtgtcagttttgacttggaggtagcaagattaacacatgacttactaaaaagtgcttcctagctctgttcactgaaaggatctagaaacaatgacactacagtaacagtgaacagattaacacccaagtcccggttttgtaatactattatttacttaaaggaaacagaactccttggagaagtggctgattccatgactggggcaaggaaagtccaaggtagtcttaaaatgtatcatgcacacccagcaaaggttaaagatcctatttcaccaagccactgagcactacaaggactttataattctttaattcagattacccattcaatttatgtgctaatgtcatctaatattttagtttatatttataaccctatagattggtctgttattttacattcagagtatttgtacattgatacatgtgatgatgtctttgctcatcttatctttctgtacctcagaccttcctcctgggattaccttccttcatcctaaagtatagcctttagaagttcctttacagtaggtctgttcgtggtaaaatgttgcacttgctttttgtttttgttttaatttattttttttgacggggtcttgctgtgtcacccaggctggagtgcaatggtacgatctcgggtcactgcaagctcggtctcctgggttcacgccattctcctgcctcagcctcccgagtagctgggactacaggtgcccgccaccacgcccagctaaatttttgtatttttagtagagacggggtttcactttgttagccaggatggtctcgatctcctgacctcatgatccacccacctcagcctcccaaagtgctgggattacagacatgagccactgtgcccggctttgtttttatttttaaaaaatctctatttgtccttgctcttgcaacatggttttcttaggtacaattctagtagtttgagagttattacttctcagtaccatgaggggaaattttcgtttgaacagaaatgttcatttcatcttccagcatccatttttacttttgagaagtctgctgtggtttaattgccactcctttgtaggtcatctctcttttctctctggtacttttaagtttgctttgttctggcactctacagttttactactttgtgtctagatgtgaatatcttcttacttgccctgcttggtattatctgtgcttcttagatctgtggatttatgtctttaactagttgtagaaaatagccatgattttgcaaaaatagtctctcctttattctttctgctgcttagaatttatttagacctatgttaggctttctcattttatcctaaattcaagatttcttttcaatttaatttgtccttagattatatgccactgagggtgtactgtcagaatattgttttcaggccgggtgtggtggctcatgactgtaatcccagcactttgggaggctgagatgggtggatcacctgaaatcaggagtttgagaccagcctggccaacatggtgaaatcctgtctctactacaaataaaaaaattagctgggcatggtggtgggtgcctgtaatcccagctacttgagaggctgaagcaggagaatctcttgaagctgggaggcagagattgcagtgagccgagatcgtaccattgtactccagcttaggggacaagagcaaaactccatctctgggggaaaaaaaaaaaaagaaaaatattgttttctaacactacttcaaattttgcacttggaaaaatacaaactatttgacaaatgacataatgagtaaccatatgaaaaaaattaaaatttgacctttttttcttcctaagtttaaagatgtatctactagctcaatttgaaataatctgaacatgaaaaagaataatgatggtaataaactatactacatttaaatttttaaatttttttttcaaaaaaataaaaaatagaaaaaaataaaatataaaaaagtaaaaaaacaaaaaattattttttaaaattgataagtaaaaattgtatatatttgtgttataccatataatattttgatacatgtatacattgtgtaatgcttaatcaagttatttaacataagcattacctcacatacttaccacttttgtgtatgtgctgagaacacaaaatctactgtttcagtacttttcaggtgtacggtatagcgttatcaattatagtcaccatgatgaacaataaatctcttcaatttattctcctatctaactgaaattttgtatcctttgaccaacatctcccaagtcatcgcaccccccagcctctggtaaccaccattttactatctatttctatgagtttaactttttcacactccacatataaatgagataatgtggtgattgtcttttttttttttttttttttgagatggagcctcactttgttgctcaggctggagtgcaatggtgcaatcttggctcactgcaaactccaactccacctcccaggttcaagtgattctcaaacctcagcattctgagtagctgggattacaggtgctcatcaccacaccctgatgatttttgtatttttagtagagacggggtttcaccatattggctaggttggtcttgaactcctgacctcaagtgatccgcctccctgggcctctcaaagtgctggaattacaggtctgagccactgcgcctggcctgatatttgtctttctatatctggtttattatcacttaacataatgccctccaggttcatccatgttgcaaatgacaagatatacataatacataacggaagactattcagccttaaatgataccacattgaacaaaaaattgtagcactcaacatatagctcgattcttcacttccttttagtctttattcaaaacatcactttctcagtgaagccttctctagacaccctctactactccactgctgacacttcatgcataccccttggcttaattttcttcttaatatatactatattttaccactttctgtttattttctgcttcccccactggaatgtaagctccctgaaggcagagatttatgtctgtcttggttgctcatatatctatccctgaaacagtgcccggcatataccaggtgcacaataaatatttattgaatgaataaatgactgtttcttccacctgctctctggagaatgaattgtagagaggcaagtgggaggcaggcagtgagacaagttagggggcatattcagtttgcacagttaagctgtgatggtgtattggagaagtggacagcagtggagacagagggaagcaatgtggcatccagccacaaatcaatccttagatagagtccatcggcagtttgaattcttagaaactttagaagtgcaagtgtttgcttggaacctcctgtgacagaactcactacctcctccaatcccagcttgagatgggtctgattgctgaaactgccctccttctattgaatggtaatatgtcactttgcagttcccgagttttacccattgtgatctgtagtggacctcttatttttgcccgtccagcatctacctgccctgtcaggtattcccccagttttttgtttgtttgtttttgagatggagtctcactctgtcactcaggctggagtgcagtggcacgatatcggcccactgcagccaccgtctccctggttcaaacgattcttctgcctcagcctcccaagcagctgggatcacaggcacgcaccactacgcccggctaatttttgtgtttttagtagagatggggtctcaccatattggccagactggtctcaaactcctgatctcaaatgatctgcccgcctctcggcctcccatagtactgggattagaagcatgagccaccgtgcctggcccttcccccagttttctttgggcagacacccctgacccacttggctatgtggctcagtttcagagatgggcatgtgagccactcagagtctcagcgtggcttacacagatggcaacatgattccaagctactgggaaagacaaactccccttctgctagggacacttagcagtaccatgaaggcccagagtggctgggggccagctttgctgcacagggacagccttcctgaaaaggaacaaggaagaacacagagctgggagggactgacatagtttccagatgtcagcactggagcatctggacagagccacgcaggtatctattcccagtctcttcaatgacaagggtcagaaaattcctttttttgcttagtcctttgattttcatttccacttgcaattgaaagtgattctggcctggcgcagtggctcacgcctgtaatcccagcactttgggaggctgaggcgggcagatcacctgaggtcaggagttcgagaccagcctggccaacatggtgaaaccccgtctctactaaaaatacaataattagccaggtgtggtggcacacgcctataatcccagctactcaggaggctgaggcaggagaattgcttgagcctgggagatagaggttgcagtgagctgagatcgtgccactatactccagcctggctgacagagcaagactctgtctcaaaaaaaaaaaaaaaaaaaagtgtttctaatcgtatagggccatagagaagatttacttttccctcctacatgttaacccttccagtatttgaagttagctgtcccatctctccacttaaggactgatttgtgattggacaccatcccagaattgtagggtaaagggtctttccttagcaagtccagacttccatctcatgcttgaattccctaccaagcctcaatgccaagtgtgtggacctgacactcagtcagtgactgaaggaccagaacattcacggttcaattcattttttagtatgctgtactctctagcttttccctcagctcccaactctgatccaactaccatcaaatgacgtgtttgtgggttaaattattttctaaagaaacgtatcaactattatataatctcatgttcaaattttactcctaaattcaaaatacgtttcatatggttataattctaagaataaacctccacatactcatataagagtttacctgggtgagaattctcatctcctttgcagtcagttctgtagagtagccagttactggtgttttttgttttttttaattgatgttggttcaggctaaatacatttgtcacaattattacttagaagataccagtataagaaaaatcttttagaaaaagtaaaaaaaaaaaaaagaatctgagcatgatttatctgctataccatgaatcatcacaaggtagcagtgttctatgatactgcaattctgaaaacaatttacaatagcctgtcttattaagaaaatcagtgttttgacaatttatggtttccttgattaggaaactaggaatttgaattccacttgaccgtttttttttgttgtttttttggtttttttttttgagccggagtctcacttttttgcccaagctggagtgcagtggcacgatctcagctcactgcaacctccacctcctaggttcaagcaattctcctgcctcagcctcctgagtagctgggatcacaggaacccagcaccacgccggactaatttttgtatttttagtagagacgaagtttcaccacgttagccaggctggtcttgaactcctgacctcaggtgatcagcctgtcttggccttccaaagtgctgggattacaggcgtgagccaccgcgtctggccttttttttttttttttttccttgaggcagagtctcgctctgtcgcccaggctggagtgcagtggcaccatctcggctcattgcaacttccacctcccgggttcaagcaattctcctgcctcagcctcctgagtagctgggattacaggcaactgccaccacgcctggctaatttttagttgtaattttagttgtgacgaggtttcaccatgttggccaggctggtctcgaactgacctcaagtgatccacccacctagattacaggcgtcagtgatcacacccagccattgagctcttattaatacctaatgacttgtgagcaattttaacaatgaacagctaagtaaatactaaagaaaatattaaagcatatcaggtaattttttctttactgatccactttattatttcactttataagtaatacataacaacataatattagaagacataataaaaatcacatatctcaccactgctaacattttggtgtatgccatttaaaagtttgaaataaacttgttaattttagaatagttttagatttacagaaaaattccaaagatagtacagagaattgccctatatcctgcagccagtttccccattgtcaagcatcttacattcctatgctacatttgtcacaacaaatgaagcaatatcaatacattatcattaactaaagtccatactttattcagatttccttagtatctgaataaattgccttatgtccaatttctgttccagtagctcacctagaatattacattatgtttacttgtctttatggaggtttctcaaaaaaaaattacactgggcacggtggctcacacctgtaatcccagcactttgggaagccgaggtgggtggatcacctgaggtcaggagttcgagaccagcctggccaacgtggtgaaacctcgtcacaactaaaaatacaactaaaaattagccaggcatggtggcaggtgcctgtaatcccagctactcaggaggctgaagcaggagaattgcttgaacccaggaggcggaggttgcagtgagccgagatcgtgccattgcactccagcctgggccacagagtgagactccatctcaaagaaaaaaaaaaattaaaaacagaaatactatatgatccagcaatcccacttctgagcacgtatccaaaataattgaaatcaggatgttgaagcgatacctgcattcccatactcactgcatccttattcacaatagccaagatacagaaacaatgtaaatgtccatcaacggatacatggataaagaaaatgtggtatatatgtaaattgaatcagccataaaaaaaaggaaatcctgccatgtgccacatagggatgaacctggagaacattacgctaactgaaataagccagtcacagaaggacaaatactgcatgattccatttagatgaggtaactacaatacgggctggctgagggtggctcacatctgttatcccagcactttgagaggccaatgggggaggatcacttgagcccaggagttcaagaccagcctaggcaacatagtgagatccccatctttacaaaaaataaaaaaattagcctggtgtggtcgttcatgcctacagtcccagccactcgggaggctgaggctggaggctcacttgagcccaggaggttgaggctgcagtgaacctcgattgtgccactgcactccagcctaggtgacagagtgagaccttttctctaaaaagaaaaaaatagtcgaactcatcgaagcagagagtagaatggtggttgtcagggattttgggggaggataagtggggagttgttattcagtggatataaagtttcaaaaacaatatgcagagcttttccaaacaacccactctaaacaaaagaaactgcttcctatcaccctgccaacagcttttcaactaaagcaagaatatgtgtggatatgttggttttcacctgtgtttacagtttgttgctttttttttttttttttttttgagacagaatttggctcttgttgcccaggctggagtgcaatggcgtaatctcagctcaccgcaacctccagctcccgggttcaagtgattctcctgtctcagcctcccaagtagctaggattacaggcatgtgcctccacgcccagataattttctatttttagtagagaaggggtttatccatgttggtcaggctagtcttgaactcctgatctcaggtgatctgcccgcctcggcctcccaaagtgctgggattataggcgtgagccaccactccagaccagtttgttgctttttacaagaatgagaatgttgatgccattcaatgatacaacagcatcttggctaagtggcatcgcggtactgggactctctgcctctaacccatggaggtcccagaggtgtaggcagaagttagggagggcccatatgtaggggagcaaaagacagtgaacccaaaacactgcattggaacttcaagcacaaacatccttatggatgaccgtaacagtctgggagggccacggggcagggctgggaacctgagacccgggttgtctgtcagtaagcagtttcttcaccatgtcatgcttaaacaggctgcgtagctcatttcgttcctttcaccaatatgtcgtgaagttgtcctgcttaggaggaagtaataaattatatcacctcaggtatgtttgcttctgtcaaaatgactttgtggaactgatctttatcaatatgtttctactagctccagcaactttgtttatgtgttttattcactgacttagaagattttacggtaatgtgatatattatcaagttcctgcccaaagtaaagtacaagaactctgaaacaaaattttaaaaatattagagggccaaaataaagacaatgaaattccgatttttattccaatttttaaaaatacattacaatgcataatttttcattttggtcacagtgggacatctgggggaagttgtgttaaaaaaaactcaggaaatccatgcatttattttcagcacagaaagtaaatataagcttcacatttttaaaatgctacacaagcctttggtaagtgtagattttaaagtttcatactgagatttggaggtatttattattatatcaatttttatttaaatgtcaagatttataatttttctaatagaggaaaatttgctctgttaagattaccagttatacatattaaaaattagactcagttcaatccactacgtttttttgttttgttttttttagacagagtctcactctgtcgccaggctggacaggctggagtgcagttgtgcgatctcggctcactacaacctctgcttcccgggttcaagtgattctcctgcctcagcctcccgagtagctgggattacaggtgcgcgtcaccacgcccagctaatttttgtattcttagtagagacggggtttcaccatgtcggcgaggatggtcttgatctcttgacctcatgatctgcccgcctcggccttccagagtgctgggattacaggcgtgaggcactgcgcccagcccagattggataatttctgaaaaattgtttgcaagtgcatggacactttcttctatcatctccaatctgctggtaagcctatcccatggtgttttattttattttaaagccttcgattttcagttctagacttttaaacttggatcatttaaatagtttccatattctgttgaaattctctatatctttttatttatgatgacaatattttccttaggtctttgaatatttataatagctgttttaaagttcttgtcagctatttccaacatctgagccatctcacatctttttctatagactgcttctcctcttaacctcatggtactagtcttatttacttaaatagctactattttgtttgtatattgtacatgatgaataatatgttgaagagttttggattttacctttcttaactgagtgttgctttctgttttaagtaatcaattgctttttcgacaaatcaccttaaatttgtggatgcttagtattaccctttctaaagatgcattcattttagctttggcactagttttagggtgaattccttagatgtagaacatacagtttactcttagggcatggccttagtgctatgcaaactccaaattccatctcccttgcagtgcgcagccgacgagatggttgctttgttttgacgctttccagctgttgctttacgttgacatctttagagtctcatctcgttaagccctgttcaggtgtcagccaagaattcaaagtgagtttaaacacaaattttagggtttcctctttgtggctccctcttttccaaggtccgtcccctcaatttccaggtcctttggcagccccagactccatcctctgacaagtcaaaagcatcgcaatttctgctcagtcctagccattccacgccttgtgcactggggagtgccctcagggagcagctgtataaacatgaatctcattcagtgtgggtggttttcttatttcaagtgtcaaatgccctccactttcttttttttttttgaaacaaagtcttgctctgttgcctaggctggagtgcagtggcctctgggttcatgcagttctccttcctcagcttcccgagtagctgggattataggcatgtgccagtacacccagctaattttttgtatttttagtagagacagggtttccccatgttggccaggctggtctcgaactcctgacctcaggtgatctgcctgcctcagcctcccaaagtgttgggattacaggtgtgagccactgtgcccagccttccctccactttctacctaactttggtgatttttttccagggtcttcaaataattaaattttatatttgtctagagttttataataattacctgaagaagagttagtccaatacaagccactccaccatttccagaaccagaaattcaagaagttatttttgagtactgataccccaatatttccaaagattgcgttttatgaccccaaatatttctatttgtgtgtttatgacttgacatgtagatatgtaatagcaaaacagatattatgatctttgccataacttcaagattttcagtagcttcatattaattgttgtgggaagtcagggaacccaaacggagggaccagctggagccacggcagaggaacattaattgtgaagatttcatggacatttcccaaataacacatttttaatttcttatgcctgtctttaatctcttaatcctgttatcttcataagctgaggatgtacgtcacctcagaaccactgtgataattgtgttaactgtacaaattgattgtaaaacgtgtgtttgaacagtatgaaatcagtgcaccttgaaaaagaacagaataacagcgatttttagggaacaagggaagacaaccataaggtctgactgcctgcggggtcgggcaaaaacagccatatttttctttttgcagagagcctataaacggacgtgcaagtagggaagatatcactaaattcttttcctagcaaggaatattaatattaataccctggggaaggaatgtattcctggggggaggtctgtaaacggccactctgggagtgtctgtcttatgcagttgagataaagactgagatacgccctggtctcctgcagtaccctcaggcttactagggtggggaaaaaacgccctggtaaatttgtggtcagaccagttctctgctcttgaaccctgttttctgttgtttaagatgtttagcgagacaatatgtgcacggctgaacatagacccttatcagtagttctgcttttgccctttgtctggtgatctttgttggactcttatcagtagttctgcttttgccttttgtcctgttccctcagaagcatgtgatctttgttctgctttttgtcctttgaagcatgtgatctttgtacctactctctgttcttacacccctcgccttttgaaacccttaataaaaaacttgctggtttgaggctcaggtgggcatcatggtcctaccgatatgtgatgtcacccctggtggcccagctgtaaaattcctctctttgtactctttctctttatttctcagccagccgacacttatggaaaatagaaagaacctatgttgatatattgggggtgggttccctcaataattaatcttgatattttcccccgtgccttcatcttttgtttttcattaattgtttcatcctcagataatcaatttttcagtagttcagtcttactggtgatttcttccaattctccttccaaggtggagtgtttgtgtgtatattttaagactaccagcatgtttcttgtcaaagattggcagaatatcctttggtaaacgattattatcaggacagggctgacctagcagctgcatgcttctttaagactgtgcatttcacatttgagcttttcaatttctgggaagataagcattctcaaagaagatataattacatggccttcttagaatttccgattgatagtatttcataagcctataataaattaagaatttcagaactttgttatatttaaaatcagcaataaaatagttaagatgtacaacaggaaaaatgtaaaagacttgcatatgccatgcttttctgaaaaacaaaaaaagtgttctgctaaaagtatctttcaaaaaggatctttagtgttctaatcagagaatctaagtgggccaatgtttgctgttgtgttatattcatgagcaattgctaggtgatgaagctttgtatttgaatagcatttgacaatctacaaatgccaagtattattatgtgttaatgagtctcgactttgcatttccaagtctgcgcctctgtcctgaactctaaacttacatatccaactgcctactcaacacttcacgtagaaatcttatggtttgaacttatcctgttcaaaactgagctctcaatattttttcttcttccttcatttccccaagctgctccttccacagccttccccatctcagtttatggcaacttctgagttgcggtaagagctgccaggtgctgcagctgcccaaaccacagctgcagacccaggcctcctgctctaaggagcaggaaggagccccaccctcctgggcggggctacagcctcccaaactgcagctgtggatcagagtcaccctatgctcttgggggagggcgggaagcaggcagtatctgccttcccagtgcagctaaagctgccctcctaggcgcaggacccaggagtatctgcagcctgcaccctcaggggccccaggaaagattttcccctccccccagccctaccctcaacctccctcccactccgcacccccactctcaacctccctcccacccccatccccaccctcaacctccctcccattccctcacacttaacctccctcccacacccccaccctcaatctccctcccacacgcccacccctgctacccaggaaagactcccccacccattcccccaccccactgtagagcagtgggacaccatggaagtatctccaaatccggaatcataagtcttgcacttgattattgtctttgaaattgacaatgtgtggccgggtgtggtggctcacacctgtactcccagcactgtgagaggctgaggtgagcagatcacatgaggtcaggagttcaagaccagcctggccaacatggcgaaaccctgtctctactaaaaatacaaaaattggcccagcacagtggctcacgcctgtaatctcagcactttgggaggctgaggcgggtggatcacgaggtcaggagttcaagaccaatctggccaagatggtgaaaccccgtctctactaaaaatacaaaagttagccaggcgcctgtaatcctagctactagggaggctgaggcagagaattgcttgaacccgggaggtggaggttgcagtgagctgagattgcattacagcactccagcctgggcgacagagcgagactcagtctcaaaaaaaaaaaaaaaaaattagctgggcatggtggtgggcgcctgtaatcccagctacttgggaggctgaggcaggaggatttcttgaacctgggaggcagaggttgccgtgagccgagatcatgccactgcactccagcctgattagtgagaccttgtctcaacaaacaaacaaaaataaaaaactaatacaattttattgttcaggccttggaagtggtaggctggcttcttgcattggtgacaacacaccccaaattttgtgtttccctctggcaggctcactttgagagagagatttttcaactggctgcaaacaagatagggtagatcttggaaaccataatatagaggaattgaaggcacttggccatgagaagaaagaagtcattgcaggcaagagcactgtgttccaatgcttagggatacagaatgaagaacagaattattttgtgtggtccagaagacaaatctaggacaaatagttggcttttcatatagggatggtttcatcttagcataaagaaaaacactgtcttcaatttctcatcatttgagctagttagcaatagaatgaggcacctgcatcattgggcttatgaattaattctgcaaatatgtattgaatgcctactatatgccaagccctgttctggacatgagcaggtgatcaatgagatagtcatggatttgccgtaatagaatttacattctagtggggcagataaccaacaagcaaaaaaaaattaatttccatgaagaaaatgaaattgtcatgaagaaaacaaagcagggcacatgatagagagaacggggtgggaagggagctgagcaagagatggcgcagtcagggaaagctctgtgaagacagcatttgagcccagacataagtatttaaccaaaagaatcagctctgcaaatatctcagggaaaggcaatccaggcaggaggtacatgagtagggggctctcagccgatgaccctgtgatggctaaaattatatgtccacttggctaggctatggcacccacttgtttggtcaaacactaatctatatgctgctgtgatggggttttatagatatgattaacatttacaatcagctgacttaagtatgttaccctccataatgcaggtgggccacatccaatcagtggaaggtcttaagagcaaaaactgaggttcctcagagaagaaggaaatgttttaagacttcagcatcaattcctgcctgagtttctagcctgctggcctgctctacaaatttcaagcttgctagccctcacaatcacatgaataaattccttaaaataaatctcatatgtgtgtatgtatgtgtatgtacgtatgtgtatattgctaactagctcaaatgatgagaaattgaagacaatgtttttccttatgctaagctgaaatcatccctatatgcaaagccaactatttgtacacacacacacacacacacacacacacacacacacacatacacacacacatatatatcctattggttctatttctctgaagaatcctgactattttggacccctccctgaggggctttcacactccctggcatgtaatgtctatgattccacagctaattaagtgggtgtggagaatagattttaacgggttaggatgctggaattatttagataaaaatgctgagaatgaggtattcagaaggcatttctacttcacaaatatttctgctgattactgattcctagagtgtagtggggtttactaccaccgtgaatgtccaatccaaaatggaaaattcagcggggcgccatggctcacacctgtaatcccagcactttgggaggccaagatgggcagatcatgaggtcaggagatcaagaccattctggccaacatggtgaaaccccatctccactaaaaatacaaaaattagctgggcttggcggcacgtgcctgtaatcccagctactcaggaggctgaggcaggagaatcacttgaacctgggaggcggaggttgcagtgagccaagatcgtgccactgcactccagcctggtgaaagagctagactccatgtcaaaaaaaaaaaaaaagaaaaaagaaaaagaaaaatggaaaattcggcggggcctggtggctcacgcctgtaatcccagcactttgggcagctgaggcaggcagatcacctgaggtcgggagttccggaccagcctgaccaacacggagaaaccccacctctactaaaaatacaaaattagctgggcgtggtggcgcatgcctgtaatccctactcaggaggctgagccaggagaattgcttgaacctgggaggtggaggttgtggtgagccgagatcgtgccattgcactctagcctagcctggacgacaataacgaaactccttctcaaaaaaaataaaaaataaaaaaaaggggaaaattcatccttgactccatttctacattttagaatgggtttcttactaagtttagaatttctcttggataacatttaaaaagtaagaaggaactgtgggaattcaaaattttttttgtccagtctttgctggattatttaaaatagacatatttatatttttgagaaaaacttttaacttatatttataatccaaggaatattctagttactcaagttggagtgaaaggtgttatcagtgagcaaccatttttgatttatgatctattacaaatacctgagaaatcaccttgaaatgattttcctggcatttgcacaactgatacaggtcagtgataatattcattattctgtcactgcttactgctcccttcaagttcagcaaatgcctggtataacatttcacagactcagggcaagttgacctcatcagagaattgaatctccagggtcttatggccacagctgacaatcatgggtattttccatcagtggtacagagtgtagaaaaatgttgtcagccactgaataactggtgatagaataagagttaacagattactctctctggtcaacttatcctattgaggagtagatataaagtcttacatatattggccttgggtactattagtcttctttcttctccatatagaatgtgtttagctttttatatatgtaaacttgtctaatcttaaattatgctatttaagttgtgttgattctcagtaaagcaaattattctccataacttggatggggcttgtcccacccactcagttgaagactttaagtatcaagactgaggtttcccagagaaggaggaattctcagtcagcaacatagataccttgcccatgtttccatcctactgccctccaaaatttggacccaagactgaaactatgactggctggaatttccagcttgctgggctgccctgcatatttctgacttgccagttccaacaactgtgtaagccaattccttaaactaaatatctctctagatctacatctacgtagctatcaaatactagatctattcattctatataactatatttttatacccattatccatccccacttcacccctgcctatttgctttgatttccaacctctggtaaccatcattctatcctctatctccatgagtccgattgttttaatttttagctcccacacataagtgagagcacaagaaatgtgtctttctgtgtctggcttatttcgcttcatataatgtcctcctcttctacctatgttgtcacaaatgacaggatttccttctttttttttttatcactaaatagtattatttaaatgttttgttcatttatttgtttatgagccgcagtttcgctcttgttgcccaggctggagttcagtggcacggtctcggctcactgcaacctccaccttccaggttcaagcaattctgctgtctcagcctcccaagtagctgggattacaggtgcccaccaccacgcccagctaattttttgtatttttagtagagagggggtttcaccatgtcggccaagctggtcgcaaactcctgacctcaggagatccacccacctcagcctcccaaagtgctgggattataagcgtgagccactgtgcccgacctaaatgttattttttagaacagttttagatttacaaaaaattaggatgacaatacagagttcacaaaagcctagcaccccgtttcctttgttattaactgtattaggccattcttgcattgttatttacacctgaggctgggtaatttataaagaaaacaggtttaattggctcacagttctgcaggccctacaaagaagcttggtaatggcatctgctcagcttctggggaggcctcaggaaggttacagtcatggtggaaggtgaagtggaagcaggagtctcacatggccagagcaggagcaagagagggagttgggggaaggtgctacacacttttaaacaaccagatctcatgagaattcactatcaagaggacagcaccaaggcatgagggatctgtccccatgacctaatcacctctcagcaggccccatctccaacactggggattacatttcaccatgagatgtggtgggcacacagatgcgaaccatatcattaacatattaccttagcatggtacatttgttacagctaatacaccaatattgatgcctcgttattaaccaaagtccctactttattcagatgtccttagtttttacctaatttccttttcttctccagaatcccatccaggatatataacatttaatcctcatgtctctttagattcccctagactgtgagtttcttagactttccttgttttgacaactctgacaattttgaggtgtactgctcaggcattttgtacaatacccctcaattatgattcgtctgatgtttttctcatgattagactgggattctgtgttttttgggaggaagatcacagaggtgaagtgccattttcatcacatcatatcacgggcacatgctagcagcatgacatcactgttgctgttgaccttggtcacctggtcatctggtagtgtttatctagtttccccactgggaagttcctccctccactccccactttccacactgtgctctttagaaggaagtcaccatatataggccatacctaagaagtgaggagttatgcttcttgagggtaagggtggcaacatagattagttaaaattattttgcacaggagatttttctgtactcccccatgattgatatttattcaattaggtactcatatcggggcggactcctgcgttttttaaatactttgggttgtaatcgaatactgggttattattttttaaaatagttccaactttggccataggagctctttccattggattgcatgtccttttgccatgactctgaggtaggagactggactcagttccagaggcagggcttggacactgaaccaaattgaggactagctaaaacagagatggggcagaagcacctttctataagacacacccaccagtgtgccatggcaacatatggaagttaccacgcctttctatgacaacaacttgacaacctggaagttaccacactttttaaataattgtctgcataatctgccccttaatttgcatataattaaaatgaggcataaatgtgactgctgaactgcctctgagctgctactctgggcacatttgctgtggggtagccctgctccacaaagagcagtacctctgctgctgcttatacagtgctgcttcaataaaagtagctgtctaggccaggcgcggtggctcacacctgtaatcccaacacattgggaggccaaggcgggcagatcatttgaggtcaggagtttgagaccagcttggccagctagtgaaaccccgtctctgctaaatacaaaaattagccgtgcatggtggtgggcacctataatcccagctactcgggaggctgaggcaggagaatcacttgaacccaggaggtggaggtcgcagcgagccaagatcgcaccattgcactccagcctgggcggcagagcaacacaccctctcaaaaaaaaaagttgctgtctaacaccactggtttccccttgaattctttcctcagcagagccaagaactctcccaggctaagcctcaattttgaggctcatctgccctgcatcagctccagtttttgttgttgttgcttgaagcccttactttcttgcattacaaggtgctccagtctctccttgttcacctggaagtggtaatagaggagagccacttactaaaactgtataagacgttggcgcacaagcggccctgctgagatccctcccaggcaagtgtaacacgagctggtagagggccctcctctacttccacatttggccctggcaggctttaatattctctcactctttactccccttctctttttttgcaccataaagtctcaggtatctcagctgacatgtggtgcccactggatgtcagtgcctgagagcagaatggtggagaacacattttttacgaaggatatttattggaagccatttcccaagccaggtctccaaatatttttataaaaacaatttataaagtttacagcaattgctattatctgggatgggatgatgggtatgggttttttctttctttttttaagttttgaggatttctgcaaaactttgataggccaattttcattttatattcatagtagcatctcaaggaatacttgattatcctccgccttgaatttctgctactgtgatacagtcagttgggcagaaagaagactttttgctgggggaaagatggggaacattgagtggcagagaaagagggcacatgagtacattcttcactaatactcttagttataggaatgtacacaacacttttgcctttattgaaaacatattcggccaggcacagtggctcacacctgtaatcccaacactgggaggccgatgtgggcggatcatgaggtcaggagatcgatatcatcctaacatggtgaaaccccatctctattaaaatacaaaaaattagccaggtgtggtggcaggcgcctgcagtcccagttacgtgggaggctgaggcaggagaatggcatgaacctgggaggcagagcttgcagtgagctgagatcatgccactgcacttcagcctgggcgacagagcgagactctgtctcaaaaaaaaaaaaaaaatgtattattggccaggcgccatggctcacatctgtaatcccagtactttgggaggccaaggcaggcggatcacctgaggtcaggagttcgagaccagcctggccaacttggtgaaaccctgtctctactaaaaatacaaaaattagccgagtgtggtggcaggtgcctgtaatcccagctactcaggaggctgaggcatgagaggaatctcttgaacctgggaggcggaagttgcagtgagctgagatcatgccactgcactccagcctgggggacagagcgaaactctgtctcaaaaacaaaaaacaaaacaaaaaaacatattcctcacaaagaatgtaagccccatgagggcaagaaccatgtctacgttgtccatccctttactgtcaggttttagaacattgtaggtgttcagaaactttgtttgaatgtgggatcattgatatgtttattatgtgcatgaacatattcaacatctattgcttcaaaaacagattctttacaaatagaaacagtgctctattcattcaagtatattattcttacaaatgtattaaaatattcataatcaagaagaatatattcataaagatagttgttgaatattcataaggatgtttcataaaattttgtgaacaaatttcatgaagattttatgaacaaattacttatgaagtaatttgaggaatgtgtacatggaaagtttttgaagaacatctggagaagaaaatactaataaggaaaatattttaataagaaaagcttcaagatgaggaaaatattcatgaagagtgttcctcatcttcccctctgcctctgcagctgggctgttttgccttccccatttcattctttccttggagaattttcctctgcccagctcttccagctgcagagacaagttcagccttcacaattttaatgtttccaacaatcataaaattagcaagtaaaaattcttgaaatatcattatattttcctatgtataaaatacaatgcatgcaataatgtactgccatgccctgctatttaacctattatttggcgtgtcttatttctcttgtttactacaaatttcttttgaaatattttttagaggctgggtaccgctgtgtctcccaggctggagggcagtgactattcacaggcaggatcacagtgcatactcacgaccacactgcagcctcaagccatcctcctgcctcagcctcctgagtagctaggactacggatatgcatcactgtgccgggcctatttgttttttcctactacaaatttcttgaaagcagcgacctcattttatgcttctctgtaattctcatagtgagcatttagcatctaacaggtgaatgcatatattctgttgataatgtcatgagttttttttttcaaataatctttgcagatatattttttgaggtaagcttaatttttttaaaaatcacaaaaccagatcataaagttgtacctttattctaaaagctctttttagcgttccatgaggacagtggcatccttgcagaggacagtagcacccacagcagaaatggatgggcatctgtccacagggcactcagtcctgataacagaagactgggatagatgacatccattctggtgtcacaattctgggcacgtttgaattaaggggttttattgctacatcttggcaatagccagaaatgatctttgaaagcatagtgcttaaagtggttaagagaaggaattcaggtggtttatggaaacccggatcagtactgcagcctaatacataggccctcttgaagcagaaggctttttcaactggggtttttaaaacctcacacttaagaagcattggaagagagaatgtttattttccgcaggcggaggcctccaaaggcaggtggctggcatttttacccagtagtgcccttctgctgcatctgaagagccacaggtcgctgcagttggagagggcttctccttcttcctcttctcccccatgcccacaaccctgacatgcctcatgcttgtcattcaaatttatcattcaaaccataacactatgtgggtagctcagccgtctgagagaggagcagaaaacccaactctaatgggctgatgaatggaaaatacattactgatgtaacattcaaaggacactcttgctttatctcacccaagtagaatggaaatatgagtaaataggttgacaatcagctgatagtgtcgtttgtaaatgaaaacgtcaaagggtgatttttttgctttttaaaatcttgtgctgtttatctttgatgtgtatactttaaaggataataaaatattttttctcccactagagtacacagttaaaataaatattattttttcataagtgttcagtacctgaattgtttttatataaatgcacttttagttttttggtttattcaaatgtcatttagtacattttggacaagaatgaaattaaatgataatattcacattaagtagagtaccagataaaatacaggacacctaactttgaatttaagaaaaatgatgaataatttttgttatgtccacgcagtatttgggatacaaactcaggcactacataatgacacttcagtcaactatgaactgcatatatgttggcggtcccataagattataatagagctgaaaaattcctattgcctagtgacatcatagctgtcataacgtcatagcgaaatgcattccttgtgtgtttatggtgatgctggtgtaaatcaacctactgcattgcagtcgtataaaagtctagcatatacagttatgtataatatgtaatacttgataatgataataaacaactgtgttactggtttatgtatttactatactttttatcatgattttacagtgtgctccgtctatttataaataaaagttagctgtaaaatagcctcaggtgggtcctctgggagggattccagaagaaggcattagtaccataggagatgacagctctgtgcatgttattgctcctgcagaccttccagagagacaagatgtggaggtggaagacagtgatattgatgattctgaccccatgtaggcctaggctactgtgcgtgtttgtgtcttagttcttaacaacaaaaaagtttaaaaagcaaaaaataaaataaaaaattaagaatagaaaaaaacttatagaaggaaagaaatataaataagaaaatatttttgtacaactgtacaatgtgtgttttaagctgttattgcaagagtcaaaaagtttttaaaaatttattctactataaagacacatacacacatgtttattgcagcactattcacaataacaaagacttggaaccaacccaaacgcccatcaatgatagactggataaagaaaatgtggcacatatacaccacggaatactatgcagccataaaaaagaatgagatcatgtcctttgcaggaacatggatgaagctggaagccatcatcctcagcaaactaacgcaggagcagaaaaccaaacactgcatgttctcactcacaagtgggagttgaacaatgagaacacatggacacagggaggagggaggggaacaacacacactgggggctgtctggaggtggggggcaaggggagggagggcattaggacaaatacctaatgcatgtgaggcttaaaacctagatgaattgttgataggtgcagcaaaccaccatggcacatgtatacctatgtaacaaggctgtacattctgcatatgtatccctgaacttaaagtacaatttatatatatatatatatatatatataaatattttttaaattaaaaagttttgtaaagtaaaaatgttatagtaagctaaggttaatttattattaaaggaagaaatttttaataaatttagtgtatcctaagtatgcagtatttataaagtctatgctagtatacagtaaggtcctaggccttcacattcattcatgacccactcactgactcaatcagagcaacttccagtcctgcaagctctgttcatggtaagtgtcccacacaggtgtaccattttttatcttgttttttttttttttgagccggagtttcactcttgttgcccaggctggagtgcaacagcatgatcttggctcaccgcaacctctgcctcccaggttcaagctattctcctgtcttagccttctgagtagctgggattacaggtgcatgccaccaggcctggctaatttttgtatttttagaagagacagggtttcatcatattggtcaggctggtctcaaactcctgacctcaggtgatccacccacctcgacctcccaaattgctgggattacaggcatgagccactgcacccggcccattttttatcttttatactatattctcactgtaccttttctatgtttagatatgtttagatacacaaatacttattacattataattgcctacaatattcagtacagtactatgatgtccaggtttgtggcctaggagccataggttctaccatattagcctaagtgtatagtgggctctatcatctaggtttgtgcaaatacaatctggtttctccacaaggatgaagtcgcctaaggacacatttcttagaatatattcccattgctaagtgatgaatgactgtgcttatattaaaaaattactcattgtttatccaaaattcaaatttaactggatggcctgtatttttgtttgctaactgtggcaaccctatcaccaaggcaaatttcactggaagaaatttgaagctctcactacagtttttaatcaagcacgttgacttttattcacacttgaaaatcaatgttacatcatccagagagtacgtatgttgtctccagctccttgtttcccactggccctcagcccattccaatctgcctcacagagccccgtcaccccatggaaacaggtgtcttcacggtcaccaacacgttccctgttgctacacccaatggacgctcatgttaacatctcagccgcattctgcaatgttgacctccttctctcttttgaaagagttcgactccggcttctgtgacccccttctctgtcctggttttctacttatctggacactaattctcatctcctctatcagatccttctcctcttaactccaaattgggaactcttcatggcttcatgcaaggttcccctgtcctcctctataccaacactgtccaatagaactccctgtgacgatggacatgtcctctttctgcaccatccaatgaagtagccactagctatatatggcgactacgcacttgaaatgtagctcgtgtgactgagggatggaattttaaattttatttatttaatttttttattgagagttttgctctgccacgcaggctggagtgcagtgatgcaatcttggctcactgcaacctctgcctgctgggttcaagtgatcctcctgcctcggccttcggagtagctgggattataagaatgtgccatcatgcctggctaatttttgtattttttatagagactgggtcttgaactcctgacctcaagtggtctgcccaccttggcttcccaaagttctgggattacagacatgagccactgtgcccagctaacttttatttaattttgattaatttatattaccacatatggccagtggctaccatattggacagtacagctctagattatcttactaggtgagctactattggctttaaaaagcggctttatgcttatgatttcctgatatttatccatatctctgaccctccacagaggtccagggttatatccatctgatagcttcaatgactcacaagcattaagggaccataactgttcttttctcagctgccaatatttcaggaatggtaccatcatttactcagtttgttgaagccggaaactgagagtagttctttatttttccttattccttactatccacacctgaatcataagttcgttccactgatgctacctccaacttacctttttttttttttatgggcaccctatttacttttattacccggcaggatttgcgggataattgcccagaactggcatattgatccagatttttacattacccgtccctttttgtttcttccaagctgcaggagatcactacttgattcaggggaataagcagggttagtcacaggttaggaaatctgcatggggactgtgtagaaaaggtaggaagccagtcatccccaaggggcctttattggctctgcaagtcaaactcgattccttaaagggaagcacagttccagtcaaagctttggtaaaacaatcagtttctccaattgtgtcttcagacttctattggtgtagtgcatgcagttaactcctgtttgacgttcatgaacatttcagctcttcatgagtcctgcacattttttctctattccaatgttgtgatcttcaaagctattagaaacccttcaaagctattagaaacgatcccagatggggccctaaaatgaagcagcatcattcgctggggtaaatatctgaggttcatcgtctcacaccaaggaaattgaagacgtggacacacaagaagtgagtttaagagcacaggtttataggcgaaagaaagagaaaggagaatagttctctctcctgcagagagagaggggctcccgagtgggtcttccccaaattacattttgaatctgtctacttccttccatctccaccaacaccatctagtccaagccactatcatttcttgcctggactacttgcagtcatcttcctgcttcctaaacccagctttaatccagtatccacacagcatcgggatgattcctctcaaaacataaattggatcatgccactttgttccttaaaattcttcagtggtggccgggcgcagtggttcatgcctgtaatcccagcactttgggaggctgaggcgggtggatcacaaggtcaggagttcaagaccagcctggccaagtcggtgaaacctcatctactaaaaatacaaaacttagccgggcatggtggcatgtgcctgtaatcctagctactcaggaggctgaggtaggagaaccgcttgaacctgggaggcggaggttgcagtgagccgagatcgtgccattgcactccagcctggaccacaagagcgaaactccatcttcaaaaaaaaaaaaaaaaaggccaggctcagtggctcacacctgtaatctcagcactttgggaggccgaggcaggcggatcacgaggtcaggagttcgagaccatcctggttaacacagtgaaaccccgtctctactaaaaatacaaaaaaattagccgggcacggtggcgggcgcctgtagtctcagctactcgggaggctgaggcaggagaatggcgtgaacccaggaggcggagcttgcagcaagccaagatcacaccactacactccagcctgggcgacagagcgagattccatctaaaaaaaaaaaattcttcagtggtttgccatggctcttggaataaaatctagatgccctgtactggacttcaaggctctgagccctgctttccatttcagcccaattcatgccatacttctcctatgtacactgtgtttacacactgataagttgatcccttgttaacttggcacccatatgcatcccttataccatacttaatttccaaataaagacatggtagctctgcctaacgtgatgcgactaacataatgtaactatcctgcgtacaactgaacatgcgcaaccctttttccagaattcagcttccaggatctcagcatttgggattttaatcttttgggattgtgatttttgagattttagacattagggattttgatcattctggatttcaacatttgggattatggcattcaggactgtgtcttttgggattatgatggtcaccacctaaaatcataagtttgatgtgttatttatatctttttctattatacattaaaataagtcagtaactattgaaatatttgtggactgtctagactcactctgcaccccatgggatccttgtaccacatgttgggaaatgattgtctcagggcctccagcatgtctgctcactcccatccccggcccttcctccccatcctgccgggattcctcaagtcccacattggaacacgaacacttagaagtaacaaagctcactctgtgccaagagcaacactaaagtataaatgcaattttattgataaaagagtacaatcaaagccaatatgatgtattggctaggaacagggagatgacctggattcaaatcttggtctcccacttgctctataagtcatttcaccttctcaggtagctcaggggacagctgtgaggattaaatcaattaatgtatgttcagggcttacaatgtctgacacatggtaaatactgatatatatatatatatatatatatatatatatatatatatttaattttttttcttttttttaaaaaaaaatgttctttattttttgagacagggtctagctctgttgcccaggctggagtgcagtggtgctatctcagctcactgcaacctctacctcctgggctcaagccatcctcccacctcaatcttctgagtagctgggactacagctgtgtgcaatcacacccggctaatttttgtatttttttttggtagagatggggttttgccatgttgcccaagctggtctctaattcctgggctcaagtgatccacctgcctcagcctcccaaagtgctaggattacaggtgtgagccaccatgtttggccagtaagtgctatataaatgttagatattattatagcttgtgagttttggcaatggaagttcaaaggaaaaagtaaccaatgagtgtactaagcatctttccctttaaaaaaaattggttggttagaaactcataggagtgtactcatacctactcaatcttttgttaagtactgcatgcatttatgatgttggagtattaggcttttatgaattagttggatgatacagaatgctcaatgatttaaaatggcatctgactgactacaatttagttatacaaattgattattctatgcaaatttgaggatgatacttctaggcacccccccccaaaatatattgctcctgtagtttatctttatttgaaaacagaatattttcactaaagtgtgtgtgtgaacactccaaatgttttgaaaaggctttctgttatgacagagtacaacagcaggtattttgcaaataaactacaaaacagtcaaactatttaatacttgttttatttatttatttatttatttatttttttgagacagggtcttgctctgttgcccaagctggagtgcagtagcacaaagatggctgactgcagccttgacctcgtgggttcaaatgatcctcccacctcagcttcccaagtagttagaaccacaggcccactgccatgccctggggtctctctctgttgcccagagatgagggctctccctgttgcccaggctggtctcaaactcctgggctcaagcaatcctcctgccttggtctcccaaagtgttgggattacaggcgtgagccacctctctcagccaatttaataagttttaatgtttcataacaactgtttcccaggtcataatatgaacaatttttttcctatttctgttttgaagtcaggcaagaattagcttcatttaaaatgtccttattacatttaattgaacattatcaattacctttatgaagaataacagaggaaccgtaaagctgtatttcagcaaaacattttaattataattctgaaacctaatcagaaaaaaaatgtatttagtacaatggtaatccattaaatacaactcatcattgttaggctgtctctgttatggaaactatcatgttatgaaaaggttatgaaaaggttaggaaactatcatgttatgaaaagctaatattgaatcttttaaaaacaactgaactttaccattgctagagattttttgaaaagctgtagatacacacgttggagataaaacaatcaaaattacttcctgaagctagtttaacaggttctaaatgctaaacaaaaatttcatgaaatgactcaggtgataagattgtaaaaatttcttcctgaagctattttggcagcctctagggatgtgaaattccctaaggtgctctaatgggaaaagtcctagaataagaaccagaatccttgacttctactcctgctaataagctaagtgaacttaggtcagtatttaacctcctacagtttgcttatttgttcatttgagagactcacactttcctcactacttctatgtattgtagccagtttcaaaatgctgtgtgaaatttcccatattatctaatcatttccaactgattattttctcagttactcagaatttttactactatctgtgtttctttgcacacaaggtgaatctcccaactcaataagagatcattgccatttcacatttccctgcctcctgcctgcatgcacactgctattatgtcccctggattgtctttcaaaaatcctcattgttgtaggtaaagaagggacccactctgtctgagtaactgactgcggagcccagcccagacagacacacatcccaagtctctgcttcatctgtcctagaggaaactggctcgtggggaatagccacagtgggtctgatggcccggcaatctcctgcaattttcataggaggtggccctgaaggagaggctgccctggtgactgtcaccggaggaccccagggttctggatagacagacatcccagtatcttcaggagcatagttacagctcgaaaggctcttcacctctcgcacactgtcactgtatttcatagcagggggctggtaggcctggtaggacactttagtggtggtggtgatcacggtttgtagggcaggggcacctggtggtggagtcgtgaggtacctgcagggaagctctgggttataataagggcgagtggccatggcctgaaactgcccatggttagtcctttccacaaggctgggttttccaagagctggtttccagccatgctgtttgttggtgaaatcaaagcttctctcatagctgctgtatgaattgacattacattgtagtgtgttcagatgaacccagtctgtgtcattagggatactggtggaatccttataaagggtgggatatgggcttgaatttgtataaccagggtttgccaattcatagctgcaaggtggcctaggcaaatagattcttgggcttgagtatttctggaagggtggcattttgtctccttgaaaggtggctaggtcacaggtagctttgtaaacatcagactttgggaaggaagggcaaggctgccctggaatagggaagctggtttcagtaactatatcaaagtcttctggattttccaagggaggtatgttgctgaaatgaccactgctgtcttgattttcttctgcctagaaaaatgatacaaacatagacacacgctatgtaaatcgtgtggacaccctcacctgtaacaatagcctagaagtaagtaaaaacagacatccatgtgctgggctctgtgttgtgaacatggcactgctcaggtacgtgatgtaagcacgtggtccaggggttgctaagcttgggctcactcagacataaataccaacgactgaatgacaaaggtccatggtagccaggtaggatgcttctgagtggcagatggtcctgttctcacctatactgtcttcctaatagtggagacttaggagccacacgggcctgggttcaattcctgactctgtccctcacaaattgtacaagccacttaacctctctgagcctcagatccttcatcttaaaaatggaacttaataacagtaacctcattataaggtttctgcaaccattaaatgtgtgaaactcttagaccagtgcctggcacataggaagtgctggaaaatgtcagcttctgttatccttacactaacactctgcctgcttggcgtgctttggttgaaaagccaaactgaattaaattgcgcagagaaattttatccattcttgtggatgaaataatggaaaggaccctctcaagggtgcactgttaacttcctgttggtaggcacatatttctatctttattactgttgcataatcgcccttatattaggatgtcagctcagcacactgacatatcaggactgtatcattgcctgtagagattgttgctttttgttttaaggagaagggattagaaaccctgtccaaatgttgatttaatgatattttgttacagacgtataattttcagatgaaatcaaacccttgtaattaacgtatgaccttcatattttgcataacgatcagcgtatcttgggatgaaaatgagctgagaccactgtgcactatcagctccctgttacctcggattctcgaattctctttttctggggttggtagaaagaggccatttgtctcttgatggcgcttcttctagcttctgtctctgatttgctctctggtcttggatgatcatgaactcccttggcctgcgataacgagaaaatgaatcatacatttgtgcctctaaaggaagctgacaatgttgcccaaaaattgatcatgcctttcccaacatctcaagagtttagttttgtttctttcaaaatgacagaaaaaaaaattcttgaacaaataaaacaggctcaagaattgacatctgaaaagatcacctgcaatcccttcactctattaaaagaactataacttggtttaccatctgtgtaccttaaagagcacaaagtagtgagtgaatttctaggctcccgctaggtccctggggagctccagcacctatttctggccactggggctgtattttgtttggcccagggttcccaaggcacacgacaggtggtttggcctttgtggtctgatgaaaagtatccatcacaaattgtgttctcacctgacctacctgaaaaaagatcgcgttgccatcaagccgccaaaagttggttacggggtatccgctgtgccctcgacaaggaatcaactccaaagcagaatgacagttagggcatgccttctctgcaaagcccagaagggagaaatattaaccctgaccccagacccttctgaaggaagaaggggaaaattagctgggaacaaagaactcatgctcgggcgcggtggctcacgcctgtaatcccagcactttgggaggccgaggcgggtggatcacttgaggtcaggagttcaagaccagcctgaccaacatggagaaaccttgtctctactaaaaatacaaaattagccgggtgtggtggctcacgcctctaatcccagcactttgggaggccgagacaggcagatcacctgatgtcgggagttcaagaccagcctgaccaacatggagaaaccctgtctctactaaaaatgcaaaattagccgggcgtggtggcgcatgcctgtaatcccagctacttgggaggctgaggcaggaggatcgcttgaacccgggaggcggaggttgcagtgagctgagattgcaccattgcagtccagcctgagtgacagagtgaggctccatctcaaacaaacaaacaaaaacaacaacaacaaaaaactcatgactccaaggtcaccctctccctggccccatgtcctcactctgctgtttcagccgtgccttgtcgcagatggccggcctcagctgcaggcgggaaccgtcgggcagggtgcaggcctgtgtacacaccaccacacccaggcacgacttcttgaggatgtggccattgtggttgttggtgttgcgcatggcccagccgctcaggtgacgctgtgccttcttctcatcgctgctgtagatgaagcgcacatagccgtcaggccactctcggaattggtcaaagagggccagctcctggaagagtgcagaaggaagggtggtcagtctatccagtccaaactgcacacatcatgctctaaaatttctctgagcacattaggatacaaaccagttctttttaaatccagtaacgtcaaattccaaaatgccactctttctatgtaagacttcctgacaaccaggtaataattaatgtttatatagtgcttatctgttaaatgctatacatgtattagttcatctagacttcaaattataggcaaacaattatttccaatttgccgatgaggacatggaggccagagaggttaatcgactcgcccaaggtcacatcacacagctagcaagatctggatccaggatttgcaccctggcagtcccattccagagcctgtacttcttaccactatgttatatcacttcttggtgtgtttaaatgttgaaaacatttttaagttaggtatcaaagtaccaggggaaaaagtgattggaatgttctatcactgaaatgcaatttaactggtaaatatctttaagtcagtgcattttcttcaaaagcacttggctctgtatgccaaacctgtcagtcacattagcagtggcacccagagtaatgtcagagaggaaagaacagcttccctccctactctcaacttggctctccaagtttaaaagggtactgcaatgagggacttaagccatgagctttggggtgtgggtgagcttgtctggcacgggactgctccccagagcaatatgggactgtcattctcctcaacaaagagccacatggctgcaataataagttgtatctaaaatactgagcattgccttagtattcatatttggtagtctttgtcaatttaatgcattatttacactgcaataaatgtcacttttgcatataagtttcattgaaaaatcaccctttactgagcacttccttttttcttttttttgagatggaatctcactctgtcacccaggctggagtgtagtagcatgatctcagctcactgcaacctccgcctcccaggttcaagtgattctcctgcctcagcctcctgactacctgggactataggtgcatgccaccacgcctggctattgtttgtatttttagtagagatggggtttcaccatgttggccaggatggtcttgatcttcctgacctcatgatccacccaccttggcctcccaaagtgctgggattacaggcataagccaccatgcccggccactgagcactttcttttatgtaatgtttagggctgctttcacactacagtgcagaattgaatatttggaacagaaacagtatgacctgcaaagccatattatgcaatatatataattctcacaacatctttgcaagatggacatctttactcttgtttactaaataaggaagtggaggttcaatagataacctttcacagtggcatagctggaatataaacagaagatgggtagcagccagacccagtagctttgctggtgtaataaaggctcagaagagtgtataatagcagtaagccatttgcatctcctccccactcttgccactcaggaaaattagatcaaacatttgcaaagctgaagtattcacagttggaaaattcagacttgtatacatcattaatactgcacattctaacagtaataaggttaatgggtgattttgtttccaaaattacaaagatattgttgaaatcattattactaccataggtattatttatcttttctctgaaatattacaattgacatgatacatcaatgtaaggtaagtcacaaatgaaatatataatgatgtgctatcaactccaagcttatattaaatgctaatatctttgttttaaaagtgaatattttaacttaaggatcttagtaacaaattgacaattttccagaaaacagcatttctttagctctcccttaaggatgtagactaggcccccatgcctcacacgagctactgaggtagtgaccctggcaatgaagccacagagattgtatttttaaaatcagtacaagaatagaggatgtcaaggattgggtttcacttgctctcaagtgttggcatgttgtgtgtgtgtgtacatacacacacatagacactgaacctgatcgtagacctggaggagagtttgagatggttatctcactctaccacttgatgacaagtgagtaagtagcctgagactaaggcaaattcaaggactctctcaaggtcagacaggtagtttaacttgctcactcggttacccagagcagggcgatgctaagtttcttcacttctccatgtcccagtgtgcctggcccgtttgagatattacacacatgcttcctgcttaacaaccagtctcctaaaaaaaagttcatattgacatgggaagtctagcaaatgcttgagagatgaaccataattacattacttggatgtgacttttctaaaatgcaagatatgattgtttcctgtgaagatgtacatggacagaaacagaatgagatgcacttgctgtactgtggtccactttcatgaaaatggtaccatgtgactctaaagtaggcagactttaaaacaaaggagtgggccaggcacggtggctcacgcctgtaatcccagcactttgcgaggctaaggcgggtggatcagctgaggtcaggagttcgagaccagcctgaccaacatggagaaacccaatctctactaaaaatacaaaattagctgggcgtggtggcgcatgcttgtagtcccagctactcgggaagctgaggcaagagaatcgctggagcctgggggatggaggttgcagtgagctgagatcgtgtgattgcaccccagcctaggcaacaagagctaaaccccgcctcaaaaaacaaacaaacaacaacaaaaaaccccaacaaacaaacaaaaacaaaggagtaaaacacacctaacctactacaaatatatggatccaaaaaagtgctgacctctatgagaggcgacacaatgttgcaatgaattgttattcatctgaacacctatcagacacattttagttgcggacaaaatgacccatctcttttatccctgtgccacaacattgctggaagcccacatctgcaaatggcagggaagcaactctcattctacaccccccaccccctacagccaggacttcaacatcactcaattttggccctaaccagtgtgactaatgataattggtcattctctggaactggcttcaaaccacccacttcattcaccacttcatccaccccagtcattctttggacttggctccaaaccatttttgctttattgaaataaagcaaaatacaacaaattcaccctaaaagaatgatgatttgcttgtcattagagaagaagtaagttttgggtacaggtggccttgttggcatgactatggggcctccttcctctgagcagttagggaggtctgagcaaattgctcaagtcgggctacttgttttaaatttaggtcattagattcactttacagttgtacctcagttttgctgcatgagaagcagtggtatttacatctgcttagattttctccttagcttcctcatggatttaaagtaaatgaataaggagagaggcacctaatttctaccttggttaaagggaagtgaaaggacaggcgtcccgctctccccaagactgggaatgtggagcctgaccaacatttcctgctgctttgcttgtgatttcaggcaagcacaaggaaattgctgggagaagacacatttcttcttcttcttcttcttctttttttgagatggagttttgctcttgttgcccaggctggagttcaatggcgtgatcttggctcaccgcaacctctgcctctcgggttcaagcgattctcctgcctcagcctcccgagtagctgcgactttaggcatgcgccaccacgctgggctgattttgtatttttggtagagacggggtttctccatgttggtcaggctggtcttgaactcccgacctcagatgatccacccgcctcagcctcccaaagtgctgggattacaggtatgaaccacagcgcccggccaagaagacacatttctaaacccaactcagccttttgtagagtccagttttctttctacacttgagagggcctcagaaacccagaaattttgcgggtatgtgtgtgtgtgtgtgtgtgtgtgtgtgtgtgtgtgtgtgtgtgtgtgtgtgtatggtccgtccgcagactcttcaagaactcgaatgccattctccctccttcggatggacagcgccccgcgtgcccgcacacacccggttcacttacctgaggcatctgcggatcgttgatgtcccagctgagctgcatcccgtaggagcacacgccgaccgcttcctgcaccgcggccgccggcatctgcccaactcgctcgcgctttccgcccagggttctgaaaaatagaagaaaaaaggacaggtgcgccaggtgggttttttttcttctctttaaagaagaaagtggggtgtgtgaaggggaggtgcagagagagagaaagagagagaggctgtttagatatctggaagctggggacaatggttatggacccgggcggggccttgtccttggccgcggtgctgaacgttctccacccgaacggcagcatcgacctctggcagctgccccctcctttataaagatatacctccggggggctccgccctgtctcgcctacctcgctagcgcccacgctccaggggccggtcgccccctccaccacagtcccaggaacggaggtggaggttaaactcagccctggaagcaaatggaaactgcagccagagggtgggggtggagagggtaagtaggaatgtatcctttaagtttaaaaccttattattttcttcttttcttttcttcttttttgtctcactctgttgcccaggctagagtgcagtggcgccatctcagctaactgcaacctctgcctcccaggttcaagcgattctcctgcctcaacctcccgagtagctgggaatacaggtccgtgccaccaccctggctaatttttgtatttttagtagagacaggttttagccatgcgaaaccctgaccaagctggtcttgaactcctgacgatctgcccgcctgggcctcccaaagtgctgggattacaggcgtgagcaaccgcgaccggcctattttttttcttttttctaaacgcgtccagcttccctgatttcggaaaggggcttagatggaggctttccagcaaagtcccctgagagccaacactcaattccaggagagcatgggaaccgtgcgtgggcccctctgccgtccgcgtgcgccctagcctgaataaccgcgcccacgcctcctagttaggggtcagcccattttgggcctccactgccggctcttcccctaactattgtgagtgtctcgcagtcttggctctgctgtttgggacgtgccagggtgcgccaagcctccgcgtatgctcgcgagcccaggcgccttcacgctcccggggacttcggagggacctggccctgcaggaacggagtcctacaaagtgaacctggaggaggtggggggcggaaatgagcccggggtaggtgggagcctggggtaggtgggagcctggggaaggagggaaaggggagaggggaaaagtcccaaagaactcgctttctccactgctttggctccctctgggtctcagcttccttatctgtttatctgttaaataagaggttgtggttcggcgagctctcagttgccacccacccgaacacaaatctttttttttttttttttttttgagacggagtctcactctgtcttcccggctggagtgcagtggcgcaatctcggctcactgcaacctccgcctcccaggttcaaacgattctcctgcctcagcctcccgagtagctggaactacaggcgcgccatcgcgaccagctaattttgtattgttagtagagacagggttttaccaagttggccaggatggtctcgattttttgacttcgtgatcctcctgtctcggcctctcaaagtgctgggattaaaggcgtgagccaccgcgcccggcccacaactcttaaaaaaaaacttcactgatatagtcttggaaatatcacgacgaaattgaatttactccattacagtcttgggaggctttggaggactagagaatcgcggtggtgcggaggtgcgcaggacaatgtgggttctccggggctgggacgaaaccttcatcatctgagcagccgactcgcccagggctactccggcacatggagaccctcagtatatatatatataaaaaaaacaaaaaacaaaaaacaaacaaaacaaaacaaaaccgattgaagtgactaaagtcactctttgactaccccaaggccggattcttggcggccaggggaaagggcttctggaatttattgcccgcgtccttgttttgcagctgcacgcttccattcccagccccagccagagaagaggagccaactcctcacggcagatcccttgatagaggaggatgaaccgaatccatgaccctccagacccgggaagcgacgcaccctaggccttggcaccgcaaagcccgtgctgagcgcacggacgggtgctgcccgggactcggccaggagggcgcccatgccaacgcctcttgcaggattagtgccttcggttggcaaaaggcggataaaggaagagcgaaaccacatcaggaagctaagggtggtccacgctccctgtccttttacttcccgcgccaaaggcacagtgaggcttgcttagaaaagtccatcccgcgattgggcgcagtggctcatgcctgtaatcccagcactttgggaggccgagacgggaggatcgcttgagcccaggagtgcaagaccagactgggcaacatggcgaaaccctgtctcttcgaaaaaaaaaaaaaaaaaaaaagccgggcatggtggcgtgtgcctgtagtcccagctacttgggaggctgaggcgggaggatcgcttgaatccaggaggcagtggttgcagtaacctgagatagcgccgagcctgggcgacagaacgagaccctgtctcaaaaaaaaaaaaaaaaaaaaggaaggaaagaaagacagaaagaaagagagagagagagaggaaggaagcaaggaaggagaaagaaaagaaaaagaaaaaaaaaagaaaaggaaagaagaaagaaaaagtatcccagtcggtcagagaagcctgccagtggcagcggaccagcgaactctgttgggaagaaaggccaacttcgagcagttcctcgcgattttttcctcctttatcttctagctggggtcctcctcccagtcaaagccgaagggtcctagcagaagaaagtgatttgttcattcccagcctcctttctcccgaagttctcccctcctaaaaggtcctgtcagtcaaggtttctgattaaaatcactctcaaatggtcgccactgaggtctagctgggaacgaagagatctgtctactcttcacccacgagtttcattcacagatttttcatcttattaactgtctgccaaaggtccccgaaactcctgttgattcagttgcttttcgtgttgttttgtcttccaaaattgaatgaaaatttattgattatccattttaattatagtatttcattaaatgttgtagtctaagataacttatcctttcaaatgttctaaaaataactttaaaatggtgatttaaagttacctctgaaaatgcatagaaattaatttttggtcttattgcagtgctagaatagttcttgtctctgtgcttttggaatgttcctagagagacctgacccgtcaaaaacataaataaataaaacttttttatgtaaaaggcaaatcaattaatttctaaagggattctggtatccaaagaaatgtcatagagcctctactatatttagtttgagaagaattagagtatgcatttcaagttgccataaattatattaagacaaaacatgttagtaaaagaagctaatcaaagtaaaaaaaaaaccagataaaaggtattttgcctattctgttatttttaatttctcttaaagatttgaatgcattgcaccatagactttggaaggacatgttttcccccaaagcctgaaaataatagatgattaagttttctatctaatattatgaaaactctaatttttaaatattctcttaaaattcatttaaactgtagtattttgtttattgcttcttattattcattgtttctttcttgccctggtattatatttgtattgactcacaatagcttatactcacagctgttcctgtcttgattactagtttaatattacaaaagtccattcattgaaaaggaaaaaaacttgcgtttgaatttccttggtttagattaaaataggtaaattaatgtaagaatgtttacattatactttccaggaaattgatatgacaggctttgacataaacattgttttgaacggactagaaatgtgtgcaagtcctgggctaacaggggttctggttttgttatgttttgctttggtgtagacaaatatcttccgtacatattatgacttgaaatactcacaggtctagttataatacaagttgatttttacacaaaggatgtttggattggaggggtcttttttttgttttttgtggaaaactctagtccaatttaattttgccaccgtgttcacacaactggccacctatccgaatcagcctagccattggtacgcatacttgtcaggttaaaggaaataggcaaacaaagaaacaaaaaaacaaaaacaaaaacaaaactatttgctttgattaaaaaaaaaaattccccttcctccccaccacggtacttaaaaaacaaccaccaaacacactttgtgtgtgtgtgaaatcaggaatgtattaataatatcgggtacaagtctggttaccataggaaagggttcggcttctgtctgcacacatcaatggaccaaaaactgctcctctggctgttttttttttgagacggagtctcactctgtcccccaggctggagtgcagtggcgagatctccgctcactgcaacctccgcctcccgggttcaagtgattctcctgcctcagcctccccaacagctaggattacaggcacgtgcaccgcgcccggctaattttttgtatttttagtagagacaaggtttcaccatgttgaccagactggtcttgaactcctgacctcaagtgatccaccagcctcggccacccaaagtgctgggattacaggcgtgagccaccgcgcctggccgcccctctggctttttaaggcggggcaaaaacttggaacagctaccacaaagcgaacgcctatctgtttggaatttcgcaaataaggaacgtttaaatgacgtagttcacatcctttgagtgctggctttctcttaaagggtgagtgcgtgcgcccaggtggtttggcctgtgtgcgctagttacttgcacgcgcttcttgagtctcaaaacacagagctctagtaaacttcagggggcggattcgtcaattacagttgcggaagaagactcgactcgaagagcggtccgccaccagggctctttcggcagcgcccccagcgggcggggctcttgggcggggaagcaggagagggccgaccgagcgcaacaaagctgagcggcgcgtcgcttcaggaacgaagaagcctcgttatgcaagcggtgagtgacccccgaagggcccggaccttctgtccacagtgctagggcgcgcgagggcgcggggtccctggggctcaggttctgccgccttgaggtgttcgctcagagaccgggtgctgggcatagtcccccgccacctccttgggtttgctcggagtgtattggcagcctgcggggagaccaggcagaatagaaacctcggatccctagctaaatagcgctcagggaaaggggaaccggagaattcgtgttcggaaagcaatgagatagttcttttctagttgctttgcgtattttcctagccggttttccagccctctttccaccttgctgcgtagaaagtgcagaagtgttaagcaaccccaagtgctgggacttcatttaaccgaacgacaaaggacagcccctaagataaagctacaattattacttatcaataaataataaaaaaaaacacatgaagtttgagcccacccagggacgccaaaaacaacaaacaaaaaccacctggggcgtgtttctaacattcttctgcctgggttcctggtggtagaaattctgatgtaattggtctacggtgggccggtagtttgttagtttgttagtgaggacgccaggtgattctgatagccaggggtaactgcttgcctagatccaggaactcactcttgttctccataaaatccatctgtcatctggcgccatcttcccagccatggggaaacagatttgggacagaaacctttctaacatcaagctacgcttaaattcagagcacttaagcataacctcctcaccctctccatccctgttacattgaaagctgccattcactgagccatttttatgtgcccaggcactatgctaagaacattacagacattctgtcagtcagtcctcactccaatccttccatataggtgttaccatcttttttttttttttttttttttttttttttttttttttttttttttttgagacggagtctcattctgtcgcccaggctggagtgcagtggcgtgatcttggctcactgcaacctctgcctcccgggttcaagcgattctcctacctcagcctcccgagtagctgagactacaggcgcgcgccaccacgccagggtaatttttgtatttctagtagagacggggtttcaccatgttggccaggatggtctctgtctcttgacctcatgatctgcccgcttcggcctcccaaagtgctgggattacaggcgtgagccacagcgcccggctatcatcatgttttttaaatgaggagactgaatctcagagaatctaacgatcttttctgcctaaaccatcccactttctgattttcctgtcaggttcctacccacaaaagctgccacatgatcttcacagaagggggatacctttctgtgtactagagtggctccagaaattccagaaacaggaagcatttctttggaatttgcaaagtactgaccaccaaggccagagaaggttgaaaggaggtagaaataaaaataagcagagcatctctgcatacgaattgaactgaaggagagatagggccgtgtctatagagaaaagaggtaaagaagcttaacataaaggctcccgggaatattttctttgggatgggaagtatttcccactaattcagaatttgttgacaaaacttagaaattatagatacgtagcatagtgtttatttgatgtcagtttatgctatgaattaacacccttttttttttgatacggagtctcactctgtcacccaggctggagcgcagtggctggatctcggctcactgcaacctccacctcctgggttcgagtgattctccttcctcagcctcacgagtagctgggtctacagtcacgtgccactgcgcccagctaatttttgtattttttagtagagacgggtttcaccatattggacaggctggtctcgaactcctgacctcatgatatgcccgccttggcctcccaaagtgctgggattacaggcgtgagccactgcgcctggcctaacacccaattttaattgtagctttagctgttcctcctatctcacttttgcctctactcaattatccactaacacaatggttctttttctttgcctttatcatttatttttaattgacacatatattaattgacacatagtaattgcacatgttaattgggtgtagtgtgatatttccatatgtgtatacagtgtgtaatgatcaaatcagggtaattatgcatatccatcacctcaaatatttatttctttgtgttgggaatgttcaaaatctactcgtatagctatttgaaaatatacaataagttgtacattatagtcaccttgcagtactatcttactctagaacttactccttccagctagctgtaattttgtgttcattaactaacctctgcctatctcacttcctcttttctagtgaccactattctctctacttctatgagatcagcctttttttttttttttttttttgagatggagtttcactcttgcttccccagctggagtgcaatagtgcaaccttagctcattgcaacctccgcgtcccgggttcaagcgattctcttgcttcagcctcccccgtagctgggattacaggcatgcgccaccctgcccggataattttctatttttagtagagacagggttttgtcatgttggccaggctggtctccaactcctgacctcaggtgatccacccacctcggccacccaaagtgctgggattacaggcatgagccaccgcacccggccgagatcagcttttttagcctctacatgtgatcaagaacatgcagtgtgtctgtctgtgccccgcttatttcatttagcataatgtccttcaggctcatgcatgttaccatgaatgacaggattttgttcttttttctggctgaaaagtattccactgtgtgaatataccacattttctttatccattcatccactgatggacacttaagttgattccatatcttggctattatgaatagcgctgcagtaaacatgggagtgcagatatgcctttgacatactgatttcttttcttttggatatatctccaggagtggaattgctggatttatgatagttttttgaggaacctccatactgttttccatattgtctatactaatttacattcctaccaacagtgtacaagagttcctctttttccatatccttgccagcatttgttgttttttgtcttgataatggccattctaactggggtaagataatatctcattttggttttgatttgcattttccaatgattagtgatgttgagtattttttcatatacctgttggtcatttgtatgtcttctttggagagatgtctatttagcttatttacccatttttaattggattggttattttgctgttgaggtgtttgagttccctgtatattctagatattaatggcttgttggatgcatagtttgcaaatatattctcccattctgctggttgtctcttcactctattatttccctttctgtaagaagctttttggtctgtataatttcatttgtctatttttgctttcattgcctgtgattttgaggttttctccataaaatctttgcccagaccaatgtcctaaagtgtttcccctatattttattctagtagtttgggatcttaagtgtaagcttttagtttattttgagttgatttttgtatatggtgagacatgggatctggtttcattcttccacatataaatatccagttttcccagcaccagttattgaagagactgtcttttccccatgaatgttcttgacacctttgtcaaaaatcagttggctataaaaaagtagatttattttgggtttatctattctgttccattggtctacatatgtgtctgtttttatgccagtaccatgctgttttgttcctataactttgtagtatattttgaagtcaggtactatgatgccttaaagacacttttatttaactttattttacaagctctcattctgaaaatggtttattagttcaaagcctttttacttctactttataatcatcattatagagtttgtttattttgtgtgattatttattcaaatgatgtttgctttgcttcttctgatagtttgtactgtatttgtcttagaccatgctaaagaaggttggataaagtttttctcttttttctaagtactattttacttagacctataatatgagcaaacaaaaatttctgttcaggaaaacaatacaaacctttaattttttttttttttttttttgctttgtgtttaaaacttgaaatgcatttctttgaaataaaaattgtttaaaaacatgtttttattccacacagaaaaacaaagatgctttgcagcctattaaggaagacaggactgggaaggcccaggatgatgctttctgggtaaagatcaagtttcttttataatctctctctgtgtgtgtgtgtgtgtgtgtgtgtgtgtgtgtgtgtgtgtgtgtgtgtgtatgtgtatatgagtgtatgtattctttctagttctgtgttccctgggtcattagcaaacttgttcctccagttgctcaaatcagaagcagagaaatctttacttctccttccctaatctctcatgtccaatttattactatatctagtcaatttaccattagctatcttaccaatatcctagtctaaactatcttgtgccctgtgcagatatcttgtgccctaaatgcagatagatgatactgaacaaactagaaacaacgtctgcctttatggagcttatagactggcagagagccaaagaagcaggaagaaaaagaacagggtaatgagatggggaataattgggaatgttgaggaggcacctggtctacgtaagataaggtggtcctggaagatctacctgaaaaagtgatgcttaagctgtgatctgagtggaaccagccatgtggaaagtggtggggtgaagtagcccaggcctagaacagccagttcaaaggccccgaggcaaggaagagcttgacttatcctaggactcattagcaaggaggtcagactgtcagagatcagatcatgccacgttctgcggactaaagcaaaggattttgggtttatttttaatgcagaggaagccatggcaaagttttgttttgttttaacgggatctcactctgttaccccagctggagtgcagtggtacaatcatggcttactgcagccttgacctcctgggctcaagtgatcctcctgcctcagccttctgagtagctgtgactacagccatgaaccaccacacctggctagtttttcattttttgtagagactgggtctcaatatattgcccaggctgatgtcaaacttctgggcttaagcgatcctcttgccttggcctcctaaagtgctgggattacaggcgtgagccctgcgcctggtaatggcagagttttaagcaggtaaaagggagtgaatttcagctgagcaatctcacataagtttgtaacctttcctatccttgctacttgtatcctgagataaagaacctaacctctcaggaccgtggtaaggattaaataataacatctgcagaacacttaacacacttggcacaaaaaagctcactatgtgttaacttaaaaaagaaaacattctgtttaaatggaataattttaaatgctgttttcccttttaattcagtactaagaataagtggaattgtgggctgtatatagtaaattgcttccttattaaaatagtattgtatatttaacctgtaagatttttttaaagataaaaaatcttttatagtttaaatgtttaaggaaatgtctgttattcaagtatatatacttttttttttttttgagacagagttttgctcttgttgcacaggctggagtgcagtggtgcgatctcgactcaccgcaacctccgtcctaggttcaagcgattctcctgcctcagccttccaagtattacaggcatgcgccaccacgtctggctaattttgtattgttggtagagatgggattgctccatgttggtcaggctggtctcgaactcctgacctcaggtgattcgcctgccttggcctcccaaagtgctgggattacaggcgtgcgccactgcacccggcccttcaagtatatgtacttagaagcatgtcttagctaatgtgcaggcagaaaagatgaatttcattcattatggtcaatttgcatacttattatctataattattagtattatttttcttccttctattatgatcatttatgtcacttagtgagtgatcataggcttgaaatttttagtgttttagaattcccaacattgctgaggatcttcacctaatgatatctgaaactgaagtgttgttttccttgggtcagtggttcccagacttcagcatgcacgagaatcacgtgaaaggctctgccctgagtgtgagtgctaagaagtccccaggtgatgccagcgctgttggtggtctaggaaccacattttgggaactcttgtcttaaaccaacggaaacatcaatcatttgtgaaatgattgtttactattcaagatagagatctccattctatatttaccctatattatttcacactgaattcttattgataatgagatcagttagaaaattactataaaataaatgttcttggggaaaaagtaatttgcaaactatcatctttccagcttcaatcacttattacggatgcattccatgataaaggatttcagaaaataaaagaatactttcaacagaaagagagccactttcctcaaaaatataatcgtcttctattataccgtcttgacagatcaataaataaggcaagttggtttgctttgtgaccaaaatacaaatgtataattatttataagtgttttaacttagtgtggtttatacctaggaactagataaaaatgaatttcagtctgtgtcactgttgctgaaatgtattcagcgattcctcgtagatggcctgaaagaagatgaacctctgctaattcggcagggactgatcccaaagataagtgtcctattttaattttatatggctttgggtaacttagagaacttaggtggatttagttgtctagttaagtttggtattttctgttcctttgaaatccaatttgaaaagaaattgatatccattcttattgcttctgtctaaccaaaaattaaattcgacatacatttcctgatgtacctgctatagaaggcactttgggagtgcacaggatcgagtcagacacaaccactgcccttgttgagcctatgcagtaattattattttaaattattttagtgaatttgggggaaaatgagtaggagtaggctctagaactattttaatagactttattaacaagattagacctagaaaaatgatcgtcaaaaacttttctttgcccttgtaacacctcactttatccattttctaaaccttggatgaatctgaaaaaacaaatagcagaaacatttttgcttattcaaagttacccaaattatcagcttttattcttttaaaaataataaccaagagataacatggcgagtgcctttataacggcatctggaagtaaagcagaatctgcaacatctcttgctgcagttccgctcttttagtggtgaggtttttgcagcccagaggcaagtttgtttattgacgaggagatgtggggaagaagtagggtggaaggatcatctggctgctaataatgtctttgatttaccccttgagctccagtaccagaagtttattgaggccagattgggccaagatctgtctttgccctttgttactctaaaatgcgtctaattatgaagctaccccctcaggagagaaagcaaactccaggctttcccagactcctctcagggactttaaagtgtttgcagggggaattaaggactgtgtttatgcaaaccgtatatatttcgttctgcatataaccccacttgacctgttgatacgccaacttctgcagataacaggaagcaggggaaaggagataaaaatctcaaaggaaatgaggcagagatgtcctaagtgtaccttggaaccctaagctgaccttttggggtatgaataggacttcttctgcgcagaggggtacctccttggccagttgccatgagagcacacctgaacaaaggggcacgagggcctttattcctgacgcaagtcctgcccctgtaccctttccccattggccggggtcgggtcgtacaatctaattccggttggctaaacatttcctttttttctttttagatagggtgggcatgtaagagaaagtggagaggaaggggaaggggtgtctgtaatgagctagaaagttagtcctcttttcaaataaggaaaggaatgtgagctggtactgataacgcttgctaccgtggcgtgcctgggcatctaacaaaggcaaaaaggagaaaggagaacaaaaggggggggtactatgaattagagaataaaagattgatcagattattcgaagagaaacctcatcatattccacatctcgaactcccaacctcagatgattcccctgcctcggcctcccaaagtgctgggattacaggcgtgagctcccgcgcctggccaactctatacttctaaagacaactgtgtttgcagactgaacacaaagtgtgctcggaagttcttctactacatagaataagaattcctggcacggcggctcacgcctgtaatcccagcactttgggaggttgaggtgggcagatcacctgaggtcaggggttcaagaccagccttgccaacatggtgaaaccctgtctctattaaaaatacaaaaattagctgggcagtggtggcacatgcctgtaatcccagctacttgggaaactgaggcaggagaattgcttaagctggaggttgtggtgagccaagatggtgtcactgcactccagtctgcgtgacagagtgagaccctgtctccaaaacaaaacaagccctacagaaaggaacatctttagtcctgtaccgtaaaatccaggaggattaagcaacttttctgataccatattcctaagaagtcatggctgttgtgtctggcttctgtagtgatacaactgtggggagagctgggatgtctgttagacaatgtgtgaccagggcacataaatgggttcagtgagaacttcctgttcccaagtattgatcagatagtgcagcctttctgccacttctgtatctcctcaaccagtatatttgggagggtgctgggagggtgctgggagtgcgataggctttggagggatagatggagtggtgacaaaaatgtatttaaaaagcatagaattttgagtatgaacatagggagggagaaaatacagccttagcagtgagttctgctgcgtagagggacatttcttttcttgtgctattggagcaaagcttccttcagcaggtggatgattcaatctagtataagtatttgtctgatttgagacaaaagaaaccttacttggaagatagtaatggctttcaaaccttgctgtacattacagtcacctggagagctctcacaaacgttcttaaacctaaaatagaaaactcaggtgggggtgtatcaccagtgattctgattactgggtctgggataggtcccaggcttcagcagtgggggatgtttcctaactccccaggttttcctaatgtacagccaaggttgaaaactggttttatcttcagctgggctgtctcaggttcttggcccaaagtatacagagttttgaaggcctgactcctgcaagagttgttcgtcagaaactcatgtgactgatgtcatgttcagctgataatttctaactatgcatgcggagtttttctaatttttttttttctaagagtgaccagtctcagttaaaatcatgggaaaaataagatggcttttgctttattgaggaaatactgtatattctggagtgggggaggaaaggttgcagaagtttattttaaatcattccaatcccagcagtttaatatgaaattggatatgtattcctataggaaaaaattctctaattagctggaagctttttaacgaaagaaagatacctaggcctgaggcatatttactataatcaagaatacttctgagaactttccaaattctgtgtcttctttgatagtttgttttcagcagattctcagatcgcaagattttttttccacctgtgctggggaggctcacttatctcttttttttttttttttggaggtggggtctcgctctgttccccaggctggagaatagtggtgtgatcacagcacttgctaaagtgttgaccttctggggtcaagtgatcctcatacctcagcctcccaagtagctgggactagaggtgtgcaccaccacacccagctaatttttatattttttgtagagacgaagtttaaccatctttcccaggctggtcttgaactcctggcctcaagtgatccacctgtctcggcctctcaaagtgctgggattacaggcatgagccactgcgcctggcctcatttatctcttaaatgttcctcactagtccctttatatgaatttctgacacggatcctggctgggactcttattttgtgctgatctctgagagcttacttatgacagctctgtagtagtatggcaccatcctgaagtgttctggtgggaggcctcagagccaggcctcattgaaatggaatggaatgggaaaagatctttaagattattttgttgtaatgagaaaattgtcttgtgcaattttattgaataggcagcatttagtcttatgtagttacgttagtgtcctcctgtgtacctagtttcctggtttgaaagaacaacaggaattctgacctcggaaggcctagcctcagacacgtcgctgatttgtgttatagaagatttctttgacactgcattggtaaggatgggatggatgcttcactgagcagatgccattggtaattggcaggaatcttcaagttatttataaaacatggttttctataatatgtaagttttgttaaaagactcacatggctgggcgtgatggttcacacctgtaatcccagcactttgggaggccgaggtgagtggatcacctgaggtcaggagttcgagaccagcctggccaacatggtgaaacccatctctactaaaatacagaaattcgccgggcgtggtggtgggcgcctgtaatttcagctacttgggaggctgaggcaggagaatcgcttgaacctgggaggcggagcttatatagtgagccgagaccacgcgattgtacttcagcctgggaaacaagagtgaaactctgtctcaaaacaaaagactctcgtgttttattattagaatattattaatatgtgatatagtaagaaacatatataaccgatgttaaaaatgagaggtgatttattatcatacaaatatattagtcacctgattgagagtgatatgcacattttaaggaagtgattaaggcccagataggctttctctaaaatgcttttcttctgtaaagtcaatgcctgcctgttagagaaagttaacactaatacattcacattacggtttatcatgctgttttaaaataatatgagctttactttttctttctttttgttagattatttccaggagtagtagtgaaggtaagtatattattggctactaattggctattaatttttcattaatagaatattctggcacagagaaaagaaaaatgatatgtaaaagtaaagtgagtttaaacattttatttggatttattgaccaccttatggtcatcatagtgtcatttggaaatgcatttcattgtagaaaaaagtcttgtatttgtctgagaagcatttttatttcgctgctcctgacatatggctagctctgttcaggtaatggaaagtcacttttgtcattcaaatatgcaaaaatttagctactactgatttaacttggagctgattcagatgcctttctctgtctttcaagagtgtaaaaggtaaaattttagaaactttggaggatagattgattttgttccatttagctcaaattaaaggtaattatgctgggtgtggtggctcacgcctgtattcccagcactttcggaggctgaggagggagaattgattgcatccagaagtttgacaccagcctgggcaacatagtgagacccccatctctacaagaaataaaaaattattggggtgtggtggcctgcacctgtagtcccagctacttgggagggtgaggtgggaggatcacttgagccccagagtttgaggctgcagtgagtcatgatcgtgccactccactccagcctgggtgacagcgtgatcctgtctcaaaaaaaagtaatttgacatttgaattatgataccatggattcaaagatgcacttaaatatttaaacattttggaaattggagccatcttgatatgtcatttttctatgttacatgtttttagttttcttctgaaaggctgtcattaattgacactacattctgcaatggatggtatctggtagttgaggaaattcagtaccagaagcttaagcatgccctgtgcttggttgactttaaaacttggttgacttggttggtcctcataattcaagtcagtggttccaaacattttcaagtcaaagttttatgatcatcacaatgacagttgctgtctttaaaactggttgataaaatgcacagtggtaaactactttgatttttgtaacattttaaaataaacttgctttgtattaatcccaacaatatgtatatactgcatatttgaaaaacagtgcagatgtgagctatatattcactctacggtcattgcttggtgcatttatggattcacataatgctataatgactttcattgcccctggtagaggaaacactgttctagatgactgtgttagtccaattaggctgccatgacaaaatgccatcaattgggaggctaagccaacagacatttatctctggaggctgggattaagagattagggtaccagcatggttggattctggtgatggcctctttctggcttcttgctgtatgcctacatggtgggcagagacctggcttcttgctgtgtggctacaaagtggacagagagccagagccagagctctttctttttcttttcttttctttttttttttttgagacagagtctcacactgttggctcagacgagtgcagtggcacgttctcagctcactgcaacctctgcctcccgggttcaagcaattctcctgcctcagcctcctgggtagctagcattacaagcgtgtgccaccacgcctggctaatttttgtatttttagtagagatggggtttcactattttggccaggctggttttgaactcctgaccccaggtgatccacccacctcggcctcccaaagtgctgggattacaggcatgagccatcgcgcctagacggagccagagctcttataagggcactcatcccatcatgaggatcccacactcgtgacctcatctgaacttcccttaccaaaggctgcatctcaaataccacactgagggttaaggctccaacatatgaatttcggggggggacacagtcccatctatagcaacgacagtttgtgcttggagcccactctggtcaccttagcggggctggcctctctgaagtgacaggttttcacatgtggcctttgacagttgtcttgtgcgagctttatgcccaggctctgcagagctactgtctaatccctctctccgaagtagaaagatgttttcactgaatttcttctcacctccttctgcaattgacacaattaatcactccttcctttttgttctgaaacttacgtcttcttacttatttttatgattcttttgtttgtgttctgctatatggattatgactttctttcaatcacagtttatccctctctagtgatttgaatggcttatgtcctacttttattttaccggtagttacccttaatttaattactaacatcaaaaaatgatggtaccttatttcttcttctttgtatatgacaacaagtttaatgtgttaaagaaatgtaagagtattaggctgtgagagggacatggtcagagcttttcatcgtttgaagatgtctttctggcttttatacaatattactctcactttgcagtctttgccccttacaatcctgttgcattatcttctgatattaagggttgaaagcgtgtttattttacatggttcttggtgacttattttgaatccaaatcttactttagctcaggaaaatttgttctttgatacttttattacagcagagtttctcaattttggcaatatagatattttgaactgggtaattctttgtcgtgggtgctgtcctgcgcatcagagggtgtttggcggcatccttggcctctaccctctagatgccaacagcatccatccccacgtcatgacaaccaaaaacatctccagacattgctaagtgtcccctgtggggcaaaatcatctctagtcaacaactgctgaggtagagtgctttgggtgtatttaacagagtatctagttcaaataggcttaaatgataaagacaacttactggctcaagggactgaaaagtctagaggtgggcagtttggaaatagcgtggctccgccccatttctctgcagcccaaaatttcagttctgcctttctcagagtctagtctttgctctcaatgtggtttccttgttggttgcaaccagaactttgtgcttcctggttcacatctggggagaaagtttcactttcctcaaccagcaaatgaaagccctagctttgctctgattggatgccctgccctccagatgaaccagtcactatgaaaggataaatgggccacctctgcctagtttaagccagtctagatttacccctggaactgatcggtctcacccaaatagcacaattgctccgtaacagaggagtggggaaggatggtggggaggccaccaaaaagtccattacagttactttctgttccctctttgtaagattatctgtcacatctttgtttttatcttcatatgcatcttttcctcgctcactttcccccctgcattttgacagcagttctcaagttcttcttagaagaagaattacctggcttgaaatatcaatattgccaaagttgaaaaagtctgctgtaataaaagtatcagagaattaattttcctgagctaaagtaagatttggtttcaaaaaagtcaccaagaaccatggaaaataaacgcgtgtatgcgtgtgtgcacatgctcacaacccttaataccagaagacaatgcaacaggattgtaagaggcacagcctgcaaagtgggttatattgtagaaaagccagaacgacatccttagtgaaaagctctgaccgtgtgtaggagtcattttcttactcttccaaacataaatttgatgctttgaaattatactttcagggaaaattcagatgttggattccttcctacttagcttaggattcctggtgacagaaaagactgtaaatcatttgcttcaacaggaggtgagttgcaagtaacaaaacaggtaatagtggttccagaaacctaaaagaagatcgtacataggtctctgttttctttcttctccatgaatgtcttctcaattccaaaaagggcttgaagacttttaactgcattttgcacgctgtccctcgagaagagagaaaaaaattccctttgtcagaaggcatgtgtcatcttatgtaagtgactttgtataagttacgtgctgtagtaagggtaaaatctctcatgagtgtatggcttcagtctgtgttctacttagacctgattatgtcctttctctcttgggtaaatgctttgtgcacctattatgtgtcaggcactatgctaggtgataaagacgggctgaggtaaaaagaagacattgtgcccaggcgccgtagatcacgcctgtaatcccagcactttggggggccaaggcgggcagatcatgaggtcaggagatcgagaccatcctggctaatatggcaaaaccccatctcggccaggcgtggtggctcacgcctgtaatcccagcgctttgggaggccaaggcgggtggatcacgaggtcaggagatcgagaccatcctggctaacacagtgaaaccctgtctccactaaaaatacaaaaaattagccggctgtggtggtgggcacctgtagtcccagctactcaggaggctgaggcaggagaatggcgtgaacctgggaggtggagcttgcagtgagccgagatcgcgccactgtgctccagcctgagggtgacagagtgagactctgtcttaaaataataataataaaaaaagaaactctatctctactaaaaatacaaaaaattagctgggcttggtggcacacacctatagtcccagctattcaggaggttgaggcaggagaatcgcttgaacccaggaggcggaggttgcagtgagctgagattgcaccactgcactccagcctgggtgatagagcgagactctgtctcaaaaaaataaaaataaataaaaataaaaaaataaaaaagacattcctagatttttcctttttaataattataatttttttttctttttgcttcaacgttgtgaggcaaaatgttttctcaggctatattttttcattgtgaatgtgaactaaattagtgactcatgggagaatgttaagagtacagacggtagagcctgcgtggcttcaaatcctagttttgccacttttgccagctgtctatgagcacagctctaacttcatcacacctcagtttgtttgcctgtaaaatggagtcaaagtaatactacttgatagttattgtaaaggttaaatcaagcaatccatgtaaagtgattagcacattatctgctaaagaggaagtgccccaaggtttccagtagctacactaatggggcatggaattttgattgcttttcaagtgatggattttttgtttgttggtgacccaaagtcattgttgcgtaattcttgggacatgagatttggaggtaaggttgtaatgtgtgaccatacaaacaacaaaaccagcaccgtgttttgaagttggaacctgaacccacgactgcgctaacaaccagccagcgcggaggacatcatggtggcacattatttgcgtggtgtgtggccacagtgtagggcctgaaatgggtgatttgtgagcatgaaactcactgctgtcgtgtttgtccatttagtctttgcaggatatagtttttacacagaatttttcctaaacaaatttttatttaatacgttagtgaaatcactactcttagtggtgtatttagatttggagagcagctgatctcatgttttctcctaagttttcaaactaatctttgaacacactaccttattgtctgtgtgttctagaaagtctggaatgttctggacttcaaaggtaaaacctgcaagtataaaattaagcagaattaatttcgctcagtggtactgttttctggtttctatttaatagtaacaagtcgagctgcttcttacaagagactgaactatcacaaggtttctcaacaaatctgttctttaaaatgggagttatttcaggcattaaaagatcgactcggccgggcatggtggctcacacctgtaatcccagcactttgggaggctgaggctaaggtgggcggatcacttgaggtcaggagttcgagaccagcctgaccaacatggtgaagccccgtctctcttaaaaatacaaaacattagctgggtgtggcgggcacctgtaatcccagctacttgggaggctgaggcaggagaattgcttgaccctgggaggcagagtgcattgcagtgagtcgagatcgtgccactgcactccagcctgggtgacagagccagacttggtctcaaaaaaaaaaaaaaaaaaaaaaaagaagaagatcgactcacacttgttagcatttatttgaaattctgagtgaatatacaattcaggagtctgcattagttacaataatgtaataacttaattctattacatctctaaattattattattattaccattttttttttgagtcggagtttcactcttgttgcccaggctggagtgcaatggcacgctctcggctcactgcaacctccgcctcccgggttcaagagattctcctgcctcagcctcccgagtagctgggaatacaggcatgtgctgccacacctggctagttttgtgtttttagtagagatggggtttctccatgttggtcaggctggtctcgaactccgaacctcaggtgatctgcccgtctcggcctcccaaactgctgggattacaggcgtgagccactgtgcccagcctagattagtttttaaaatcagatcaagcagctcataggaaagaatcactgtcgtatcatttcctgcaagtatcaaactgtgtaaaaggacatacgccctcacaggttggtgcggtgattataaaactccagaattaatctgatgaacccttagagatcatcaaattgaattcactttacaagagggaaaacagaacctcagagtgtatatagtagttctagcatcttaaaaaataacatctagatcattaatatataaacttgagaaggtttttccataaatatgtgttggcattaaggaaattttgatgctgaatttgaaatagtttcagaaacatatactttggttttaaagtttaatgctagtgtagtaaagttttacctcttgatgttcacttcagttaaatgtgatttatctaaatgtttcaggaaagaccttgcaaggacactcttgactgtgggtggtaagaaattttagaattttcagtattagaatattaaatattggacactgggggttttatgagcatcttgggactatggggaataaattatggttaaattgaagataggaatcagggttttattttaaatttattttgagagattttagcatgctggaaactgtaaagaataattcgtgagtactcatttactcaccagccagctttgtcacaatttagcattttaccgcattagcttcaagtctgtttttaaagaaaaaaaaaacagtgtcatggataaagtcccctgtgtccatgttcctcatcccatttccctctccttgactcagatttgtttttcgttcccaagcatatttttctacttttactctgtacatccctaaacaacatgcattatcattttgcagattttaaaagcattctataaatgccattcctttttacccttagaattgtttgaaatttaaacatgttgctacatgtagttttagtttatttgctgtgaaatactacaagttattttgggattttattttgtagtagaaactttttttttttttttgatggagttttgcccttgttggccaggctggagtgcaatggcgcgatctcggctcactgcagcctccgcctcccgttttcaagcgactctcctgcctcagcctcccgagtagctgggattacaggcacgcaccgccacacctggctaatttttgtatttttagtagagacggggatttcaccatgttggccaggctggtctcgaactcctgacctccggtgatcctcctgcctcggcctcccaaagtgctgggattacaggcatgagccaccacgcctggccagtagaaacatttttaaggctgtttgatgatttggtttgaatgagtattttaatatatttaaaatataacacccataaatattatttatttaaaaattgttatatgccaacctcttgtttagatttttattgtatttcttaaatactcaatttaaatgattttggctaggcatggtggctcatgcctacaattccggcactttgggaggccgaggtgggcagattgcttgaacccagaagttcaagaccagcctggccaacatggcaaaaccttatctctactaaaaacataaagattaggtaggcatgatgacacatgcctgtaatcccagcttcttgggaggctgaggcaggagaatcacttgacccaggaggcaaaggttgcagtgagtcgagattgggccactgcactccagccaccactgcactccagggtgacagagtgagacaatctcaaaaaaaaaaaaatagaatttaaatgattctaattactccaggatgcattttgctgtggtaactttttaagacacaatgctaggcttctcagatggagtttcttagagcaagtgctaaatctggaactcattttttcttttgctttgtgcccagaattatctatgtctactatgtttttaatctctagattatgaccagcaggttgctatttctgaagcgctgtgtagactgacgattaaaaaatcaagggatgaacttgtccataaatggtttgatgatgaagtcattgctgaagctttcaaagaaattaaggatcgagaatttgagacggtgagattcctggccatgcgaatttcttattagccaatatttattaagcatccgctgagaactttcctgtgcattgggcttacgggaggatttttttgcttaagtgtgattacactgccattcttgaacttgtttctcacttaggagaaacaatttgagggtaatatgaacagaatatttgtgagctagatatagggatacagataggttttttttttttttttttgacagagtctcactcttgcccaggctggagtatagtggcgcaatctcagctcactgcaacctctgcctcctgggttcaagtgattctcctgcctcagcatcccaagtagctgggattataggcacctgccaccacacctggctaattttttatttttagtagagaccaggtttagccatgttggccagtcttatcttgaactcctgacctcaggtgatccgcccaccttggcctcccaaagtgctggaattataggcatgagccaccatgtctgtctaggacttctttataggagacagaactaggtgaatttgatggatccagttaaaaaaaaagtcttggaagggtgagcaattttcaatgaaccttgaatggtaggaagaattgaagaagaaatcagagcatttttgccttgcagaaggcagctgctgtgatggcaggaggctgaaatggacatggcctggcagaagagtattatggggtggttgtgttgtgagccatctggcctgtacaatttggagaaacaatacttttttttttcttctctgcaagctgggcttcctgtgattgtgtcctcaggctgcacaaaaatagcgtatggctttgctgtgtattcaccttcatcttaaaatagctagaacattttccctcttcttttaaaaagtttttaaaatgagggttagactcttgtaggaaaaggtagaattcttaataacagtactcatgttgacaaacctttctcgtcaaaattcctatgtaatcaagactcttatgaaatatggacctttatatttcctcagactctgagcctactgtcatatactgcataaagtaattctttagccaggattcagtataatctcagtggaaagaccatgagctttggggctatcccaaactgggttgaacctagagtttgagccccacctctccaatttatgggatgtatgcattttggcaaggtagttgacttgtgaagcctgagtgacctcatctgtaaaatgggactaaagcccacctcaaagtcttgagaactcagtgagagaaactgaaaggtccagggctgttgtaggcgctcacgtgttaatttcctttctgctctttgtcatttctcatttgcaggaaaatttgatgaaaatagagaaatgtaattatcttgtttccaaaatcatttccttccccagagctatcaacttctcaattgaatttttttttttttttttttttttttgagacagagtttctttcggtcttgttggtcagactggagtgcagtggcatgatctcggctcactgcaacccccgcctcctgggtgcaagcaattctcctgccttatcctcccgagtagctgggattacaggcgtgtgccaccactcccggctaattttgtatttttagtagagacggggtttctccatgttggtcaggctggtctccaattcccaacctcaggtgatctgcccgcctcggcctcccaaagtgctgggattacaggcgagagccaccacgtccggcccgaattgcttttttgcatgaaaggcttacactgctgaggtctatttactcctgaatggtagatcaggagcataaggagtgttgactgcaacagtcaattcttgctaacaaaagggaacaaaaacttggatctgtctctttgtttttagaatgttggggggcagcagatttcttcctgagagctgttggttaggagaactctaataatagtctttgttcttagaacatatgctaggagaagacagtgagatagagaactcccaaaaaggaaagttggccgtagataatacacccagatcacagttaatacattttgtaggtttgtggttggttagtgctgtgcaggtgttagggaggtggatgcccaatgggtcggtcaaatattgtaacctaggtcatcagtaagacgtatttatcttgcttacacttctgacccagtgaaacataaccaggcatttaacttttggagacctaagtattcctcagctgaaaatctaatggctgcagggagcaaaggttccttctggaaacatgatcctggagcctcctctttgtggcatgaagtattgttaacatataataacaaatccttgtaaagcctcattgatgttactgcctcctggtcatttagaagcaaacactggcctctgtatgctaaggtagtattaactaagacatcttgatttttttttaataaaagtttatatcatttgctttgaaggacagtagacgttttctcaatcacctaaacaacagacttggtgaccaaagaaggtaagttgtgtctctgagcattattgactagttgtattctgaaaatgtctaatattttaaaagaacagtttagggtctgtttcattttaggagagaatattgggtacatcatttacagagtatactgagttgtccattgagtggaaacctgagaagatcagaccctttctgcctagtggcttgttcgagtgtgtttaaaaattacctctatcagttttattatatttgtgacttggggtattttaaaataatacattctttaaagagttcatagactttatgaagaacaatttcctgacttgaggttgctggaggtagttgtatcgtgaacagttaagtccttggtcagacaatatttgctaaattcactccttttgtttgggaatctggctgagtaactgggttgagatatagtactagtaaacctggcttactgactgccagatggagatttgaaatctacccatagtaggtctccatttgcaggcttgaaaccccctattgtactctgtacgaggagacttaatggcatactctagttataagtgcttgttgcggaacgtctgtagatgtgtttaagattcattcatgttttatttttttaattgtgaggtattttgcagggtgtattcatttccgtgtattgctgcttttgctgatgagcatgaggtatgttcatccctcttggaggtcctgagggcggtgtgcagtgaaaccaggagttaggtttacgtggttagatcaaacttttgctctcataactcaaaagggctttttaaaaaaggatgccaacgtcttctaatgacctcagttctcaaaccgatcataccataccctaaccagaatgcgttaccagtaagtttaaggcctctactgttactactggaaaaaggaattttagggtctgtactgtgtacatgagcacagttacaggaagcttgcctcattttaccctattcatgggtaacataattcatgcctagactggggtaaaaaggatgatttccttgcttctttccttccggtttatgccctgtcctcttattctcaacaactggggccactgtcctttctctctctctcattctaccttgcactttatagtccaaggttgaccagtttcttccccaccccccatttggtttctagaggaacaaggtccttcatataaaagggccctaacctacagcatctcagtttcaggctaaaatatttagaggtcttggaagcttgactttgtttgagtgtcctgaaccctgtcttcagaatgtcctcattcatgatttctttgttttgggttcagagtccccttcttggcctctcagagctaaactttcagctcatggctacactacacattccttctctctagaactgagtctggtaggctgattcttgtgtctcaattctgtgtattttccctttggttgtctgaagattctgctctctgtttggtttttcttctttctatgacatccaaatttccattcacttccatcagggcccttaccctgacccttacattggcttccaggaacatgtattgtgggtgaaagccctcattcacctctgtagctattaaaaggtagacatgtatgatacaaaggaaagatgtccaagaaatacaacttattggaaagttggattgtagaatagtaagtctagtgttttatctgttgttggggaataaaagctttttttttttttttttttttttttgagacggagtctcactctgttgcccaggctggagtgccatcatgtgatctcggatcactgccaactccgcctcccgggttcatgccattctcctgcctcagcctcccgagtatacttgttgatacatgtctagaaaacatctgggaggaaacaaaggcattgttaatggtgcctatggaaaggtacttatgaaaaactgaggggcagagaagatgtttactgtttctataaacaccatactgttagaatctttcttcccctgttttaactctaagcatctatttattttagaataattaaaatgaaggaaatttgaagtcttcaagtcttagctgtactctaatggttggaagatagatggcaaatcactcatgtttggttacagtatctccttctccagaagtttccatccatatgcagtgtggcttgttactgattcaacatagaactgttttctccgtgattttcattagaaaaaaaattgtgtggatagaataatgtgacacatttaaatatctatcaaatatgctaaggatagtgggatttttggaggggtgaggaggaaatggctgagttctataaaattgagatccttctgttttgcacaaaagagtcagtcaatagaggccctataatgctaggataatgctgttccaggaagagcacaaattctattttcaagggaataatgtttatctgaccctatagcatgatttttatgtgtataagtcatgctgaaatgatctcttacagatgagaaaaccagcggatgaaaaattagagaaattttggatcgacttcaacctaggaagtcagagtgtcactttttatatagacaatgctgaggtaatgatgttcgattcttggttagaactaagcctttagagatcttttttatgtaagtatgtgttttgcactcatgaatttcacttatttattttcccaagaatactctatgggactcagtgacacttccgaaggaagcggtgatgaatttcagcataacaggtaatatgatacatttaaacaacccacgtccagttccaaatattatttctgttgtatatgcagtgtgtatttatttaattctagggcatattttgaccatgccttgaggtaggaaggctgtatggtatgatagaaggtgcgctgtcacaggtttgtgacttctatgctttgtgaccttgggattaaattatttgtctagttttttcattttaaaaatgtttatagatcctcacaaaattaaaagtagaactaccatatgatccagcaatcaattaacaatgcttttccccaaagtgctgctttggtttgaaagagtctgatggggagaggagaacatgtcatcctagttcctctcttgataaacctagaaaatcaggtagtaaactgtggttagtaaggaagacatctagcaagaaaggacatggctgtcaggaaatgaaggtgcctgccccctctacggagatggattgccaggctctcttgtaactagtagttaggatcaagggctttgcagatcagagattttgatttgcattcccctgatcattagtgatgttgagcattttttcgtgttttctggccatttgtatatcttttgagaattgtctattcatgtccttaccccacttttggatgggattttttttttcttgctgaattgtttgagttcgttgtaaattctggatattagtcctttgtcagatgtatagattgtgaaggttttctccactctgtgggttgtctgtttactctgctgactgttccttttgccacgcaaaagatctttagtttaattaagtcccagctatttatctttgtttttattgcatttgcttttggttttttggtcatgaaatccttgcctaagccaatgtctagaagggtttttccaatgttatcttctagaatttttttttttttgaagtggagttttgctcttgttgcccaggctggagtgcaatggcgcgatcttggctcaccacaaactctgcctcccaggttcaagcaattcttgtgctttggcctcctgagttgctgggatgacaggcatgtgccaccatgcctggctaattttttgtatttttaatagagatggggtttctccctgttggtcaggctggtcttgaactcctgatttcaggtgatccgtccaccttggcctcccaaagtgctgggattacatgtgtgagccaccgtgcccattcttctagaatttttatagtttcaggtcttagatttaagtccttcatccgtcttgagttgatttttgtataaggagagggaggaggatccagtttcattctcctacatgtggcttgctaattatcccagcaccatttgttgaaaaggatatcctttccctacttttatgtttttgtttgctgtatgtatttgggtttatttctgggttctctattctgttccattggtctatgtgcctatttttataccagtaccatgctgttttcatgactatggccttgtagtatagtttgaagtccggtaatttgatgcctccagatttgttctttttgcttagtcttgctttggctacgtgggctctttttggttccatacaaatttttggattgttttttctaattctgtgaagaatgatggtgatattttactgggaattgtattgaatgtgtagattgcttttggcagtgtgatcattttcattgattttacccatccatgagcatgggatgtgtttccatttgtttgtgtcgtctatgatttctttcagcagtgttttgtagttttccttgtagagatctttcacctccttggttaggtatatccctaagtttttttttttttttttttttggagatggagtcttactctgtcacccaggctggagtgagtacagtggtgtgatctcaactcactgcaacctctgcctcctgggttcaagcgattctcctgcctcagcctcctgagtagctgggattacaggtgcccaccaccacacccagctaattttgtatttttagtagagactgggtttcaccatgttagccaggccgatcatgaactcctgacctcaggtgatccgcccaactcagcctcccaaagttctgggattacaggcgtgaaccaccgcacctggcccatccctaagttattttattttgttttttgcatctatggtaaaaggggttgagttcttgatttgattctcagcttggttgctgttggtgtatagaagagctaccgatttgtgtacattaattttatatctggaaactttgctgaattcttttatcagttcaaggagctttctggaggaatctttagagttttctaggtatacaatcattatcatcagcaaacagagacagtttgacttcctctttaccaatttggatgccctttatttctgtctcttgtctgattgctctggctaggacttccgatactatgttgaagaggagtggtgagagtgggcatccttgtcctgttccagttctcagatggaatgctttcaactcttccccattcggtattatgttggctatgggtttgtcatagatggcttttattacattgaggtatgtcccttgtatgccgattttgctgagagttttaatcataaagggatgctggattttgtcgaatgctttttctgcatctattcagatgatcatgtgatttttgtttttaattctgtttttgtggtgtatcacatttattgacttgtgcatattaaaccattcctgcatccctggtatgaaacccacctgatgatggtggattatctttttgatatgtcgttggattcggttagctagtatttgttaagaattttagcatctatgttcatcagggatattggtctgtagttttcttttttggtaatgtcccttcctgcttttggtattagggtgatactggcttcatagaatgatttagggagggttccctttttctctatcttgtggaataatgtcagtaggattggcaccaattcttctctgactgtctggtagaattctgctgtgaatctgtctggtcctggactttttggtgttggtaatttttaaattacaatttcaatctcactgcttgttattggtctattcagggtatctgattcttcctgatttaagctaggagggttgtatctttccagaaatttatccatctcttctaggttttctagtttatgtgtgtaatggtgttcatagaagccttaaatgatcttttgtatttcagtggtgtcagttgtaatatctcctgtttcatttcttactgagtttatttggattttctctcttcttttcttggttagtcttactcatggtctatcagttttatttatcttttcaaagaaccagctttttgtttcatttatcttttgtattgttttgtttcaatttcatctagttctggtctgatgttggttatttcttttcttctacggggtttgagtttggtttgttcttatttctctagttccttgaggtgtgaccttagattgtctgtttgtgctctttcagactttttgatgtaggtgtttagggctgtgaactttcctcttagcattgcctttgctgtatctcagaggttttgataggttgtgtcactgttgtcactcagttcaaagaatttttaaatttccatcttgatttcatttttgacccaatgatcattcagtagcaggttatttaatttccatgtatttgcatggttttgaaggttccttttggagttgatttccagttttattccactatggtctgagagagtgcttgatataatttcaactttctagccgaggcgtggtggctcacgcctgtaatcccggcactttgggaggccagggtgggcagatcacctgaggtcaggagttcaagaccagcctggtcaacatggtgaaaccctgtctctactaaaaatacaaaaaaattagccgggcatggtggcgcatgcctgtaatgccagctacttgggaggctgaggcaggaaaatcgcttgaacctgggaggtggaggttgcagtgaaccaagattgcactactgcactccagcctgggtgacagagcaagactccatttcaaaaaataaaataatcatcataataatttcagttttcttaaatttattgaggcttgttttgtggtcttctcatatggtctatcttggagaaagttccaggcacctgttgaatagaacgtatattctgcggttgttggatggaatgttctgtatgtatctgttaagttcatttgttccagggtgtagtttaaatccattgtttctttgttgactttctgtcttgatgacctgtttagtgctgtcagtggagtattgaagtcccccacgattatcgtgttgctgtctatctcatttcttaagtctattagtaattgttttataaattttggaactccagtgttaggtgcatatatgtttaggattgtgatatttttctgttggacaaggccttttatcattacataatgtccctctttgtcttttttaactgctgtttctttaaagtttgttttgtctgatatgagaataactactcctgctcgcttttggtgtccttttgcatgaaatgtctttttccacgcctttaccttaagtttatgtgagtccttatgtgttaggtgagtctcttgaagacagcagatggttggtgaattcttattcattctgcaattctgtatctcttaagtggagcatttaggccatttacattcaatgttagtattgagatgtgaggtaccattccattcatcatgctacttcttgcttatatgccttgggttttgtttgtaatattgtatttttgttttataggtcctgtgtgatttatgccttaaagaggttctgttttgatgtgtttccaggattcaagatttagagctccttttagcagttcttgtagtggtggcttggtagtggcaaattctctcagcatttatttgtctgaaaaaggctgtatctttccttcatatgtgaagcttattttctctggatactaaattcttggctgataattgttttgtttgaggaggctgaagatagggccccaatcccttctagcttgtaggatttctgctgagaaatctgctgttaatctggtaggtttcctttataggttacctggtgcttttgtctcactgctctcaagattctttcctttgttgggaggttgaggctggagagtggtgtgaacccaggaggaggagtttgcagtgagccgagatcgcgccaccttactccagcctggacgacagagcgagactccatctcaaaaaaaaaaaaaaaaagaaaaggaaagaaaacctgatgacaatgtgcctcgccaatgatctttttgtgatgaatttcccgagtgttctttgtgcttcttgtatttggatgtcttggtctctagcaaagctggggaagttttccttgattattcccccaaatatattttccaaactttcgtatttctcttctttctcgggagtgccaattattctcacatttggtcgtttaacatcatcccagacttcttggagactttgttcgtattttcttattcttttttctttgtctttgttgtattgggtgaattcgaagaccttgtcttcgggctctgactttttttttcttttctttttttgagacagagtctcgctctgttgccaggctggagtgcaatggtgtgatctcagctcactgcaacctccgcctcctgggttcaagtgattctcatgcctcagcctcccgagtagctgggattacaggcacgtgccaccatacccagctaatttttgtatttttagtagagacgggtttcaccatgttggccaggatggtctcaatctcctgacctcgtgatccgcccaccttggcctcccaaagtgctgggattacaggcgtgagctaccatgcccggctgactttctttcttccacttgttcgattctattgctgagactttccagagcattttgcatttctgtaagttgtccattgtttcctgaaattttgattgttttttatttatgccatctatttcattgaatagttctcctttcacttcttgtatgatttttttatttccttacattgggcttcacctttctctggtgcctccctgattagcttaataactaacctcctgaattctttttcaggtacatcagggatttcttcttggtttggatccattgctggtgagctagtatgatttttggagggtgttaaagaaccttattttgtcatagtactagagttggttttctggttctttctcatttgggtaggctctgtcagagggaaggtctggggctgaaggctgttgttcagattcttttgtcccatggggtgtgcccttgatgtagtactctccctcttttcctatggttgtggcttcctgagagccgagccgtagggactattatctctcttcaggatctagccacccagcaagtctactaggctccgggctggtactgggggttgtctgtacagagtcctgtgatgtgaactgtctatgggtctctcagccatggataccagcacctgttctgatggaggtggcagtggggtgaaatggactctgtgatggttcttaactttggtagtttaatgctctgtttttgtgctggttggccttctgccggtaggtggtgatttccagagagcatcagctatggtagtgtagggaggaacaggcggtgggtggggccctagaactcccaagagtatattcccttagtcttcagttaccaggataggtagggaaggatcattgggtgggggcaggattaggagtgtctgaactcagactctccttgggtgggtcttgctgtggctgctgtggggatatgggtgaggttcccaggtcaatggagttatgttcctaggaggattatggctgtctctgctgagtcatgcaggttgtcagggaaatggggaaaagtcagcagtcacaggcctcacccagctcccatgcaatccaaagggccggtctcactcccacggtaccccccaccctcaaaaccaccaagtctgtttgcaggcaatgggtgagcaagaaagcaggggattttaaaggggacttggcatgaatggcatgtaagggagagagtgaggaagtgtggggtcttcatgacttgctttgatgtcttatccatcaggtggtctggctggtgccatcgtgggcagaactaggttgtacattgactgttgtctcaaggcaatctcctggtggggagaatctcagggggtgcctggtttggttcaacgtttgttccttagaatttctttttgttttgtttggtttggtttggtttggttttgagactctcactgtgtcacccaggctggagtgcagtggcgtgatcttggctcactgcaacctctgcctcctgtgttcaaacgattctcctgcctcagcctcctgagtagctgggattacaggcctataccaccatacccagctaatttttgtattttagtagagatggggttttgccatgttggccaggctggtctcgaactcctgacctcaagtgatccaacagcctcgccctcccaaagtgctgagattacaggcgtgagacaccgtgcctggcctccttagaatttctaagcaaacatatagttagatgagcttgcagcacagagagtgcctcatgggaagaaggtaaatgttataattgcgttcctttttttattttcttcaacttttattttaagttcatgggtacatgtgcaggatgtacaggtttgttacataggtaaacctacacaggtttgttacaggtttgttacataggtaacttttaagttaatgggtacatgtgcgggatgtacaggtttgttacatactctctgcaggacagagagtgcctcatggaaagaaggtaaatgttataattgcgttcctttttttttttcttcaacttttaagttcatgggtacatgtgcaggatgtacaggtttgttacataggtgcaggatgtacaggtttgttacataggtacatgtgcaggatgtacaggtttgttacatgtgccatagtggtttgctgcacagatcatcccatcacctaagtgttaagcccagcatccattagttgttcttcctgatgttctcccccaacatacccaggccccagtatgtgttccccgcaatgtgtccatgtgttctcatcattcagctcccacttataagtgagaacatgcggtgtttggttttctgttcctgtgttagtttgctgtggatgatggcttcaagctccatccatgtccctgcaaaggacatgatctcattttttttatggctgcatagtattccaaggtgtgtatgtaccacattttctttatccagtctatcattgatgggaatttagattgattccatgtctttgctattgtgaatagtgctgcaatgaacataggtgtgcatgtatttttataatagaatgatttatattcctttaggcatatacccagtaatgggattgctgggtcaaatggtatttctttctctaggtctttgaggaatcaccacactgccttccacaatggttgaactaatttacgctcccaccaacagtgtaaagtcttcctttttctccgcaaccttgccagcatctgttgtttgactttttaataatagccattctgactggcatgagatggtatctcattgtggttttgatttgcatttctctgatgatcagtgatgttgaggtttttttcatacgtttgttggctgcatgaatatcttcttttgagaagtgtctgtttatgtcctttgaccacctttttttttttttgagatggagtctcgctctgtcgcccaggctgaagtgcagtggcgcgatcttggctcactgcaagctccgcctcctgggttcatgccattcttctgcctcagcctcccgagtagctgggactacaggcgcccgccaccacacctggctaattttttgtattttttagtaaagacggggtttcaccgtgttagccaggatggtctcggtctcctgacctcgtgatctgcccgcctcggcctcccaaagtgctggattacaggcgtgagccaacatgcctggccgaccactttttaatgttttttgtttgtttgtttgtttgtttttcataattgcattcctaaagagctaagtaagaggtgggggaaaaggaaaaaggtaaaaataattcattattttctttaagaatgtgggtgctcagttaacagctttcaggagtcaacttgccaaagttaatattttgtaacttcatgaatagatcacgtttctgtggttcatggtttttaatttacaaagtgcctcacaatttctacaggaagtaggtattactctttccattcttatagccaaagaaactgatgattgtctagtaaattccgtaagtaagacttttgttctgtatcatagcccttctggttatggagttggcagtgtagtatgttggaagcttgatgtagccctcatggtatttcttctgacccttgtatatgtttgcattgatcccacggcccagttagctagttacttttttttttttttttttgagacgaagtctcactctgtcgtccaggctggagtgcagtggtgcgatctcagctcactgcaagctcctcctcccgggttcacgccattcttctgcctcaacatcccgagtagctgggactacaggcgcccgccaccatgccgggctaacaattagctagttactttttaagatatttaagattacttttgttgcatggttttatagactttccctggagtgatgagtaaaatgtccggcaagattagtattttggggagatcatggaggcttactctagaccagcactgtcctatagaaatatgaggtgagccagatacttaatttaaaattttctagtagtcacattaaagaaaaaagtagattaatttgagtagattaaaaaagtagattaagtagattaattttattaatatattttgtttaacccagaatattatatcctggaataataatatccagaatattattttaacatgtaatcaatattttaaaattattaatgatacattttacattcttcttttgtgtactgagtcttcataatccgatgcgtattttgtgcttacagagcatctcggttagtactaggcatgctttcagtactctgatgagttggacctcacagatttagactcatgtatgtttccctcttttttccccttgtttcccgtctcattaatttgtggccattagctttgcctgttctttcctggactttgctgccttttctattctccttcttccgacttaccttgtacttaatgtggtgtattcttggcctctttgtgaatttggtctaagccattttctcttgtaagcccgattacaatttgtcaggaaagggctggtgacctgggaggaggctgcaaggaggctattgtctgaaacacacactttttttttttttttttttttttgagatggaggcttgctctgtcacccaggctggagtgcagtggcatgatctcggctcattgcaacctccgcttagcgggttcaagcaattctcctgcctcagcctcctgagtagctgggattacaggggtgcaccaccacgcccagctaatttttgtattttcagtagagatagggtttcagtgtgttggtcaggctggtttcaaactcctgacttcgtgatgcacccgcctcggcctcccaaagtgctgggagacgcagacttctttctttttctttttctttttttttttttttcttgagacggagtctagctctctcctccaggctggagtgcagtggcacgatctcggctcactgcaagctccgcctcctgggttcacgccattctcccgcctcagcctcccgaatagctgggactagaagcacccaccaccacgcccggctaatttttttgtatttttagcagagacagggtttcaccgtgttagccaggatggtctccatctcctgacctcgtgatccacccgcctcggcctcccaaagtgctgggattacaggcgtgagccaccacgcctggcctacagaattttttctaaggtgtttccgtctcttcttcaagtggagtccattgaaatggtggtagattattccattttgcacattggggacagtgagttttattttcaattttagaaataagtagaatttcagagagagagagagtgaatattgtgcatagtatatttgggaataaaatacctgttgcagatgatagccttgtataaacaaaatgctcttaaaaaaactgaattgcagaagacaaaactatcttcatttctttgctgctaaggtaagttacttccaatgtttgcaagatcaaccacttaattgtgttgtatgtgtatatgtgtaaatacatgtgcatctaaaggacaatttcaaagtaatgttatttaatatgatttcttttcaacttcttaacacagaaaaatctggacaaataccctagcgtagttatttaaaatgataaaattttaaaataaaacattgaagtatgttgctatgcattgatattccatattttctcttagaaacggagaagataaagatatttatcatttacctgaagaagcccatgattatcagctacaaagaagtcatgaaaatagaaatccattttgatttgcagttcaacatatcacaagtttccattcaagctttaggagaagacaaacaggtggcaggtttcattcttttggattatttaaaaatgttttagtatgtttcatgtctattaaatgtccttgttgggttttgatgtgaatatttgataaagcagaaaacctggtctttcaaatgccatgtaaaaaagagttgagagttctggatttaaatcccagttttcccttttgatgggtcattgtcttgaggtaggatagaaagcctctttgttccttgaaatgctttactctactaactgtgaacagctgaaaggttttctaggataatatcaccctgttaccaccttcttcctggagtcctgaggacactggcatttctgtctctctcagctccccctggacctagggggagtgtattagtctgttctcacgctgctaataaagacataccagagactgggtaatttataaaggaaagaggtttaatggactcacagttcaacatggctggggaggcttcacaatcatggtagaaggcaaaggaggagcaaagtcacatcttacatggcggcaggcaagagagtaggggaactcccctttataaaaccatcagatcttgtgagacttactgtcagaacagcatgggaaagacccatccccatgtttcagttacctcccatggggtctctcccatgacatgtgggaattacgggagctacaattcaagatgagatttgggtggggacacagccagactgtatcagggagtcattaggaataaagtttctgagggactttttccacagttgtacctgttggtcttatcttgtggaaatggtctgtacttctctagattgctgtggtctccaactctctctgtttcctacttattgacagaaacaggaaacctttctgtatcacagatggtagacagggcaaagaaatttgtgacaaaaggcaaaaaatactgtggtaatggcccatagaaagttgaattaagagctcagagaccagataaggaagtcttgggctggtttccttttggtttgagttgtatatgaaggtgtttatatgtagcaaagtgctctgaaaatagtttctaaaaactcaccttattttaatgacatggtctttttacaaaaaggccatttcatggatgaggatgagaaataaaggggaaatcagtcacttggttaaaaaacacctcctccatcaaattacatatgttctgaagacaagtttgccttaactcacaaaaacatcgaaatcatatgtctttccagtttcacaaaatgaataataacgttttgaggggagaatgaggattttcctgtgataaagctgtagttcctagaataggaggcccctattctagggaaaggggttggactgaggaccctatagttgggaactcactacagactcatcctgaaagagactcagtgcctgagagaagcagcggttagacgttacccaatggggtaagacctgggccagagacaggagaggctgggaagataccaggaaagagtgcttggagcaggggaatggctagcccgagctggtcctgtagggaggtggggcctggagaagccagaaacagtggaatgatccttcaggagaggacaaactggtaaacttgactaacttctgatttatcagtgtgttttgttctaagctttacgttttccttaaatttttttttttttaaagatgactacatttcaaagttgacctttgtcttgcatttcagatgttgcctgaccagacgaaaatctcctcagaactttttagtaagtctgataaagaagacagggagagtcccagtggccttgaaagagaaacaggtatattgggaaataacaaaattctgaccctgagttttctgtaaaagcgatgaaaccttagttggaagaggtcactggaaacctgtggtcatatgagtgatgcgtgtctgatggcacttctggaggaagaagagttgctgatagccttgaattgttttctacacctgttaaggtctctcttgtgggtcaactggaaatgacaaagaagaaatgatggggtttgggggaggcaggacatgggggtaaggaaggtcttgtctacccacaaagtcggccctgcactagaccgtgtttctcttttgagttatgccccaaggctgttttcccaagtgcccatagatttcttttcttttttttttttttttgagatggagtcttgctctgttgcccaggctggagtgcagtggcacgatctcggctcactgcaacctctgcctcctaggtttaagcaactcttctgcctcagcctcccaagtagctggtactacaggtgtgtgccaccatgcccagctaattttttgtattttcagcagagacgggattttgccatgttggccaggctggtctcaaactcctggcctcaagtgatctgcccattttggcctcccaaagtcctgggattacagacgtgagccaacatgccagcctgtacccatagctttctgattggaggtttgaggcaggacctaattaccaggtcttaccaaaggatggagaggtaccagaggggacatcccatgaagaccactggtgagtatgtcagcgtgtgcacggttattatattagtctttttcttaatttgtatagagcaggcagaagaatccactaacatggtggagtttatgagtgctgaagatgaccgctgcctaataactctccacttaaatgaccaatctgagccacctgttattggggaacctgcctctgatagtcacgtaggttcttttctattttccctaagcatcggccaggttgagaaataaagggacggactacaaaagagagaaattttaaagttgggcatccaggggagacatcacatgtcggtaggttccgtgatgccccctgagctgtaaaaccagcaagtttttattagggattttcaaaaggggagggagtgtacgaatagggtgtgggtcacagagatcacgtacttcacaaggtaatagaatatcacaaggcaaatggaggcagggcgagatcacaggaccacaggaccggggcgaaattaaaattgctaatgaagtttcgggcaccattgtcatcaataacatcgtatcaggagacagggtttgagagcaaccggtctgaccaaaatttattaggcgagaatttcctcgccctaataagcctgggagcgctatgggagactggggcttattttatccctacagtctcgaccatagaagatggtcacacccaagggggccattttagaggcccaccctcaggggcgcattctctttctcaggtatgttccttgctgagaaaaagaattcagcgatatttctcccatttgcttttgaaggaagagaaatatggctctgttccacccggctcaccggcggtcagagtttaaggttatctctcttattccctgaacattgctgttatcctgttcttttttcaaggtgcccagatttcatattgttcaaacacacatgctctacaatttgtgcagttaacgcaatcatcacagggtcctgaggtgacatacatcctcctcagctgacaggattaagagattaaagacaggcataggaaatcacaagggtattgtgatacccttgtgatacaagggtatcacaaggcataggaaatcacaaggggaagtgataagtgtccatgaaatcttcacaatttatgttcagagattgagtaaagacaggcataagaaattataaaagtattaatttggggaactaataaatgtctatgaaatcttcacaatccacgttcttctgccatagcttcagccggtccctccgttcggggtccctgacttcccgcaacaacctgtgagtacagggagtggggctcaagtttcttatctgtctccagtgggactgtgacaggtggaagccacctttcctggttcatggaccattttctcctggccaaccatctgtcaatttaaaaaaatttttttaagacaaggccttgttctgtcatcatagctcaccgtggcctcagcctcccaggctcatgtgatcctcccgcttcagcttcttgagtagcaagaactacaggtggtgccaccacgcctggcttattttaaaattttttatagagatggagtctcgctccattccccaggctggtctcaaactcctggacttaagagattctcccattttggcttcccaaatctctgggattacaggcatgagccaccatgccccatcagccatctgtcaattttttgaccatcccctccttgagattgtttttgcctccatgtttgtgtatactcttttctttactttttttttttttttaagactgagtttcgctaatggcacaatcttggctcactgccacctccgccttctgggttcaagcaattctcctgcttcagcctcctgagtagctaggattataggggcatgccaccatgcctacctaatttttgtatctttagtagagactgggatttgccatgttggccagactggtctcaaactcctgacctcaggtgatcaccagcctccgcctcccaaagtgctgggattacaggcatgagcaaccacacctggccgcacccggctgtgtattctcttttcattcaactcggcttttccttggaatacatgacttgtttggcctctgcctcatttcttcatttgggatctagagactgaaggagcctaatgtttgggagtgagacttagctcctccctggcctgaaatgagaatgaactattagcagctgaatgctacagccccttaagaggcaggagggcttgaggactgggccctgaagatacccaacaaacagaactcaaaaaaacaagctccatattaaaatcaagcacaaacatgtattcatcacagcatttatgaaaattaatgtaagaacagaaaaattttaaaaatataaatatcaaagtacagttgaataatccatcagaaagattaaacttgccctaaatctctaatcttttataatccaggcttaatttcaaaatgctttatgttttaaacagaaattaccctcctgggctgggtgcggtggctcacacccgtaatcccagcactttgggaggccaaggtgggtggatcatctgaggtcaggagtttgagaccagcctggccaacatagtgaaactccgtctctagtaaaagtacaaaaaaaaaaaattagctgggtggtggcatgcgcctgtaatcccagctactctggaggctgaggcaggataattgcttgaacacaggaggcagaggatacagtgagccaagatggcgccactgcactccagcctgggcgatagggtgagactccatctcaaaaaaaagaaaaaagaaaaagaaataactctcctctttggttttggttcttctaaaatgtagagaggcttgtctttgcaaaaaatattcccatacttttcttttgccatctgacttagtattttcaagtagtattaggcacaatattgagattggtctgcttttgaacagtcatccaccatctcttctgttgcaaacgttttattagaaaggattttgtcatcctatacaacagcaacttggttgagaattgactgatggaataatccttttcttccactccatacttctttgcttttatattatataagagagcccagtcttctagaagggtacttctcttatctctagctttgtagaatatgtttagttatacataagaggcactaacacccctctaaaaattctcatttatgatctgtgcttgtagaagtctcattacagaaaacatctcttctctgagagtaatcaagattcaagtaccagtgaactatcttggaccagtaaccagaaaaagaaatccctaaaatcatattccagtagaaagaagacaagaaccagaagtaatttgagaagtaagtctggcatgtcttcttttgaatcacttttcaaatagtgattttcaaatcagatatttatttttcagtatataatgggagtgggtccaaagaaatatatgattatggggccagctttccctgctacagttacactggaaaggcaaaatgtactgtgtacatgaaacagaagaacatgaaattaaccaacagttgttacagatgagttttgtataaatggagtagaaattcagataagaggaatctgtcatgagctggaatcatcaggaaaatctttaaggaagaggtgggtgggacttgaattaacctttggaaaaaagaatagaatgtgaagaggagaaagggaagcattcttaggtaggtaaaactacaagggcatgcatggtggctcacgcctctaatcctggcactttgggaggccgaggtgggagggttgtttgagcccaggagtttgagaccagcctaggcaatgtggtgagaccacacctctagaaaattaaaacattagctgggcatggtggtgtgcgcctgtggtcccagctactggggaggctgaggcaggaggattgcttgagcccaggaggtcaaggctgcagcgagcagtgatcgtgccactgcactgcagctcaggcgacagagtgagaccctgtctcaaacgaaacaaactacaaggacacaacaagcatgtgagggtgacattcagggacaaagtctagagcagagaattcatgctgagtggtgaggaactgagtggtgaggaacaaggttgaataatcaggaaaggatcttaagagtagacatttctggaagctgtaggaagtgggaattgcttttagtgttagcatattgggagacggagtagagaatttttatgcctcatgagttaatgtatatgttgtgcacttgttttctttcaatttagtcttgccagttttccctcccagtagtggcagtggccatgagaaagaccaagtaagtacattgtatctgggttgctgtgtgccctgtgagttaaactgcatttatttctccaaaaacaactttcagaaatataaaaataacaaaatattggtttactgatatgtgaatcaccgccaatagaaatttcaaggtcttctaaatgtttaatatgactcttgggtaagtaagtgtttaaggtgttttaggctgggtgtggtggctcacgcctgtaatcccagcactttgggatgccaaggcgggtggatcacttgagtttgggagttcgagaccagcctgggcaacatggtgaaactccgtctctacaaaaaatacaaaaattagccaggcgtggtagcacatgcttatagtcccagctacgcaggaggctgaggtgggaggatggctttagcctaggaggtggggtttgcagtgagccgagattgtgccactgcgctgcagcctgggtgacagaatgagaccgtgtctcaaaaaaaaaaaaaaagattgagggtctttttttttttttttttaactgttcccaaatgttgctggaggatgtttattatgaatgatgctaaaattctgggctattccaatttcctgcaaatttactcttttgaatttatgttttgatgtaaacttgttggtttagttcttcccttagttttttctaaagcttttaatggtttaattatttagacatttattttgcaagtgcttaggataccttcgggcttatataaatattgaataaaccctcaaagtttcttcatttcccttcacttatccttgttttatatcagagtagttaagaatagagacagcagtgtctgcaccaattcaaagccaacttttgccgtttattcactgaattacctctctcagcagttggtttgtgttttgtgtcacgtgagctatgtatacagtacagagcatatcagcaagttcggagcggtttataaggagtggctgctgtgattctgagagtatcgacagtgccccgcttgctcatgcagaaatagtttggttagggttttaatcacatcttcatcgtctgtcttccatcagcctggagtgtgttgccctctgtccacctgaagggctctcatgctctgtaaggagaggggtgggttaaacctatgagccagagtaagtatttattcattgaatagttcaacctgaaataatgagttatcagttagaaatggacccaaagaacagtttctagtaatacagcttttatttggaataaacaccaaagaaataccacagcttcaaaaaaaattttttttttgagacggagtcttgctctgtcacctaggctgaagtgcagtagtgcgatctcagctcactgcaaccaccacctctcaggttcaagtgattctcctgcctcagcctcctgagtagctgggattacaggcgtctgccaccacgcccagctaatgtttgtattttcagtagagacagagttttgccatgttggccaggctggtttcgaactcctgatctcaagtgatccacctgccttggcctcccaaagtgctgggattacaggcgtgagccaccgtgccttgccacagcttaaaaaatcgataaatttaagctgtgcctctggcaagaaatctatgttgattttcagtgagggcattgctgactttctacaaatactggtattcaaaaatatacttctctctgtataagagaataatttacagcagaggtcaggtcagcacattttttctgtaaagggccagatagtaaatacttttggctttctgagccatgcaatctctttggcaactactcacctctgcctttgtagccagaaaacagccagagacggaatggaaacacatgggtatgctgtgttctaataaaactttgctttcaagaacagcaacagattagtttgccaacccctgatacagagcagtggttctcaaacactagtggccatcacaatgaccaggatggcttgctgaaacatagattgctgggtcctgtccctagagttttgaattgaatagatgggacttgagaatttgcatttccatcaagttcccagatactgctcatgtgccagtctagaccacacttcgagaccacacttcgagttatctactgaaatatgacttcacgttcttccaattcaggggtcttacgatcttagtatttatttttttgtggctacgtttattagatgtgtctttgaaaaattaaaaagagaagctcaatagcatttataccaaactttgaatgaaagcacaaggagaaatttcctattcagtaaaaatgcagtcagaattttatttactgcagtaaaatctcaattaactcaattaatcctcaagaaggaaggatttagttaatgtaattttcctgccaattaaaatttaaatctagtatccccttacactaattctaattgttagatattttattttcttagcttagtaagctgagtaaaggaaatataattgaatcattgatcatttaggattttcactaggatcattaggcagatcagttctcatgctgtaatagaatagaggcaggtagagcaggaatgtttaaatgagtagtcgctttgctttgaccctaggactttagacaggcacattccctctgtctctgtctcgtgcactctgtctctctcttaactaaatctctgaaataagcttgctttattctccctcccctttggtttttattaatgtatttaatgaaagtactattatttgcaaatgtctttaaggtaattttaaattaatgaaaatagtgatgttgtagttcctaaggaaaacatttctgtctcaatatatactttaaaaataattcaaagagtcaaggtttgaatctattgtccatttgaggggagcagtacttgaatgcagagccattagaagacaactggaaattggctgggtgcggtggcacatgcctgtaatcccagcgctttgggaggccaaggcgggcagatcacctgaggtcaggagtttgaggccagcctggccaacatggcgaaaccccatctctaataaaatacaaaaaaattagctgggtgtggtggcgcgtgcctatgattccagctactcatgaggctgaggcacgagaattgcttgaactcagtaggtggaggttgcagtgagttgagatcacactactgcactctagcctgggtgacagagtgattccatcttaaaaaagataactggaaattggaaattcaagaatctgtaagattctttccaactgtgaaaaccagagtctgggatcaggtgccagcctttctctttttacctaacagaatttctgatttccaaggattcatgagattttcatttctgtatctcgagaaagagtaaatgacctaattcagattcagtaccatggcattaagctaatatccacccctcaactaaaaacacacagaaattcttagtagaattagcatttattttcaaatggagtaaatctaatacttaagcttcttaaagtaatattgaaaatgtcttacaatattttgataacttgtttttaattatgaatgttaacacttaaaaaagatactatattttaggctaagcttctatcaccatcagagaaagaaatacccgagcaaaataacaccacatctccaaagacttctgaacaaaaattccaagatagttttgcttttttgactgctgaagattctgcccagaaaacaggtacatgattttctgttgacttacataggaaaaaatttgtatttgggaaaggtagtttgaagtaaacaaaacatttttattttaatatctattaaagaaaatatgaagataacattgttctttaccttaatgtctcttattagcaaattaacagaggatatgatgttttaattttgctgtgccatttgagatcatcttgtacccaagaattgctggtctcttctttttttaaagaagcaagacatctcaaatgatgacctgtagcaggggttggtaaacattttttgtaaggttccaatagtaaatattttttgctttttgatccatatggtttctttttcttttctttttttttgacacggagtcttgctctgtcacccaggctggagtgcaatggtgtgctcctggctcactgcaacctccgcctcccaggttcaagcgattctcctgcctcagcctcccatgcccggctaatttttgtatttttagttgagacggagtttcaccatgttggccagtccagtctggaactcctgacctcaagtgatctgcccaccttgccttcccaaagtgctgggactacaggcgtgagccaccatggccagacttgatccatatggtttctgttgtgactattcaactctgcagttgttgcacaaaattggccatggataagatgtaagccaatggggtggctgtctttccataaaactttatttataaaatcaggtagcagactggatctgacttgggggccagagtttgccaacccttaacctataggctttttcttaaccctcactgtattttattttgactgtgtttttaagtttgttaataatatgattttattattattaataacaatattaatattgttcattattctgcagttcacattgccaggcatacaatgatatttagtaagtacttcaataacaatctgttagtgtagctgccactggaagaaaataagtagggaaaatcaaaaagtagagaggaaaatgtaacattaaagaataaaaggggtcaggcgcagtggctccctcctgtaatcccagcactttgggaggctgaggcgggcagatcacctgaggtcaggagttcgagaccagcctgaccaatatagtgaaacctcgtctctactaaaaatacaaaaactagccaggcatggtggcaggcacctgtagtcccagctactcgggaggctgagacaggagaattgcttgaaccgggaggcagaggttgcagtgagccactgcactccagcctgggcgacagagtgagactctatctcacaaagaaaaaaaaatagattaaaaggaaggaagagagcaagatagggaagaaaggaacaaagttactacaaaagagtaacaatcaacaaaatggcaatactaagtttttacctatcaataattactttaaatggattaaattctccaatcaaaagacacagagtggttgaatggatagaaaaaagtgagattcagcaatctgctgcttacaggggactcactgtaccttaaggacagatataaactgaaagtgaagggtcggaaaaagatattccatgcaaatggcaatcaaaagagagcagggatgtggttatacctacatcaggcaaaatagactttctgtcaaaatttgtcacaagagacaaagactagatgatgataaaagggttaattcatcaacaggaaatagcaattgtaaatatatatatgcacccaacattacagcacctaaatgtataaagcaaatattaatagacctgaagagagaaatagcaatacaataaaagagttctttaattaccccaccttcaatagtcgatagattatccagatagaaaatcaataaggaaacagtggcttgaataatactgtagaccagatgaatctaactaacatatacagaacattccatctaacagcagtggaacacttattcttctccagtgtacagtgcgcatgggacattctccagaattgatcatatgttgggctacaaaatacatcttaacaaatttgaaaagattgagataatctcagatgtcttttctgatcacagcagtatgaaactagaaataatagcaggaggaagattggaaaattcacaaatacatggaaattaaacaacacactcccgaataaccaatggatcaaataaattaaaagggaaattaaaaaatcttgagataaatgaaaatggaaacataccaaaatttacaggatgcagcaagagcagtgttaaaaggggagtttattagcaataaatacctaccttaagaaaaaaggaaaatcccaagtaacttcacccctcaagaaactgaaaaaagaagaaactaaacccaaagtcagcttaacgaagaaaataacaaatattaaggcataaataaatgaagtaggcactagaaagacaatagaaatgttcaatgaaactaagagtttgtgtttggaaagaatgaaattgacagacctttagctagactaaccaagagaaagagaggactcaaaaaaaactgttaatgaaaaaggagacactacaactgataccacagaactacaaaggatcataagccattacaacaaacaaattatacaccaacaaattggataacctagaagaaatgggtgagtttctagaaacatgcgacctaccaagactgaatataaagaaatagaaaagctgaacagacccataatgagtaaggagatcaaatcagtaatcaaacctcccaacggagagtagcccagggccagacggtttcactggtgaactctaccaagtatttaaagaaaaattaatgccaatccttttcaaactcttccaaaaaactgaggtggacagaacacttccaaacccattttatgaggccagcattaccctcttgtcaaagccagataagaatgctacaagaaaagaaaattacaggccaatgtctctgatgaacgtatatgtaaaaaccctcaaaaatactagcaaaacttactaaatagcacattaaaaggactatacaccatgttaaagtaggatttatccctgagattcaaggaagtttccatatatgcaaatcaataaatgtgataaaccacattaagagaatgaaggttaaattcatagaatcatttcaatagatgcaaaaaaagcatttgacaaaatttaacatcctttcataatgactttcaacaaattaagtacatatagaatgcacctcaatattaaaaaggccatatatgacaagcccagagctagcattccactcaatggtgaaaagctgaaagcttttcctctaagatcaggaatacgacaaaggtgtctactcttgccacttctgtttaacatagtactggaagtcctacccagttctatccaggcaagaaaaagaaataaaagacatccaaataggaagatgttaaattgtttttgtttaaagatgacatgattttacatatatcaaactgtaaaggcttcaccaaaaaactgttagaactaataaatgaattcagtaaagttgcaggatacaaaatcaacatacaaaaatcagttgtggggtttgcttctgggtttcaacaaaacaaaacaaaaatcagttgcatttctagacactaacagtaaactgtctaagaaagaaatcaagaaaatctcagccaagcatggtggctcatgcctgtaatcccagcactttgggacgccaaggccggaggattacgaggtcaggagatcgagaccatcccagctaacacagtgaaaccccatctctactaaaaatacaacatattagctaggcatggtggcacactcctgtagtcccagctactcaggaggctgacgcgggagaattgcttgaatccaggaggtgcaggttgcagtgagctgagatcacgccactgcatttcagcctgggtgacacaacgagactccatctcaaaaaaaaaaagaaaatttcattgataatagcttacaaaaaacacataaaaataaccaaggaggtgaaaggtcataatctgaaaactataagacattgatgaaattaattgaagacacaaataaatggaagaatatcctatgtacatggattggaagaattgttaaaatgtccttattatccaaagcaatatacagattcaattcaactgctatcaaatttctactggcatttttcacagaaatagaaaaaactatcctaaaatttatatggaaccacaaaagatcctaaatagccaaagcaatcttgagaaagaggaataaagctggaggcatcacactttctgatttcaaagtgtattcaaaaactatagtaatcaaaacagtatagtactgccatagagacaggcacataggccaagataacattatgggcccagacataaacctacacatatatatggccacttaatctttgaaaagggcaccaagaatacacaatgaggaaaggaaagcgtcttcaataaatgttttgggaaaactggttatccacatactaaacaatgaaattgggcctttgttttataccatatacaaaaatcaactcaaaataggttaagactttaagatctaaaactgtacaagacaaaaatagggaaacagctctttgacattggtcttagcaatgatttcttgcatacaaccctaatagcacaataaacttttgggactatgtcatactaaaaatcttgtgcacagcaaagaaagcaatcaatcaaatggaaagacaacctaaagaatgggagaaaatattgcaaatcatatatctgataataggttaggggttaatattcaaaataacttccacaactcaaaagcaagacaacacataacctaattaaaaatgggtaaagaagctgaatagacatttttccaaaaaagaagcacaaatggctaatgggtatatgtactcaacatcactgatcattagagaaatgcaaatcaaaaccataatgtgatatctcacacctgtccagatagctattatcgaaaagacaggagataacaagtgttggcaagggtatggagagaagggaacaattgtacgctgttggtgagaatgtaaactgatgcaactattgtggaaaacagtatggtgttttctcaaaaaaattagaattgtatagaatccatcaatcccacttccatgtatatatccaaagcagataaaatcagcatcttgaagagagatctgcactcccatgtttattgcagcattattcacaatagccaggatatggaatcagcctaagcactggtcagtggatgaatgaatatagaaaatgtggtatatattaataatggaatactattcagcctcaaaaaagaaggaaatcaggccatatgcaacaacatggataaacctggaggacattatagtaagtgaaataagctagtcactaaaggacaaatactatataatctcacatatatacggaatgtaaaaaagtcaaactcatagaaacagagaatggaacagtggttgccaggtgctaggaggtggggggaaagaggagatggtcctcgaaggatataaactttcaggcataacatgaacaagttctggggatgtaatatacagcacaggtagtgatggatgtgttcatcgatttgaaagtgataatcattacaccgtatatatgtatatcaaatcatcaaaaaagagtaagaggcaataagggaggggtttctaagggagagaagaatcacaagattgaggtggaagaatccctgcccgtgttatttgaggccagatgggcagctccttaaggtgccgatctagttgaagtaactggctgttaatcttaactacagatgtacaaacctaataagaattcatctttgacaaacctgacaaaaacaagaaatggggaaaggattccctatttaataagtggtgctgggaaaatcgtctagccgtatgtagaaagctgaaactggatcccttccttacaccttaaacaaacattaattcaagatggattaaagacttaaatgttagacttaaaaccataaaaaccctagaagaaaacctcagcaataccattcaggacacaggcatgggcaaggacttcgtgtctaaaacaccaaaagcaatggcaacaaaagccaaaattgacaaatgggatctaattaaactaaagagcttctgcacagcaaaagaaaccaccatcagagtgaacaggcaacctacagaatgggagaaaatttttgccatctactcatctgacaaagggctaatatccagaatctacaaagaactcaaacaaatttacaagaaaaaaacaaccccatccaaaagtgggcaaaggatatgaacagacacttctcaaaagaagacatttatgcagccaacagacacatgaaaaaatgctcaccatcactggccatcagagaaatgcaaatcaaaaccgcaatgagataccatctcacaccagttagaatggcgatcattaaaaagtcaggaaacaacagatgctggagaggatgtggagaaataggcacacttttcttttacactgttggtgggagtgtaaactagttcaaccattgtggaagtcagtgtggtgattcctcagggatctagaactagaaataccatttgacccagccatcccattactgggtatatacccaaaggattataaaacatgctgctataaagacacatgcacaggtatatttattgtggcactattcacaatagcaaagacttggaaccaacccaaatgtccaacaacgatagactggattaagaaaatgtggcacatatacaccatggaatactatgcagccataaaaaatgatgatttcatgtcctttgtagggacatggatgaagctggaaaccatcattctcagcaaactcgcaaggatgaaaaacaccacatgttctcactcataggtgggaattgaacaatgagaacacatggacacaggaaagggaacatcacacactggggcctgttgtggggtggggggaggggggagggatagcattaagagatatatctaatgttaaatgacgagttaatgggtgcagcacaccaacatggcacatgtatacatacgtaacctgcacgttgtgcacatgtaccctaaaacttaaaagtataataaaaaagaattcgtgtcccgaaagacacagtcagtagatttttgtttcacttagaactgtgttccttttttttgatgatgagatttaatatctagaatgatagtgaattcttattgctttgttacttggcgtgtattcacttgaaacttctctctaatgctcagagcttcaagatcctcactcactgagtgagctctcttccttgaagcactcagaagatgaagaaaaacctaaggtactatttaattgttggttattcatctgattttccagaattaatatcatatttgcataacacattggctattccttctgacgagtacaccacttgtttcttgctttgccataaaggacgtaatttgtggtctgttttgtttttaagattgtgaaccaagaatcactaacagaaagtactagcttgaaacataagctgagaaacttggaagacaaaggtaagagaatagtacttttttttttttttttgcagaataaaatgaaattaatctgattttggcagactgggctgttactcagattgcagatcaagtcactttgcacagtgactattgccaggccgtggagggagcagtgtgagctgcttactagttctaaatgttcatgaaggttaggaggaaaaatggggggctccattcaggaaccaggacctcttgtgccaaggaaggtatagcctgggacctgaatcccaccagccagtcacaccttctctccagcctcagaggagggcacagtggcggtactttgctaagggtctcatccagagctgatttcattctcaagcatgtaggtcacttgtggtttataagaaatgttctaaaacattgtgtggtcaaattattaaaacttctgagttcatttactcatgttaacagtggtatgaagatttccagtctggttcacaatgttgtatctaatataatgtaatgagttaatataatacttttctactgtttatgatgtttcttgactgcatttttttctctacttttaaaattacgtatcgaaaggattcaactagttataaatatgtgtaggatatttagaatattaatgcaacaaatatctgcaaaccaccatcctgttttaggaatataacattactattgctttcaaaatcctggtatgctttacctgaaacccatcccaccccctccccttaattttatgtctgagtctctgcttttttgttcattcgtgcgttgtgagaaataccatacattcagaagagatagatgtgtacagtttaaagaatgactataaagtgaacatctgtgtaaccacagctcaaactgggaactagaaaattgccattggcttagaatccttccataccagattattacttattaatttctttcatccctcatagaggtaatgacttatgacttttgtaaacatccttcagttacttctttttataattttgctttctccatatgtatccctaaataatatacagtttagttttatctgattctaaatgtaaacaaatgacattatactgtatacattatatgtggcttcttttgctcaatcatttgtgagatccattcatgctaatgtgtgtaattgaggtatatttctttactatttagcatgcagttacatgaaaataccatatttaaaaatccattccagtgctgtgggatatttggatttttgcaatttgggttgttagaaataatgccactatgaagaatcatgaactctctcctgatacacaggttaaaaatcttgtctaggcacatttttaggagtataattgctgggttataaaatatgtatacctttaacaattttacatatgccaaactttctcaaagtgactgtatcttttacttttccaccagccgtatatgagagtcctgttgctttacatcctcaccaacacttggtattttaaatttctgatatatgtgtgtgtggacactgaagttttaattcaaatatccctgattgaaatttagcataattttgtgtgtttattagccatttgaatttcctcttgtgtagtgtctaacacgtcttgcctagttgtctatagaattatcttcttatattgattcctaggaattcttcgtaatacattctggacacttgtccttgattatgtggcttgtaaatatcttcttccactgtgtggtctgtacttctctctctgtataatctgtttaagattgctttttttgataaatcaaagcttttaattttaataaattctctttcatctttcctctgtggttagtcatatgaaattcttacctaccaaaaagatattatatattatttcctatgttactacatttaatgctatccatttctctctaagtactgctttaggtgaatcccacacattataatatatatttgtcattatttactttaaaatattattttttattttttaatttttttattttgagacagagtctcactctgtcacccaggctggagtgtagtggcgtgatcttggctcactgcaacctctgtctcccaggttcaagcgattctcctgcctcagcctcccaagtagctgggattacaggcatgtgccaccatacccagctaattttgcatttttagtagcaacggggtttcgccatgttggccaggctggtcttgaactcctgacctcaggtgatctgcctgcctcggcctcccaaagtgctgggattacaggcatgagccaccgtgcccggcctaaaatattttttattttgatttcttcattgatccaaatgttggttagaagtatatttgttaattctcagtggtataggagcttttagctatctttttgttatggttttctactttgattgcattgtgactagagaacatagtctgtatgattataccttttgaaattttgagatgtacgttatggcttagtatatgccaatttttaaaaatattaatttgtggttaaaagagtatatttcacaatcattgggtgcagtgtctctatatatgtatattcattaggttacttttcttaactatgtccttcaaatcttacattcttactgttttttaatcagtctacttattctatcaagtgctgagagaagtgtattaaaaactttcgctatgattgtggatttgctggttttttcttctggttctgttcaatttttgctccctataaatcttttttctaaataataagtctttaggccaggcgtggtggctcacacctgtaatcccagcactttgggaggccaaggtgggtggatcacctgcggtcaggagttcaagaccagcctgaccaacatggggaaacactgtctctactaaaaatacaaaaattaaccaggtgtgatggtgcatgcctgtaatcccagctacttgggaggctgaggcaagagaatcacttaaacccaggaggcggaggttgcggtgagccaagatcgtgccatggcactccagcctgggtaacagagtgagactccatcttaaaaaaaaaaaaaaaaaaaaaaaaagagtaagtctttagataaaagtaaaatatttaccttattgtatatttgccttatggcatattaaaactcttatcattatgaagtgatgacccctgtatctagtcatgtttttgtcttgaagtctgtttatttcgtttagaatttgcatggtataatttctaaaagtcttttcatgactgacatatgtgtatgtgtttcataatgttatatatataacttgtaaacagcctgtatttggacttccttgcccctcatttcatagtatgtcttttaactggagtatttagtccatttacatttcatgtactttcccccatatttggattatatctaccaatttgttttgtgctttctgtgtgccccaaccattctgttttctttctctcattcttttcattttgcataagtatttttattgtattttttacctctactcatttgtagttatatactctatttcttttttcatttactgattaacttagaaatcataatgtgtcatttctaagcctaaatttaatctagtgttacttttccataacgtgtaaatttctaagcctaaatttaatttagtgttaatctagtgttacttttacataatgtgtaaatttctaagcctaaatttaatttagtgttacttttcctccagattatatagacctaagatccttgaattccattggcctaccccaaccacataatgtgttggtgttctttaattttattttaaaacttgaggttgaatttttgctttatgaaaatgcccattcaacctttattcttgaattaaattttactgggtgaagaataccatattggcagaattttttctgtcatacatcaaagaaattattcaattgctttttgttttctattcttcctgatgaaaatttagctgtcaatctaccagtcattcttcaaaggtaatttgtccttttttttccctcctcaatatatatatgattttttccatttatccttggtaatgttccacttattaaaatttgtctaagtaagtctaaatacgtctaagataaacctttttgtttatcttccttggcatttgtagggaatctggaatatgtgacatgtctttcatcagttctggaacattctcagcaattatctcctcaaatattgcttttggctcattcctctttctcctgcttgaactccaactagattccacatcttttacccactcctacgtattttctattccttcactttatttgcatgctagataatttcatctgtttttcacaactacctgttcaccagtatctaatactggacctatcattgaatgtttattttattttttatttctagaagttgtttggttctttctagagctactaggtccttttgtgtagttcctattccctgaagatatttttgagcttgtttttctttgtttaaatagagtagtttatcttctttcctctttttcaaagttgactttagttgttcaagggacttcttattttttcatataaatttagaccaagttgatcaagttacttaagttcactagaattttgatagaaattgcattaaatatataagttaacttgaagagaagtgacatctttaaaatattaaaccatcccacacaagagtatgaaatgtctctctattgatctgtgtcattgtctgcgtcctttattgagttttaaagttttctctgtgaagggcttatgtatttttgggtaattcctaggtatttatgattttgttactattgttttaaaatttgttattgctaaagtagagcgatactgttaatttttataaaataaccctgtatctggcaaccttgctgaactcttattaggtcaaataatttatctgttgattctcttagttatcctaagtagatgattctattacttgcaaaaaatgatagattctttctccccttctgatacttacatctcttatttttcattcttcatagcattggccaatatctttagtatgtcttaaaaatagcagtgaaaatctgcatccttgtcttttttctaatcttatagcaaatgcatctaaagtttctctgttaagtaaaatgtttgcagtagatttttggtattgaatttttaccaggttaaagaagttcctttctactcataatttgctctgagtttttaaaaaatcatacataagtattgaagttatgaaatgcatttttctgcatcaactaaaataatcaaatgaattttctcctttggtttctttttttccctccagctttattgaggaataattggcaaataaaaattgtatatatttaaggtatctaatatgatattttgttacgcatatgcattgtgaaatgattaccgtaatcaagctaatttacatatcccctcacatagttatctttgtgtgtgtgtatgcgtgtgttaataataaagatctactctctcagccaatttcaagtacatatacattattattagctgtagtcaccattcatatctcaggtctctagaactttttcatttaataactgaaagtttatgccttttgaccaacgtctcccggttttcccaaccccttgattcctggtaaccacccttctatgctaagtgaaagaagccagacacagaccaatgctgcatagttttacttatatgtggaatttttaaaagtacaactcatagaaacagagagtagaagggtgtggtggtccttttgcttattaatatgacaaattatatcaataggtattatgttgttcagccatacttgtgttcctgggataaacctcatttgattgtggtacatttaaaaaaagatacattgttggacttatttagtgaataccttattaatgagctttacatctacactcatgagtggaacaaacctgtacttttctcctactgctattatctggcattggaatcagtgtcacactagcctgtggatggaagctgggcagctctctctcttgctggaaaagtttatatatgataaaaactaactattttttaaaagtttgtaaaaccacctgggaatttggggaatttgggggaaaacgttattatttcaatttccttaatagccactgatatacccaagttctctatttcttcttgggtcagttttggaattctgtgtttttctaggaatgcctctcttagcatcatattttttagtgtgcttcttaatgtttaattttaatcattgtagttgtttcctttttattgtgtacttgcttatttgtatctttgactcttgataagttttactagaggtccacctaactcatcttttaaagaattgatattttggtttgttactcttctctgtttttatttctattgttttctcttctgttgttatctgctcttttctatttttacttcttatatctttacgtttattctgatgctctttttccagcttttgagttaaatactcatttgtttttaacctttctgttttcttgataaatgcatttaagttttcttagaaatgctttggctatatcacattttgatattagtgcttttgttaccatcaatggttagtagttcttcctttttatgtattttttaaaacccagttatttagtaaaatttaatgtagtttccaagcatatgggatacttttgttacttattgctaattttttgcaacatagtcagagaaacacagtctgtacaatatctttcctttagatttactggggcttacattaaggcctaactggacttgccttatggctgaaaacggtatccaaatttcataagtgttctgtatgtacttatctatatcctttgttctattttatatgttttgaggcagtgctactaggtgcatcaggaagtgactgttcatctctagtaactcttcttacttagttaatatcaataaagcaacactagttttcttttggctaatatttacctgatacatcttttttttttttttttgccattcttttactttcagtctttttttcatccttgtgaattgctgactatcacataaagagcttatatctggattaaaaaaaatctgatctgacaatctcttttaataggagcaattaatccattgtgcttccattgatatatttggattgagttttctcgtctttgtcccacattctcattcttttattctttctgtccttgccttcatttagatttatcatttttaatcattttcccccttttcctagtttggaagttttcgtcccctatttctaaagttaaccctagaaattttaacacacacacttttaaaagcttcaagtaaatgttttcaccatatcccaaacagaagaaggacctttgagcactaacttcaatcacatttctgaacatttagtttccaaacatatgggttattttaaagctgtcctttcattaccttttgctaacttattgcaacatggtcagagaaacacagtctgtacaatattgtttgtttagaatttattggggcttatattaagacccaatttgacttgccttatggttgaaaactgtatccaaatttcatgagcgttccgtgccgtacttattcttctgaccctttggctgcttctctagtttttttaattcgtaaaatgttctctgttggtattactttactcagtgttttattagatttacactcagatttaatcattttgctcacaattcctctttgcacctttcctcctggtatcactgtccttttgttctttttgcctgaattacttcaaaaaatatttttagcattttcattagaggatttatgtttcttttagaaaatacagtctaaggtccaattggtcttttgtttttgtagtatgatcagcaggagcccctcctttaactagagcctctcctccagctctctaacagaagctaggtgagaagaagagacttgtgtcagagggaccctcagatagactggagtacggtgtgcaatttcgggtcactgcagccttcgatctcccaggcttaagcaatcctcccacctcagcctcccaagtaggtaggactacaggtgcatgccaccacacccaacggatttttgtaattttcgtagagacagggatttgacatgttggctaggctggtcttgaactcttggactcaagcaatctgtcacctcagcctcccaaagtgctgggattataggcatgagccacatgcccagccagaggataattttttttttaagattttgaattttgccttcatctactttcttggagaggtctccagaatcaggaaggagtcaggaggatagttccttcctagctcagtgcccggcatatagacacactccataagtatttgtcaagggaatggagtaagaaacttagaaaacccaacatttaagactgggcatggtggcttatgcctgtaatcccagaactttgggaggccaaggcaggaagattgcttgagcttaggagttcaagaccagcctgggcaacatagtgagaccctgtctctacaaaaattacaaaaacattagccaggcatggtggcgtgtccctgtgttcccagctactctggaggctgacatgggggtggttgagcttggcaggatgaggctgcagtgagctgtgatcgtgccactgcattccagcctgggtgacaaagcaagaccctgtctcaaaagaaacaaacaaaaagaaaacccaacatttaatgatgaaactctgcttgattcgctatttaagcatttatatgtagtcacaaataaatatttattatcagttgagttatccattcttaactgcattaatctatacaaaagatatttagtagttcccatcaaactgagtaattcaacagtaaagatagtctttaaattgtcatactcttagcacttaataaacatcggtaaacaaagtacttgccttgggaaagcgctgtaaaaaccacagaggatcttttggtagattctgttcttgctcaggaaagactgttggcctttatcattgtttaccacagggtgtcacttcagagcaaggtttcaaaaaatgccttaacttaggggagcttggctgttaaccataggtctggcattaaacattgtttttaacagaagttttgtaagttgaaaaatacaacacagatgccaaacatacgttcactgaaacttgtgcccagtcggctacccaagataagttcagaagctcctcagattgtacctgtcttcacttttcttggaaatgaagaaagccgggttcttgtgagagcaggagcacaccccctctgcagccaccaacacatacacatggatttcacattcttttaagatgacttgactgcgtttgtgtttatttttgaggtgttctgtgtatgtagttttaactctgttatgaaaatgttgaaacgtgctagtgaaaagtggcatacagttaccatggaaacaaaactgagccaaggacatcacttagtacctgcagcctctcctgatgaagtgctggttcttgtgcaggagcctgtgctctctggagagccatgcctttggtaaaggtaaagaacttcacgagcactgccacttcgaagaaggtttctaaaagtctagtgatttccatgtccctgaagccatccaactggatgatcccttgttagtaggttcacaaattccgcataattcattcaaagggtgaccaggttatttacacgatgttcctggatttctctctttggtggatgtaactagtgtctgtgctgacagatgccttgctttgccccaggtatgcatgggggtggaacattgaaattcaaggacaaactttgggctattgctacaaatttgccaccaagaaaaaaaaaaaaagttccagaaggggcagaacaggtagtaaggaaaagaaacgtggtgattgttgatcagtgcctaattgaggctaggtggaatcctttttaagtggtttcttttggccctgactgcggtatagacaccacagaagatgcaagcatgaatgttgtttgccttgaggctgaaagaaaaggatagagttgtaattgggttctttttttttatttttaaaaatctttgcccttgaaatgacgggatccccccagaaaatatccatccaaacccttcaaacaaatggacacacctaagtctaagtgcaatgagaagaaaagaggtactagctcctataagatgcctctcacagataagagtatttcttaatgtgtttcttttctttttttattacagagaggccagatactggctgtttcttttctaagttctgcagaatgggaatgtgatctctaatgaatttttcagtttatgaaagtactattatagaatactaattagggtgtcccatgaggtctgtccttaatagttattactagttactattattactagtttaatcctttttgctttgagatcatcctttttctttctcaattggtatttcttacctctcatttataattttctttttttccaaattcatatatttatagattcctccaaaaggtagttttatcagatcttaaagtgctaaatatattaactgctatttgtcttaaagtgttaaatgtattaattgctatttgtctattaataaaggcagtttcttttccttacttcctgttctgccccttctggaacttttttttttcttagtggcaaatttgtagcaatagcccaaagcatggccactatagcaaatatgtagtggctatttaggtctctaaagcttgtgatgtttctctacctctaccctcaccactaggagaattagaataagagaactgaaataaactcttatctgttgtattgagatctccattgggcatatcaggtgttttatttgtaggagcttgggtattctgcagcattcatctattcatttgttgaacaaatgtttattgagtgtctactatgtgccagacacttctgtaggtgtcagggatatggtagtgaagaaaaaaaatgcctgccctcactgggccttaccctctagtgtgggagacagatgatggacaagtaaaacatgtagtatgttgtatgtgataaaggctgagaagaaaattaagctgggaagagagtgtgaagagttgggaggctacattgaaatttaaggttagatggatggagaaatccttggtgcagatctatggggatgtgctctggtcagaggtcagaggagtctcaagtgcaaaggccttgaggtaagaccgtgcctgggatgtccaaggaactacaaggagaccaggatatcaggagcagagtggaggaagggtcacttcgtctttacctctcactatctgccagccgcatcgccctgcctctcgcacatagtaacgtccacatattcatggaatgaattagtgaaattgaattccagaactttcagagagaaaaaccaacagcaactagacaggcatgtgacaaaagagaagtcagatgatgtcacaactaaaggtacagtgcgggggagagagtggttttaagtgggagggatagactcgagtggggtttgaagtaaagatgtcaaatacttggagacacaagttggccgcttgagagagctcaggcaagagagagatttggaagtgacaattgaaggtgaaggattgacgatttcctctagggagatggctttgggcaggaactcagagagggagggattcattccataggcagaaccttgaggatggaggagaagcgggcagcaaagaaaaggaggagttgagcataaagccagggctctgtgaaccatggtggtgccattgataagatgatgaggaccagacatgtctgggataaaagtgaacatcagaatagaaaatatttagtgttatgctgaattgaaatgggaatctatgttcgagtctctcaaaatcacttgagctgtgaggaggcaagatggcctcgtttatgacgtagccttcagcatagcgccgatgtgcccgtgtcaccagcagatggcgcgctccggggtgtgagctgaagcacttccaaaggcccatctgcctggaaaccttgctgtcttgctatttagctcagagccctggaagcgttgcttttgatgtctaccattactgcttaacttaggaacgctctgcctagtgaggggtctgtgctaagcagagtgttcctaaatgtaactgagctcatcaaagggatgcctgttcccatgttcaggtatcagtagacatcgtgcttcgatacttggtttgtgcctagtcgatgcaccgaatgataactcattagcaacaggcaggggacaagtttcagatggtactcttcacagtaagacattaactgccaaaaaatgaacaagataatttcgggtcaaaaggaaatgtgctctgtttgcctgtagacataccagaaggtagttttgctaagtcacaacaatcaagattggaagaagaggttgctccgggatcccctttctcaataacagaagaaagagagttgccaggtaacatcatgcacccagccaatggttcaagtaggagtgggataaatgggtcagcacaggatgtaacaacatgaatcacaagggaggtatagttttaagatcatagtagctacaaaatcctaaaaactaagcttttgtgcttttggagacaaataagttgttgcacaaattatagataaaagcaagtgccattatcccctagcatttttatttcttcctcgtaactcttccttctgggaattttcagggcccaagggttcctaaagttataggtctctgatatggttgatagttatcaaccaaatttttgtgtgagaaatatctataccgattaagaagaatgatctggaatgtctgcatgtttgaggctggccttctggacaaatggtaccatgcattttgaaacaaagggctccaatgcaacagatttgaaagcattgattccagacagcctggatttgaatccaggagctgctggtatgagcatgcaagacttatgcaagctctgttaaatgggaatcctgacagtacctacttcacacaatttttgtgagacttaattgatgcttgcaaatccctcagaacagcaccagaccccttgcaagccctctgaagactggcacccagaagcagttacaccagagaaataccctagctatatgtcctccttagaacctattacaacaccttggcctgcttcttagacaaaatgtcagttgccccgatttaaagtgctgggaagatatagaagaaatgagcactttccagagagcgaggtcatgtccaggcagtcagcggggcttccatggttcgcatctgtgcttccaaataactcatcctctgggcaactgatgaattgagcaagtctactttgaacactttgttagttttattccatgttttgtttttgttttccagaaggaatttccacttcatccctagaagttgtgccagagaacttgaacggttctgccattctcccaacctttgaaaacttcactaaaaaacggaaaagaaaatatgaggtagtagtccacaaaacttaaaaaactagagcgttatgaatctggaggacattatgctaagtgaaataagccagacagtaccacatggtctcacttatattgaaatctaaaaaaagttgaactcagaaacagggaggagaagggtggttaccaggggtcagggttagaggaaatgggagatgttggatggggcatacaaactttcagttacaagttaataagttctggagacctaacatacagcatggtgactatagttagtaataatgtactgtatacttgaaattcgctaagagagtatatcttaagtattcctaccaccccccaagaaggtaactgtgtgaagtaatgaatatgttaatttgcttgattgtggtaatcattaaaaaatctttttttaagtagagatgaggtctcactatgttgcctaggctggtctcaaacacctgggctcaagtgatccacctgcctcggcctcccaaagtgctgagattacaggtgtaagccaccaagcttggcccgtggtaatcatttcacagtttatatgtatatcaatcatgtgtataccttgaatacataacacttttgtttttagttttttagagataggatcttgttctgttgccaaggctggagtgcagcagtgaaatcatagttcactctaaccttgaactcttgggctcaagtgatcctcccacctaagcctcccatgtagctgggactacaggtgcatgccaccacacctggctaattttttaaaattttttgtagagatagggtctttctatgttgcccagtatggtcttacacttctggcctaaggtgatcctcctgcttcagcctcccaaactgctgagattacaggtgtgagccactgtacctggcctgatttttatttgtcaattatacttcaacaaagctgaaaaagaggaaagaaggaaaaggtagttcattatgaatttaaagtaacaagttcatattacttatcaatgctgttgttgaccttcatatgtgaaagtgcttctaagtgtttggggaggggtatttgtcttagctgtggtcactgatttcagtcttcgtgaattgtggtttgtatttataagacagctattccatgtccatttgccccagtgggaccaagtggacctatgtgtaaatcagactgatagtttggtttcattggtagcattttcagacaactgaactaccagaaagcaatgatttggtcacagtgatagacaaggaggaggggaaggatggaaccaagtgggctagagaggagtctggggccgggcatggtgattcatgcctgtggatcccagcactttgggaggccaaggggggagaatcgcttgaggccaggagttcaagatcagcccgtgcaacatagtgagaccctgtctctacaaaaaatgtttttaaaaattagccagacatggtgacatacacatgtagtcccagctactcaggaagctgaggtaagagaatcccttgagtccagcagttcaaggttacagtgagctatgatcatgccgctgtgctccagcctaggcaacagagcaagaccatgtctctattttttttaaaaaagagcaatctgagacaaagacggaggtggactgtgggttggtggccggctgagtggtggcagacctttgagacactgtgcatacagcccatcccaaaatcttgtctacaagatgaatattggaaccatttcagtcttttccttttttgtcctgttacttataatcccaaatgacttatttattagtacatttgagaaaagtatattactctaaccaacattcatttaattaacttagatctccagagtcttattttctgtgataccaatgtaagccaattagtaatagaaatttattcatagtattcattgtgtgtattggtagtatattaggccattcttgaattgctataaataaatacccgagactggataatttatttttttttaaaaaaagaggtttaattagctcaaggttctgcaggccatacaggaagcatggcactggcatctgcttggcttctggggaggcctcagggagttttactcatggtggaaggccaagggggagcaggcgtgtcacatagggagagcaggagcaaggggcggggaggtgccacacactttcaaacagccaggtgtcatgactcgctgttgtgaggatggcaccaagccatgaggaatccgcccccgtgacccgaacgcctcccaccaggcctcacttccagtatcggggattacatttcaatatgagatttgggtgggggcaaatatgcaaactatatcaggtagcatgagtgtaaatttttctatttcaacttgttctgtattggtcctgaacctggggtaatacctgacaggtgtataggatgatgcctgatcacacttgcttagcactcacatttgctatgaatattattacatgctggcagcatctttttaacacaaagcatgcactcaacttatgtaattatattaaatgtgatcatcttgttattgttgttatgatttagcttaggtacagaaagcgtccgtttaattcagaaaatgcaaagaaagcaccggattgcctaataaaacttttaaaccagatgcaactgttcaggtaagttttaggtttcaaaacaaggtcgtggaagtgtgatcactcaccaacagcgtttatctcatgaccactgtgctagggccctgaggagttggggcctgagcagatgtgaggattgatacatcatttaacccttctgggtttccggttcttcattcatatgaaaagggtttgaactaaatgtccatcttaagcctcctcatggtctaccatgatactaaaatgctgttcttaaaaaaatcattatccagttatgaagagaaggcaagcatggaaatatatgttaaaaatacaggctaaatgaaatatgctatatccatacaatggtctgttattcagccttaaaaaagaattaaattctgacacatgctataccatggatgaaccttgaaatcattatgctaaaggaaagaagccagataacaagggacaaatgttatatgactccacttaaatgaggtgtacctagaatagtcaaattcatagaggcagagagtgcaacacaggttgccaaaggttggggaaaggaggagctgtggtttaatgggtacagagtttctgtttgggatgatggaagagttctggaaatggatagtgatgatggttacaaaacactgtgaatgtacttaatgccattgaattttatacttaaaaatggttaaaagggtataaatattatgttatgtgtattttaccacagtaagaaaacaccagccaggcgtggtggctcacgcctgtaatcccggtactttgggaggctgaggtgggtggatcacctgaggtcgggagttcgagaccagcctgaccaacatggagaaaccccatctctactaaaaataaaaaattagccaggcgtggtggcgcatgcctgtaatcccagctacttgggaggctgaggcgggagaatcgcttgaactcgggaggcggaggttgcggtgagctgagatcatgccattgcactccagcctgggcaacaagagcaaaactctgtctcaaaaaaaaaaaaaaagaaagaaagaaaagaaaacaccatacacacacagtgcacagatttgcacatgcacctggacacacacacacccttatgaccatgtaacaagaaatacagaggtgccaggatttcagagggatgaggaaaggtagtggagggatgggtttctgtagtgatttgagttaattcagagtgattaccaatggaagtgcttcctgagtgaggttttagaaacaaagatttgaatggcacagggaaggtgagagtagaaattgttcctttgttggagagaatggcctgtaaatgaaggaagggaagaaaggaatggcaagttgatttgcttaactgagacagaaattttcttaggatggaatacattatttgaatagaaatttttactatttttcaaagtctggtgtgcatgcaatgtcctttgaatgtcaaagcaagcccacgaaggactttggattggtggaattcccatgctctttcaggggcacacagttatctgtgtattcactcagcaaatgcacactgggcaatgtcggataccaggccctgtgcttggtatgagagtgaggtgaggatgagttttaggtgcttttcattgaaacatttgacctaatagagaagacaaactataagcaagcaaataagaaaattaacaaataagcaaatatgaccattagacaaagaacagtgactcttagaaatgttagagctaaaatgtagatgtgggaaaagagtgtattagctcattcctgaccacaggtttcagggccagcttaatgcaagagaaaggggagcaagtggaaggtaggaagggatggggagcctcagtctcatcttccctggagtcatctgtccttttgttctctactaaaaaaaaatcagcttcctctgtgctgctattgaaagatgacctgaggccaggcacggtggctcacgcctgtaatcccagcattttgggatgctgaggcaggcggatcacctgaggtcaggagcttgagatcagcctggccaacatggtgaaaccctgtctctactaaaaatagaaaaaaatgagctgggcgtggtggcacgcgcctgtagtcccagctagtatggaggctgaggcaggagaaccacttgaacctgggaggtggaggttgcaatgagctgagatcacgccattgcactgcagcctgggcaacaagagtgaaactccatctcaaaaaaaaaaaaaaaagatgacctgagagtttgcatagtgaggtttccagattggggatgagcaggcagggaggggagggaagagaagggagatactacatgttcccatgacaagaaatgtctggagaagagtctgaagtatccttgtaatcagatgacttattaagaaagtctgctgtcacatccaagcgatcccaatgatatttactgcttttatgtttattagactcaataaactagagcgctttcaaaatttggttcttcaagagttgagcagtcttaagcaggatattcaggccctggaacaccttgagaaggaggttctggtaagttctttttgtgtggaacattttctgacttcggatctttcccagggaaaaataacgctagctacttaaacaaaacttttgttcaatcttaggaattctgggggaaacagtctgctgatctgcaatctttctgtgatctgcaagtgctgaggtactttgaaaggtgttctttctagaagaatcttggttgaagtatgaggtaatgctttagctagagaatgggcagttggtgacggtaaaactcccataactaatgaaatagctgcatcttttgaaccggccacttctgtggcacctccctgaggacagagtgcggctaatgataccattcgagaggcgtaaatcttgaaaagcctgatgtccaattttctgtgtttttttaaaatcccaatttttttatttttaagcagtattttttaaaattaaaatggttagattttgagaaaaatgtttaggtttctaagtaaacagttttcagttttatacaaatgttcagttatatacaaaattgtgcttttgatagactatattctattttactcatttacacattttttaaaacaacaaatgggttgatcctgctgtggctccctgcactgtaattcatcaatacatcctctggggaagctctttctatccatttgggatatcgtcccatcttctggagcccaaggaaggggagagttgagtctggatcctctacttctgccctgcgggaaaattctagtgttctttcccactcgaataatcaaaaggaatccccatataaatttataatagttaaagctttatcttccaattgagaatcagctgctttcacagaaatttaaggcacatggttttaggaaggatattcttcctaaaacctatgcatatattcctatgcatatattccaaagcaaaaaaaaaaatcttttaaaatttgagttatccatcctgccttttactccaattaccacagttaatgatgatgactgtatgaaccatttccacaatccctcacacaccatctccctctgtgtatagttaaaggtgatgacaccttttaaaccatcttcacttaatacccatggttggtagttagtggttctccaaggtcttggaatcaagacctctttacatatttaacatttattgaggatccccaaagaccttttgcttatgtgggttctatctgtgaatatttttcatattaaaaattgagacagatttttaaaaatacacttattttaaaataacaacaataaaccttttcgtgttgatataaataacagatttatatgaaaaataactatgacttttcagaacaagaagcatgtgggaagaatagcattgcttcatgtttttgcaaatctctttactgtctggcttaatagaagccagctggattctcgtatctgtttctgagtttcatctgttgtgagtcatgtagcctatgggaaattcccctggacatttttgagggagtaagaatttaaaaagcaaataatgtcttaatgttattattattaccaaaataattttgacttcacagaacctttggtttcttagggtttccccaggcacactttgagaacagctgataaaaagccacactgtgttaagcactagagattatatcccctagtcttctgaaacctgggggattcatttattttgactaaatccccaatattaggcaactctctcttcaaacactttaagatgttaattactatttgcattcatctccctttgataacaggtccctgtgtgaatttaaataccttaaaaacaaccatctcctaaatatacctcccctggggttttgtgtttgttcttttctcttccaaacacctaagaaaactttcctcttgcttgccagtgagggatgatggtgattctcttagctcacgctgagtgcttatgggtgcctggccctgggctgagtccttgatgtgcaaagggccttacaagaggttagtaagcctcattcaaggtcaaacaggtatcccttgtctgtccttatcttatgttttcatgtcagtgatggcgtatgtgttttgttaaagaaatgaaaagaatatccctcagactggattatttcagcccctagcttagaactacaaggtgctagggattcagtgctttgatggtgcccatgaaatacctctgcatatgttgtgggtctgtggtactgacagagagaatgcataaaatggaatcagatgaacatgttaatctcttacgttaatatcctggggtgttggtgtctataattaagtaatataatggtctgtgaaataactctgatatgcagatgtatctagatgtatgttcttgtttttaaattgtctaatgtgaatataataagagatggaccaatttcttccaggttcaattcaactcagacttcataagaaagccaaagcctggttttatgattgcagccctcaggtaggtgcaaagatttgcattgttcagtggatgtgaatcggggtcagggcagggagcaagctctaaaagatactgtaatgctttgttcatatgacatttctgcagcggaacttctccattttttttttttttttgatggagtctcactctgtcacccaggctggagtgcagtggcatgatctcggctcactgcaagctccgcctcccaggttcacgccattctcctgcctcagcctcctgagtagctgggactacaggcacccgccaccacgcccggctaattttttgtatttttagtagagatggggtttcaccatgttagcgaggatggtctcgatctcctgaccatgtgatccgcctgtcctggcctcccaaagtgctgggattacaggcgtgagccactgtgcctggcagagcttctcctttatagcaatttctcccattttagaaattatccttttgggtctgggtcattccttcagtaagtgtttataactgaatgcttaccctgcatcaatcactatgatggacatagagatacaggttgagtatccctcatccaaaatgcatgagaccagaagtgtttcagatttcagatgtttttggattctggaatatttgcagaatatgcactggttgagcatccttaatctaaaaatctgaaattcacaatgctccagtgaacatttctttgacattgacattttaaaaattttggattaaattaaaaatttaaaatttaaattttaaaaatttaaaaaatttggatatcagattttcagattaggtatgttcagcctgttcagtggttaatacacaaacgtgtttaatggaggcaacccattaaaagatacattttttgaaggaagatagaaaaatggcaagtaaacaaaacaatgacaacaagtgctttgagagatatcaacaaggtgctttggcagagaacagtggtatgaagtgtcagcttaagacacttcaaggtctctctgaggaaatgacatttaagatgaggtttcaagaataagaagaaactagacttgtggtttaaagtaacagggtcaggtatggtcatctttgagaaacagtgagtaagggaagcagttatttgaagtgaattgggaggatggtagactctcaacgaggtaagacttcattgtccatgttgaggagtttgaattttatactaagggttagagaaaatatatgtggtttttggtgaagccattgattatcctaatctaggaatagattaggataatataatctgatttatattttaagaaaattactctagatgctatgttaagaattgatgggaggaatgaagactggatgaggagagtccaaccagaaggcgtttggtgtccaagttggtggttctaagcaggaggatagcagtggaggtggtgagaaatagatttcagatatattttggagctggagttaataaattgctgatagctgcaagcagtaggtaaaggaagaagaatgaagtcagtcttctaggtttttgtcttttgcagtgagatggatggtgttgccagttagataaggaagactcagggtgggaagaatatgtgggtcaaacaggaactacagtttatttaacattttaactggcagatgtctgtgcacatccaagtcttgacaggaacctggagtaactgggcaattttccaggaaaatacagtttaacaaaatggacttctaaatagatgggaaaccttagcagacaaatcttcatagaagagagagacaaagttgtcagagaagtaccctacaaatatgtgtatgatccagattacattacagaggaattctactagttttttaaaagaaggataatgttagtgctgctcaaaccattctagcacatagaagattaaacatttcctaattttaacataaatcttgcattaccatgtcaaaatgcaacaaaaattgcaaagagaggtacagaacaatctcacttaaaataaccactctaggctgggcctggtggctcatgcctataatcccagcactttgggaggccaaggcgggtgaatcacctaagatcaggagtttgagaccagcctggccaacacggtaaaacctcatcactactaaaaatacaaaaattagccaggtgtggtgatgggcaactgttatcccagctacttgggaggctgaggcaggagaattgcttgaacccaggaggcagaggttgcagtgggctgaagtcatgccactgcactccagcctgggcaacagagcaatactctgtctcaataataataataataacaacaacaataacaacaacaacaaccacaccaaaattctcaataaagtgttggcaaacagaatttagcagcatattgtcatgaccaagtgagatttattccaggaatgcaaagatggttcgatattagggaatctactaatacattaattaccagtagatctagggagaaaaatcattttgattatctttatttccaaaagcatttgaaaattctacatctgtttttgaatttgcataaaacctaataaaatagtagcgattagttactctgtagtatgataaatctcagtccaaaagccagtattctgcttaatcgtgaaattctaaatgcattatcactaaaatcaggaccaatggatgggagatggaataacataaaggcgtccattctgcctaaattagtaaaataatttttattccccaaagccccagcagggttattttttgaaacttgaccagctgattctaatgtgtaaggacaaggacaggggaaaaagtagattgaacatgattgaaaaacaaattagaaaaaagagtactggtacaagtccaaagcaattagaagggagttaataatgagtttcaaatctgaaataaacaaaatggaaaccataggaggaggagtaaaaccaaacctggttctttagaaagactagatgcagtaaacaaacttccacttcagactgatcaagaaaataaaatgatagggaaggcacaatgaaattttgaatgaaatgtagaaataaccaattcatagaggccttaaaaagcataagaatatattagaaacagcaatatgtcaataagtgtgaaaacttagatgaaatgaacaattttctagatgaatatgattgaaatgtagaaataaccaatgtagaaataaccaattcatagaggtcttaaaaagcataagaagatattagaaacagcaatatgtcaataaatttgaaaacttagatgaaatgaacaatttcctagatgaatatgtattacctagaatcataattaaagaaattaaattggtagtataaaaagcccatccttaatttataaaaaatacatcaggtcctgatatttttaatataagttttatcaaatttataaggaataagtaatccataaacaaatgattccaaggaaaaagggaaaaaaagaaagcttcccggtttattttaggaagtttctataactttgataccaaaacaggacaaggacaatcctgagaagaaaattatagatcagtctcaaatgaacataaatacaaaaatgctaaaaatttagcaaatatactccaccagtattagttatgtgtatggggtagagggtgtgtgtgtgtgtgtgtgtgtgtgtgtgtgtgtgtgtgtgtattgaggagaaaaaaagaaaaaccattagaagtagatggatatcatacatgcaaggatggtttaacatttaagaatctattaatttatttttacctgatcaatagaataaccacatacttattctagtaaattcagaaaacacatttgataaaaattcagcacccattcatgagtaaaatccaaccaataaacaataagactcttagaaaactagggatagaatgtctgcagcaatactaaacttaatggcaaaacatttaaaatcattaacaataatttcggttctttcttcctagttagcatagtgctgattctagtaacttctggtgggccttaagtgcccttttgaggtttgtaatgagctttcttgcatgatttttctccagcaaaattctgctcagattcaggtgtaaagaaagtagagagaaggcttcatctaggggagtggttttgccagaatccagaggcaatctcagtccaagaaattgagggtgtttgctcaggagttgttagagtgatgcactttgtctgacagggaaagagaaatagaagccagttccttcgatggaccagttataaagtaatgggttcaatggatgggcatttccagtggataaaattgtccaggtaagcaaggagaagaagtgatggtgaaaggccaggaagatgtggtcagaatgtgggatgttgagaatcaagacatctgtgatgataacaggttggggtgcacatagctgtggtggcactgaagaaactgctagaggagggaaggagttgaagaaccaagaagccagagcttgaaaacggatgcttcatgacagtgttgtaattactgctaagctgataggaaccagggcccagtggacaaaggggccaggaggttgatagtagaatgcagatggttgacataaacatcagcagggaggtttctgtgagagtcaagagtcatgcctgcatgtggcagtggggagcaaggagaatgctacccctctgcctggccaggaagtcatgggatatcagaggaaaaaaagcttttagttgagtcagggtgtcaggggaggtggtaccttcagaaaccagccatgttttaaagaggaaaggaaatattttcttccagaagaggctgaggatatttgtttgctgctgacagattgaattgtaggggcaggagagaaagacctcagggagtggggaaggcagggaagagcagtaggtagactggggtccaggaggagatgtacgcacagcatcaggtgagggtgtgggggatgatgactgtctttcagcagctactaaagcaaggggatttgagaccaatggagctgacttttcgaagctttttgaaggagggagcttatagttatctctgagagccctgtgttctgctgaatggtccatcagctgatggtggtaccacttcgtgagttttctggcagagtcatggaggatcacagagtacataagtatggaatgtgtgagacaaccaccaactattctcttcttagatgcagtctcttgaaggacagcaaccctcccactcagttggattctttgaatattattttgttcattctcacagcatttaataatagggctttttatacagatatccacttggggattttcttcaatttagaggtctaaagtagattttgtaagcagaccatctccaagtatatttttataaggatgtaattctatttaccttgaagagtatagtagttatttttgcaaaacatgtatttagtttaattttaacttgagagtaaactgagtaggtgatttttttaaaaactgctttcatgtccaagactgtgctttgttatttttgacctgataattccccttctaggaaattatcttttttttttttttttttttgagatggagtctagctgtgtcgcccaggctggagtgcagtggcatgatcttggctcactgcaagctccgcctcctgagttcacgccattctccagcctcagcctcccgagtagctgggactacaggcgcccgccaccacgcccagctaattttttttttgtatttttagtagagacggggtttcaccgttttagccaggatggtctcgatctcctgacctcgtgatctgcccgcctcggcctcccaaagtgctgggattacaggtgtgagccaccgcgcctggccggaaattatcttaaagatgaaattggacatgtgcaaagatacgtgcaataatatatattacaaacttgatcataatagggagataatggaaagtgcctagatgcccagctaaatacagtcatatgatatgccatgtagccactacaaagaaagatttacatgatattaattgacttgagaagatgtttaacagtaagtgaaaagtcgcaaagtagcatatataacatgatcccacctgtatgaaatgttatatgagtatgtgcctgctcattactcagtaaacagctaagtcttttaggtgccagggactgtcttagatgctggggtagaatgatacccacaggatccctgacctcatggtgtacattctataggattgagtgtggtaataaaggaaacagatgaggattcatgccagtgctaagaaggaaaacactgtggataagagagagactcacagcgtggaaggaggaaaccaagtgaaacctctctaaggatatgacatttgagctgaagtctgaaggtcgagatggagccagcagcagggaagactgaggaagcccatttcagagggaatggcccaggcagatgctctgagattaagtatattaatatacttagtatattctaagaatttagggaaggccccaatagaaggagcaagggtagagtacataagatgaagtcaggaagggtgtgggtgtggatggtgggggtgacccaggaccttacaggccgtggtaaggagtttggattttattccaattgcaatgaatgggtagtagtcaaaggactattttcgaaggcatgtatgtttcagggtggggaattggatgatatgggcagtagagaaggatctggaaggattgctgatggcttggatgtgacaggtgggaaaaggcaggatcaagggcagcttctaggtttggggcttaagcagctgggtgcaaaccactgtcacttaaggaggtggaggagattgggaaaggtccagttgattggccggggaaggatgaggatggatatgaaaggtgagattcaggacatgcattccatatgtgatttcagcatctgaatggcattgtcatgtaggtaactggatatctgagactgaagctcatggctgggggctggacatagactggataagttgacctagggactcagtatagagaggaagcccaggacaacattcttgggctactccagtgtgttgaagtcaggtaggggagatgaagccagcaagaggatgagaaggagtgactaatgagataatcgggccatcacccccaggccttttggctaagatcaagtgtggagataactgggctgggggaaggcggttaccgaggatcagagtttgcatgtatttatgtacttgcctgtgaagtaagaggtctagattctaaatggatgttctagaaatgtcagctgggtttatttctgtgtggtgatatttaaagtaaatttaatttctatcttaggccattctgtgcttttacaacttactgaaagatagggggtcgggctcacacctgtaatcccagcactttgggaggccgaggcaggcagatcatgaggtcaggagatcgagaccatcctggctaacatggtgaaaccccatctctactaaaaatacaaaaaattagccgggtgtggtggcacgaggctgtagtccaagctacttgggaagctgaggcaggagaatcgcttgaacctgggaggcagaggttgcagtgagccgagatcgtgccactgcattccagcctgggcaagacagtgagactctgtctcaaaaaaaaaaaaaaaaaagaaagaaagaaagataggagttactttgtgaaacaaacaacataaaagtttataaagagttaaattttttgctctctccagcctttcctcttatccatgatccagagacaaccacctcttgatagttgggagtatattcttccaaagattattgtgatgcttacacaagaatatatacaaatatttacacatgtatacttatatatgtttttgtttttgtttttttgagaaggagtttcgctcttgttgccgaggctggagtgcagtggcacgatcttagctcattgcacctcctcctctgaggttcaagcgattctcctgcctaagaggctgggattacaggtgcctcccaccacacccggctaattttttatatttttagtagacagagtgtgtcgccatgttggccaggctggtcttgaactactcacttcaggtgatccacccactttggcctcccaaagtgctgggattacaggcataagccactgcgcccagcctataaatatgtattaattgattaattgatatactaaatatatattattagttcactcagcaataaaaataggactcgcctcttagcaatacaagatcttattttttaataactgcaaaatagtttataaacatgctataacttatatatttttccctataatggacatccaggttatttttaattattattcaaaaatttgtagtgaatatctttgtacacataccttgaattacattattgaggaaaaaaatactgttttcttttgaggaaatagcaataacaacaaatctccaaatcaaaataagactaaaagaggatattaaaaaaagactaatctgggctaagaatattggaataattcccagctccaatagagaattggattaaatgtgaactaaatgtgcatgttacatttggtcacaagtaacagaaattggactctggcggctaaaccaaatagggcttttacttttttccctgtgaagagcagcagcgtagtccagggctggtggtacagcagctttaagtagtcattagggacctgggttctttgagctttttgctttaccgttctttttgtgacttgggaattttataatcacagcatggctgttgtacctctaggtatcttttctacaccccaggcaggaagaaggagttgagtaaaactaaaaggtaaaagatgtatgccaacatcctcccctctttcgctttttatttatttagtctattttgagatgaggccttgctgtgttgcccaggctggtcttgaactcctgggctcaacttatcctcctgtctcagcctcccaaaatgctgagattataggcgtctgccaccatgcccagcttcctccccactttttaaaatcagggaaacagttttcctggaagcccaagctgatagattttgtctgcatcatagtggccagaactaggtcacatggctcaccctagttgcaagggaatccggagaggtgaaaatttgactgagtgtgtcacagcactccccaaaagtgggggcttctgttaataaggaaacaggggagaataggtgttagataggtaactagtcatgtctgtcatgcctgaattaaattacacatgctgcacacagaaaaaaatggagaaataacttatatcgctcaggtgattctgccattcttctcagtaggcatgtgccctggagtttgggtgggatgggagaatctgttccctcagttgatatcagctcctaccaacctcttatttatgagcatctaattgggctgataggtggggcatggtggctcacgcctgtaatcccagcactttaggaagccgaggtgggcggatcacctgaggtgaggagtttgagaccagcctggccaatgtggcgaaaccccgtctctactaaaaatacgaaaattagctgggcatgatgttgcacgcctgtaattccagctactcaggaaactgaggcaggagaatcacttgaaccaggaagcagaggttgcagtaagccaagattgtgccactgcactccagccttgcgacagagtgagactccatctcaaaataataataataataataggtctgattgccaatctggctattaacaacatgtagttttcctagtgtggcccctaaagccaggccacccacttcatctggtgctataacagagaaagagctgtcttatctccaacatccaacaaaatcacctgttaggttaaactatcgagagatggcaggtacatcttcagagtggcatgtgttgaagagatttctgaggataaccaggcagtttctgccgaggacactgacatgagcttttgacaaccatgtaagatgcttcactgaatacctgagttagtgagatgtagcggataaaaaggaatgatgctcctattggctcacagggttcttagggactaagaggaggacagttcggccttgactaattactgctctccttttccttttctgccagcctgggctgcctgaagacgaagagaaagagcaaggttattgttggctcaggccttgttagccagacttcgtgctctgtacgcattcaatttcctcccctccaaacatcatccctgggaactgctgagttcagatagaatatatgttggtagtttgcagttgggttattatccatttgttcataaaaattaaccttttgtattaaaatttggtcagatagtattaatagaaagttcaggatgttaaacaacttggagtggtgttgctttttttttataaaagtaaaatggacttttttttgtttgagaaatgtcttcaagttttgtgtgaataaaacactttagcagcatctgtataaatacaattggatgtgtctcttggaaggagaaatttgagttgaagatgatgaaggtagctcaggtaaaaatggtggctttacatttgttttaattgattaattaatttttttgagacagagtctcactgtgtcacccaggctggagtgcagtggcacgatctcagctcactgcaatgtccgcctcccaagttcaagcgattctctgcctcagcctcccaagtagctgggattataggcgtgtgccaccacggctagctaatttttatatttttagtagagacagggtttcaccatcttggccaggccgatcttgaactctgggcctcgtgatccacgcaccttggcctgctgaagtgctgggattactgacatgagccaccgtgcccagcctgtgatatgttttgaaaataaacttattaggaggtctcatttgatctgcaaatattctcatttctccagcacttcaacaaaagtgtcacctttagcagggcagaaatattcatcatgttgttattaattactagatgctctagtgaagtttgagtggatgaaattgcacatacaggtaagcatttgaatttattttggaaaaatggagcctacatcatttaaggccatctacaaagtacctttgttcatgactggataagtgaagtgaaagactgcagactgaatactttattcactatataataaaacttagttacattatgtaggttattaatttatagtttaatttgtctaaaacgtttataattcctattttgccatcttctatataatttttcttttttgagacggagtctcgctcatgttgtctagtctgaagtgcaatggcccgatctcggctcactgcaacctccccctcccaggttcaagtgattcgcctgcctcagcctcccgagtagctaggattacaggcacacaccaccacaactggctaattttttgtatttttagtagagatggggcttcaccatcttggccaggctggtctcaaactcctgacctcaggtgatccgcctgccttggcctcccaaagtgctggattgcaggcatgagccaccacacccagccaagagcacttattttttaagtccaaaaaacatgaatgaggttaactaacttcatttcgtttaggtatatccagttcagggctcacagtttctcatgacctgagagtgtatggatttcagtgccattacatggactgtcttcattgaagtacgtctgaagaatttatatgacttccagcacctagtgagcatatatttgagcactgttctctacaaacccttgagtaagctgatgtggcagatgttaggatggatacgacgctatcttagctgcaaagaacttagtctagagaggacagtaagacacccaggtcactgtaaatcaaggctctatgtgacaagtgccaaaatgaagtgtaaagtgatcaccatcgggattatgaggaggtagaagtcatttttgttggggtggcaggatggcttc

SEQ ID NO: 596 - DNA, 120319 bp, Homo sapiens
  source 1..120319: mol_type = genomic DNA
aagcaacatatgagtaggtgagaactgaagtctgtaaatctgggtgttatataagcactattatctgggacctcagcattccaggaaagcttcctggaagaagtgagtttcaggtcaaaaagtgggccaaaggctgatctgcctcactgaatgggcacactgttttcatgaggtagtaatgtttccatctacacagaaagaagctgctcggacagctgatgagcatcatgcctgggatattgagcacatcatgcttgacctgggcagagtttgtgggcaaggaaaggggctaagggtcaagataatctctgctggggttgttcaaatttattacccaaccatcacctgagaggttgtcccctgaggatggcttgtctggtcattactgaatgtctgcaggggcatggcagtgttctgcttggctctgggggctctgccctttctaggacaagtcccagagacaaacagcttggcccagtacagcagaatggggtgagagaggaactgagttcgtttgcgggcaggatggaaacagctgatggaggcttctcgggccatcctcacgtacccatcacaagcgaagggaattaagccgccaaaccaccccaaagagtgactccaactcagccctaaacacccatacccaccccacctcccctgcagctctgacaggccaagcctgggcgctagaaccccgcgccagaaggccgggccacacactccagcgtacacgcgcggacacgtgccggtgtccagagccggtgggagaggcgctgtcaccatctgacaggagaggaaggtggagcgcagagaagtcagggtcacgtggtaagtgggggtcgtggtctggggatcacggctccaggtctcttcgcgacaacgcaccgttgacccccaacacctctccctggcggggtcggtgaccgcaacagcctccgggatagaacgctagtgaaaggtaacctttctccagcccgctccacgcgctccgcacccgctaagcgcctccgcgaattaactcaggcctccgcgccgaagtaggcgcagttatgaccccgcttccccgcagggagaccgaggcacgcagggtcgaaaggactcgtccagggtcgcaggagccgaccacacagggaggcgcagcgcccccggcgggaacagtcagcgggtccagcctggcggactcccgggccgggctgcccatataaggctgcgggcggccggcatcgcagccaggctcccggggtcgccccgcgcggggcatcctcctccgcagcgaggaatgcgtggcatccgggaggctcttccgctccacgcccgcctgcggggagcctcagccccggggcgcggcctcgcgcagctgcctggccgctggggggagcgcggggccgggcgggaggcggcggcgcgccctcacctgccccaggctggggaggcgcgagtggggaggaggaggaaggggaggaggccggggaggagcctggcgcggcgggagcggcggcgcaaagtgaaactctggcaagttgcgggcgcgcggggagctgtcgcgggcagcgcgccctcgggaggacgtggccccggcccccgcccgcagtgggcccgaccctcatggccctgagcaaagggctgcggctgctggggcgcctgggggccgagggggactgtagcgtgctgctggaggcgcgcggccgcgacgactgcctgctgttcgaggccggcacggtggccacgctgggtgagtccgggccgggggcagcgacgcccggaggagagggcgcccgcattcgcccagcctcgggaagacgggtacccccccttcccgaggggatcgggcggcgctgggactgccggggcgtaggggtcgcgcgcagaggggtggctgtttgaatgaagtggggctggggactcgagagagcactctggctgggccggtggcgcacggaggccggccgcccctccacggggatctccggcccgcgccgccagaggatatggttgctggatagccggctggggcgctttgcgtattcatgaggatcccggggtgttgacttagccggcctgaccctgtgcctggcgccttttcttttgcacctgttgatgaaaccagtgattgccctttggtttgtgttggcggctccactcctggaggggatggggacaaaagccccaaaacataggctctggagaaaccgctgatggcagctttgtcccacgtaaatacttggtcgagaagcatcggtgctgcaatttatagaacttgtaaacaaatataccatgacctttatgctgtcttagatcctgccaagccagcgaatttcacctatggacttcagaagccttgaaactggcattgtgctatgggctttagtacgtgatctcacttaattctcacaattctactaaaaagctattattatccccattttgcagatgagcaaactgaggcctaaagaggctaagttgcttgccaaggtgacaccatccacctgacttttatgtggctgtttctgtaatgtcattcaatgcgtggcttcctggtatcgctaacctgggtcccttgttttgtgctaaccattataaggaaaacctgggtagcaccaaagcacgtgaaaccaggtctgattgttagacttctaaatgtggacacccgagagtaagctcccaccactaggcgtccagctgtaacagcttgccggtattcctagctaaacaaggtgcagcccggggtcactcgtacttgaggtggtcggcaaatgcagcaggctgctttgtagatgcctctagccttcttttcacatttgtatgcatcgactcccgttcggatgtatgtcttggaaggactatctctcctatttctgattccctaatcatttcattaacatgcatttatccagcttgttctcagtcacttgattactgaaacaatgtctccagtagtctcagcatcaaaagtaggcagtgaattgtagattaagttattttcagattattctaatttgtgctgtcctgaagagtctaagtttggttatttggtgtggccttgaaagaaaaccacagaaatttccattccattttagatgtctacttcataccacatttatcggaagcgaaagagtaatttcatggtacaaaactactgtttcatcaaatagattaagatgtccttcagttggattacggcaacattaagccaagttcatacacattcaagaattctttgaagcagcttagaaaaaagagattttattttttcaaaagtgaagatttaaaaatgattaatgacagtaatgtagtgcatattttccattaggagctgaagtttgggctgagatttacatcacggtggtgattacagtataccagattttagaacagagaatgtaagaaaggaattggctcgtcttcaactcatgtgcagtccacatttgtcatttaacctagcattcatttttcagtagaaaactttaaaaaaaaattttttttttttttgaaacagaggcttcttctgttgcctaggctggcatgcagtggcacagtcacagcccactgcagcctcaacttcccaggctcaagcgatcctcctgcctcagcctcctgagtagctgggactataggcacatgccaccatgcctggctaattttttctctttcttttcttttctttaaatggggtcttactatgttgcccatgctgttctcgaactcctgggctcaggtgatctttccgccttggtctcccaaagcgttgggattacaggcatgaactacttactgcgtctggcctgaaaacttaattttttaaagtctgttttgtttaagtaaaatgaaactatttttaaaaagcagctgtagcatttggtggctttgctggtccagagaatgtttgtaggagagagccttatgttactagaaagttgtttaaaactttcaacatatcctaaatgcatcactattggataaaatggctctgaacttgaaattcccatctgtgttccaaagggctagctagctgttttactttcctttcttggagaaagtgattattttttttcttttttttgagatggagcttcactcttgttgcctgggctgagtgaagtggtgcgatctcggctgactgcaacaccgccacccccacctgggttcaagtgattctcctgcctcagcctccccagtagctaggattacaggcacacgccaccatgcctggctaatttttgtatttttagtagagacggggttgtgccattttggccaggctggtttctaactcctgaccttaggtgatccacctgctttggcctcccaaagtgctaggattacaggcgtgagccaccatgcctgacccgagaaggtgaatttttacaagaaggctgcaatctctacttttgtatgggacaggacacttgtggcagctggcgtagctggtggtctaatcttgacctttcaccctttccttgaagttccgagtcgggggtagcttccttttctcttcagctgtggttttcctgtgatgggtccctcccagttagtaatgagaggctgagagacaagttgtggtaactgcttcgtgggtagtggtctttcccggcccctgagtcattctaacttccatcctgctccgctgcggatgcacatagctgctttcctaggggcgagaggagatgaggggactgggcctgatgaccacaggcgctgccccttcatagcacattttattcctgaaggatcctaactggaaaagtacctctcgccgaaggggctgggtggttccttatcattttcaggcaaggcctggagacaggggcttgaactgggctgtgatttttaggaaaaacggatggtccatgattcgttgattgctggactccttccatctgaacctgtcttcacctgtcttcacctgtcctgctctaaagtgaactcttcacactagggccgtctggcctgctagcaggattgttgaaggaattattccaaattcctgcttctaaaagaattaggttgtgaatctgaatctgtcttttatgtagatcagtgggagcaaaaattccagaggcagaaaagccaaatgtattggcactgatttaaaaggcttttatgaagtctcgggaacctgactggagggtagttggccttctcagcacaggtgggaagccccgtagccggtaccagcatccctggccaacaatccacaattagcaaacagatgttcccttatttgcacatgggacaaaaacctactcctgtctctgtctcttgtaaacttagggaaaagtgcttattgttaatggattttgtgtattttcagagtaagcgacagtgttccaaagttcaaggttctccaacagcccccaggaacggtggcctgagggtgtccctgtgtttacagtgcgggctgtgtgtgagtgaagtcgtgcctcctgccgcccagccgggctttgctgtgaacaggcagcagggagggagggatggggcaggagacttgagagaattaattaagttaattaatgggtgtccctaaattactttgagcttctggggggaaaggttctgtgtaaacaccaggcccccaggttctcccagctgctgttgtgcgaggccacgtctcgagtttagctttgtttgaattggtgagatggccccagggcagagcaggactcagtctgaactgttgcctagatcactttctcaggcattatggccagatttatttggtcacggactggaattttgatctgctagagaggaccacagagaatcaaataagtcaccattttataaatgctcctggacaaagttgaaaccacaggtaggaccaggcaagggttccggggcccctgacgtgggaaactagagcagcgacccgggaccacagtggtctgtctgcctccaggactggtttgcctcctctcctagccggaggctgtctcagcgtagtgtttacaaaatgcaaactgggatggtgtgtgcttctcccgcgggttttgtttgtttgtttgagacggagtctctttgcccagctggagtacaatggcgcaatcttggctcactgcaacccccacctcccaggttcaagggattctcctgcctcagcctcctgagtagctgggactacaggcatgcaccaccacgcccggctaatatttgtatttttagtagagaaagggtttcaccatgttggtcaggctggtctcaaactcctggccccaaatgatccgcccacctcagcctctcaaagtgctggggttacaggcaatgagccaccacgcccggccttccccgtgatttttgtagctcacctgtaagatcgtgatttcaaatcttaccaggctcttgttttggctgtgtggctcaaaaacttggcttttagcctttaattgtgaaaacgttcaaacacaaaagtagagggaaaaatgaatcccctgtctacctgccattcggcattgatagttatcaatatattgccatttttatttcacttgtccctgtattttttatgaaaacgtgaatctcctaaaatttagtttgtttaaagccaggcaagattctaatttgttgggttggcttttttttttttcttgcatttagatatagaagttcaatttttttattttattgtaaattgacaaattattatcgttttttgagatggagtcttgctctgtcgcccagctgggagtgctgtggcacaatcttggctcactgcaacctcttcctcccaggttcaagtgattctctggccttagccttccgagtagctgggactataggcgtgtgctaccatgcccggctaatttttgtatttttagtagagatggcatttcaccatgttggccaggctggtatcgaactcctgacctcaggtgatccacccgcttcggcctcccaaagtgctgggattataggcgtgagccactgtgctaggccaacagattaggatgattatatattatggggtacaaagtgatcatatatgtgtacaatgtggaatgattaaatcaagatgattaacgtagtcatcacctcaaatacttctttgtttatttatttatcttttttgaggtggagtcttgctctctcacccaggctggagtgcagtggcaccgatctcggctcactgtaacctccgcctcccaggttcaagcgattctcctgcctcagcctcctgagtagctgggactacaggcgcgtgccatcacgtccggctaatttttgtatttttagtagagatggggtttcgccgtgttggccaagctggtctcgaactcccgacttcaagtgatccgcccgcctcggcctcccaaagttctgggattacagacatgagccactgcacctgaccacttattgtttgtagggagaacatttgaaatttactctcctagtgatttcaaaatatacattattattaactatagttaccatgctatgcaagttcgaaatttacttggcagatttcgtgtggccagcagcagaaatggtggcatgaactgattctgagacattggccaagacacatttttaaaagcaaagtgaccacttgggaagggtcgaccacagcctggaagaacagggagcgctctgctggtgagctcgggaggacaaggtctgggccctttgacggcactgcctctagccccgggcaagagagggccgagggccatgtccagtggcctctatgctcccctttctggatgacattcctgctgctcaagaccctggagtgtgctaagcacatagtgcagcctgctcagccccctcccagggcctcaggcagactgtgcagccgtatgtccaccccaggcccgggcgttggggtggcaagggcatgttacaggtggaacgggacacacactagctgggactctgtgtgtgtatgcacgaggctccctgcaggggggcatgaagcccaggttgggggaagtcggggaagagaaggtggccaggctggggccgccctccccactggctacataatgaacctggccttccaggtagtcacggtggcatacttttcgaggtaggaggatagaacctattttatttaactgttttactttgttagcttgatttaaaactgaacagctgggcatacaggatgcagcactcatgagtactctggccccagaccctacagatattcaggcagacctgtcctgggcacctgtcccagcccgtgtctctctgctgtgtctctcttctggagcgttcctggggtgctcagggtcccctttgtgctttttggctgctcagtttctgttgctgggctccttcggccttcccactgaggatggggaatatattctgttttctttccacttgaattgtccttaaagccatgggtaaactggttcaggctcagacttgggaatttgatcggagtccctttagcatttctgggcagggcttgttggtgtcgtggccagctgtcctcgaggtgaaaaccaaattgggttgggagggtgcacatgacacttaaagcccccagagctgcggtgccatcaaccacacactgtggacaggaggctgtcagtgggcaggctgggtccaccttcaaagtccatacgaaacagcccagttcagggtactgcttcttttcgagatctcacgggcaggagccttctggcactgttcatgtaaatgtaagtcattctttctttctggaggaaaatttagacaggtgaatgaaaaccggagtgcttaatccgctattctacatgcagaagtttatctcaggaaacagtcccagatcactagcccattttgcttcaaggatgtttattgcaagctgttttgagtttttcactggttaaataaactttggttcaacttgatcataatagctgacatttgtggagtgtttaccacctaccaggtgctgatccaagtggcttacatttattaacttacttcatccttatgtcaaggcaagtactagtaatctccattttacacttggggaaactgaggcacaagaggcctaagaacttgcctgaggctccacctccagtggaaggctccagagaacaatatgttcagtaaaatctcattcttatgtaaaaaaatgaatatatatatatatatatatatatatatatatatatatatggaaaaagactccctttgtcctgttgtctctggcttatcttggttttcatctgacatacacttttgatcgaggaggttcccacttggggaaacagccagcccctttctgagcagagggtgtggcactacaaaggcgaaacatgatctctgggagaaacatgcttgaagcccacgctcctgggggcagagctgagcctccacacggatgtccccagcactgggagcagaggctgatgcggccccaaggtgctgaggaaagcgccccccagtgcaaaggatgctacaaggccccaggcttctcaaggaacatgaggcctggcaaacccagaacgttagactgggtcggctccaagatgcccctgggtttgagctggagaagtgtctgcgggagggtgctggggctcctgcagagcgtgtcttcctgaccctgtgggcttttctggggggggctaggaggctctgccaagttggtggatggaactgtgccttgccctggggggcactgggcaggagccagcctcggagcgtgagtctggtgctgcgccaggaggctagatgccccggccaggtcctgtgggctgcgccgtctgtgcccttggcccgcgaggctggcaggctgccactgcttgtaaagcctcctggttgaaaaggtgactcggagcagcggattcactgggagcctgtcagccacagaggcagcttgtgcttgtgccccaggcccaggccgcaggaggtgggatcaagttccacggctccagtgtgaaggtctgagcttcattctaaggcaggtttttgaggacatggggctctcgggcacctggttgtattcctgcatcctgcattcctgcccactctctcatgccttcttctccttctccttggcgtgccccaagccagccttccatctcagatggagttgtatgtttctagtgagcccacacaccccctgaggacagggcctcacccccgcacgcctgcttcttcatcacagctgctaggaaatgaagatgcatgtccccaggggcctttgaagtaggatgtggtctccctgagcagaactctgactctaaattctctcctggctctggcgttggtgtgggacttgggttgcgggagggggcaggttgttagcggctgctgctcagacccagcggaggaccgggctgctccaggctcccggcaagatgtagcaaaatggccaaatttaaggtgagcacgggctcccgtgcagtttctcacccctgctgctggctgcctgtctgtgaatgctaaggcgaggggtggttctacattgacttcttactgactggtgggagtaacccggaagaggcaaatgacttccttccctttcctcggctctgaacctagaatgttccagtgataccacctccaaactcttcacctgtgtcctttcccacctctctgccctgaggacagggaactaagtggctgctcacggtgggtaaaactgaggcttacaagacaccttgggcaatgggacagccagaccccagccctcagcacctgcctctcccatcccaagccccagtctctttttcagctgcaaagtcaatacctttgctttcagagagggagcatgtgccacgccaggagaggctttgggtgtatcacagatggagactgcctagcttaactgcgcagtctgaatgattctaaggaggggaagagagaacgcctctggagcctggcacacacatttgccggagaaagtggtgagtgcgttgtgaccaggtgagggacgaaccttaaggagattggctgagaacacctcccctcctcaccctaagtcaacaaacccgggacagcagtgcttccaaaaccttacttgttcacctcacctggagattcttgtggcaaatcgggttctgcctcgttggctctggggtgggccttgagagcctgccgttctaacaagctcccaggtgatgctgatccacgaccagctttgagtaccaggatctcgcatcagcttgggagggaggagacctgaatcctagccctggctccttaggctcttctttccagtgggggaatttagttaattgctccgggccccaatatcttaatctgaaaacaaatgaatgacaacctagttgcctttcctactctgagattccatgcgtcttaaaagaaaaaagttttaaaactaaacatgtcactgtcaccatcgctacttcacacacctaaagttataaaccactcagaaatgcaaatcttaggagatgtgatctggcaaggcaaaatcgaagatggctttgaggtctcagctaaacctagaaatctgatgctctgcattttttatgggatgcttatgaattaatgaaaatacatgagattatctctccttgagtctaccctttcctacaaccagcaaaaacttataaaaagcaattgaagcttactttgggaatgccaagggattgattaaaatatggactgtgctgattccatggctggtttagcagattcttgttaaaagccatgactttttaaaatttttatttttttgtgggtacatagtaggtatatatatttatgggatacatgagatattttgatacaggcatgtaatatgtaataaccacatcatggaaaatggggcatccatcccctcacacatttatcttttgtgttacaaaccaattatactcttttagttattttaaaatgtacagttaaattatatagtcaccatgttgtgctatcaagtaccagttcttattcattccttttatttttatttgttttactcattaaccatccccacctcctccctagacccccgccgctacccttcctagcctctggtaaccatccttctattctctatgtccatgaattcaattttgatttttagatcccacaaataagtgagaatatgcaatgtttgtctttctgtgcctggcttgtttcttttttttttttttttttttttccttttttttgagacagagtcttgctctgtcacacaggctatagtgcagtggtgcgatctcggctcactgcaacctccgccttctgggttcaacctcccaagtagctgggattacaggcacccaccaccacacccagctaatttttgtatttttagtagagacagggtttcaccatgttgtccaggctggtctcgaactcctgacctctggtgatccacccgcctcggcctcccaaagtgctgggattacaggtgtgagcaggtgtgagcaactgcactcggctggctggcttgtttcacttaacataatgacctccagttccatccatgttgttgcagataacaggatctcattcttttttatggataaatagtactccactgtgtatatgtaccacattttctttatccattcatctgttggtggacactgaagttgcttccaaatcttggctattgtgaacagtgctgcaactaacatgggagtgcagacatctgtttgatatactgatttcctttcttttgggtagatacccagcagtgggattgctggatcatatgatagctctacttttagttttttgaggaacctccaaactgttctccatagtggttgtacgcatatagtacatatagtacataacatatataacatatgtatactacataacgtatatatagtatataacatatatagtggttgtactaatttacattcccaccaactgtgtacaagggtttccttttctccacatccttgccagcatttgttattgcctgacttttggatgtaagccattgtaattggggtaagatgatctctcagtgtagttttgatttgcctttttctgacgatcagtgatgttgggcaccttttcatatgcctgtttaccatttgtatttcttcttttgagaaatgtacattcaaatcttttgctcattttttggatcggattattagatttttttcctgtagaattgtttgagctccttatatattctggttattagtcccttgtcagatgagtagtttgcaaatatttcctcccattctgtgggctgtctcttcactttgttgattgtttcctttgctgtgcaaaagctttttaacttaatatgatctcttttgttcatttttgctttggttgcctgtgcttgtggggtattgctcaatacatttttgcccaggtcaatgtcctggaggtctttcccaatgttttactgtagtagcttcatagtttgagggccatggcattcttaaaaacataactttcattcttgcatagctttttttttttttttttttttttttaagtaacctggactgtcatttggctagggaggcgggagtttgtgtgtctggaaatgtgtgggtttttttttttttttttttttttttttttttttttgggacggagtctcgctctgtctcccaggctagagggcagtgcagctacctcggctcactgcaagctccgcctccctggttcacaccattctcctgcctcagcctcccgagtagctgggactacaggcgcccgccaccacccctggctaattttttgtattttttagtagagacggggtttcaccatgttagtcaggatggtctcgatctcctgacctcttgatccacctgcctcggacttcaaaagtgctgggattacattacaggtgtgagccaccacacccagccagtgtgtggtcttttttatctgtctgtttaaactgtctgttttatatgttgcatgaaccccgctttaccatgaatcttatcaatgactgataaatattgtctattggaaacattctctttaagaggaggtgaccgttctctgcagctcctgctgattcagcaaagctgaggtcaggtggagccagctgggcagagatgagtgattagaaggctgtcattggcagtgacagtccacgtgctccagggcagaacagtgacactggctgtcacagtctgtttcaacaatggaggttgtttgtttttatttaaatgatgtgaataaagaaaggaatctttgaaaactaaggctggagctgcccaggcctgagccaggcccttgtaacaaggcccttctgggtgggggatctacctctcttttcacctggaccacctggcggtgggtggcgagctcagaaccacagctgggtggaaaatgggagggccagcagcgagctgcaggaatggaattccatgatggcatctcatgtctccagagtggacagacagaagcttgtgttttcatttcaaagggcatctgccacgccctccaggcagaccacataaatggcatttttgggtgaggcctgagggattctgtctggtggtatacactgattttaaccagaagcaatagatttgggctctttttgacaggggaagatagatgagagatgatttccatgaggatgttgaaaatattggcaattctgaagaccccagggagtcccagggggttcctggccaggagcgcccctccattgccctgcaccaccttgctttccaggctgtggctctgtgtgtctgaatctacggcatgggggcacttccttctaattcacagaagaagctatatgggccccagactgcccatcctgctaaaactggcaaaggccttttcccagcctgagcagtagtgattcagccaactgcagaagtggtatttggagctcacccttaaaacataaagcaagttatgttcagactatatacaggcaatgagaaaatatgatgaaatatgactgcgtatgaatagccccagacttctagggcctttgagtgtgtctgtcttgggcaacatcttctccttttagatttcaggctcagtttactgtcaggaaaattaagttgctgagagcgtctcagaattttggcttaaaagagaatatacacctggaacaaagacttgaggggtgctcctattaaaaaaaacaaacagtgtgtgagcttcaaaggagcaccttgaaactccagttccatcacatccactctgctgggccctcctagggcagctctctgtcttgtgcctgccttctcttctgaacactcctaaggtattttgagtgcggaggataggatcatacactcaggaaagccgagagctagatcctgaagcatctgtgcgggaaatgcccatctgtgcctgaaatgagcatctgcgagtgaagtgatcccatgtctgggatctgtttggcatgcgccaggagacagacggacacatgcatgcacacacacacacagcggggacggggagttggtgaaataagagtgggaaaatgttgacacctccgtgagccgggtgacaagctgcttggtggttcactagacagggagttataaattggccgcttttcaacatcgacagataaaaatcaatagccttcccataatgccatcattaatcaattagagtctgtaatgggaaaagcagatgccactcccccacagtttctgggaataaacaaagtgtataaggcctaaaagaagaaagctatagaacttgactgaagcccacatctgtggaaaggcatactatgttcttggagtgggaacatcaacactatagagatggcagttcctctccagttaatctggaagtgcaagtatcgatgagtaaatccaattaaattccaacaagagcctggtctaaaatgtaacaggctgattttacagtatcgctggactccccctacatccaaacttattcttaccttcattctcccattttggttaatggcagcaccatccaggcaactgctggtaataaaagcctgtgagtcattctgacgccccttccttcctcagcctcatccaacctaccagccagtagtgaatcccaccccaaaacagatggtgaatcccaccgagtcccccggtcatcgctgctacatcgagagtgcagccactgccccatgtgctttcctggtctgcttggcagcctttgaactagtctcctggctcttcccctgctccccgtatagggatctgcttgaagctcacacagccctgatcctctgcccctgcctctttctccaccctcatctcccaccatttcctgggctcactgcattcagcagcctgacttgttcctgctcagaatcttcacacccacctgcatgcactccctcccccaggtgatatggtttggatctatgtccccacccgaagtcatgttgaaatgtgatccccagtgctggagatggggcccagtgggaggtgattgggccatggtggtggtttctcatgaatggtcagcaccatcccccctggggttatcattgaaacagtgagttgccacaagatctgattgtttaaaagtgtgtggcacccaccccaccctcttggtcctgctcctgccatgtaagttgcctattcccactttgccttccaccatgagtaaaagctccccgaggcctcccaagaagcagatgctgccatgcttcccgtatagcctacagatccatgagccaattaaatctcttttctttataaattacccagtctcaggcatttctttatagcagtgcgagaacagactagtacaccaagggttggcctggctgctgctgcctccgtctccccacctaccccacccccccccacccagcttcgtgactgcagtaagaccttcctgacctctgtggctggaataccctgcagcccccacacaccaactgtctctgccccatgcctggtttcctttcttcttggcgcttatcactgaaattaccttatgtgtgtgcttacgtgggtgtcttctgttgtccactgcaaaaatgcattgtgggttgaattgtgtgccccagaaaaatacattgctgtcctaacccgggataccttgcaatcttatttggaaatagggtctttgcagatgcaatgaagatgtaagttaagatgggatcgtactggtatagggtgggcctttaatccaatgtgactggcgtgcttataagaagaaaagggacacaggcagacgcacgcagaggggagaatgtcatgtgaaggcatacagggaagacagccatatgacaatggaggcagagatgggagtgacactgccgcaagacaaggaatgcctgggctaccggaagctgggaaaagcaagggaagatgctcctacccacgccttgatcttggatttctggcctccagaactgtgagacaataaatttgctgttgtttcaagccccccgttctgtggttctttgttacagcaacccaggcaactaatacaggggcattgtgtatctcgttcagtaccttaccttaacactgcctcgtgtggaaatgaggcttggcaaacactgttgaatgacgaagcattggcaaaaaaaatagccaagattttgaaaaggatccacaaaggcagactgatttaccaggtagcacaacatattataaagccctaaccatcgtggaggctgtcagcacaaatcaacacagtagagtggaaggctcagaacagacttgtgtgagcagtgttactttgtttcttataaaggtgatgacttcagtcggtcagagaaaggtaagggtggatactcagcacctgctgttggtgtggttgatcagtgcagtgcctaagaggcccctgctctattcaactggatattcacgcaggcattcttggccggtctgctcagagaggaataggctggaaaccttggctggccagcaggatgctgcctgctgctctgcttccaggggagcgaggggtcttcctggcagtttttgcaggtggctgcacacacaggtgtccttctggtcactagctcctcccccagctgaaagccctgggtccccaaggagccagaatcccttataaaattaccagccttacagagccctgggttcacacaggggacattccatgttacaagagttaccacacctaaggaagccccatgcctggcttcttcaccgagtggttataattcacttatgggtcttccctgtccagaggcaatttgccaatcaaggtcatttttaccatgagcaatgttgtctagtaacagagttgacgttccatcttgattggggttcccagggaaccagagctagataattaaacattaaattctcatacagaagggaagaaagattttgctaagcctgtgaccaaaactatccatatggacactaagtgagagtcctatgttttatcatacattaaaataaatgcagaggtatttaagtgtaaaaaaacaactttcaaagtattagaaaatataggctatgctttcacagtgttacggcatggaaagatgttctaaggaaagcatcaaactcagaagtcataaaggaaataaacctgacagatatgggaaatatttttattgaagtgtaacatacatagagaaaaatgaacactcgaagcgttgagctccatgaatcttcacccggtgaacacacccacatagccagcacgcagatctggagagagaacgtttgcatcccaggcccctgcctcccattccccctgtgtccgaatgatagatttgactacataaaaatggaaaactccaatatatcaaaagacaccataaacgtagtgaaaagacaagcaacagcccagaaggaaagtttgtgcagccttttgtaacatagaaaaaggccaaagatggatgatcatagcatataaaagaactcctatagatcatgaagaaggaaggacaaatagttcaacagagaaattggcaaaggatataatgagcaattctccaaaggaaaaatacaaatggccaaaacaatggagccagtgtggccggctctgcccagcacggccatttgcacatggtcactgttgggtgggtgagggctgcttgccccgtctccagccccactctcttgccatctccccctgtgattcaggcatggagctcaggccccaggtggcaggcagcgcactctgctcagttaccccagctcctggcttcatggccatgccctggcacctgtctccctccccttagcctgctgacctttttcccatgggatgtttggttgtctctgtacaggctctgagccagccctatgggcttccagacaagcccagattgagcctgccctctagggagcacccctgtgtagcttccagctgagaccttgagacacaggcccagggagccaagctcagggctgcgaacatccaggtggggctcaggtgctagaggcggacaacagcctggtgcaggacccagagtggcaagaggtagtaagggggccatggtgttcagaaattggggcaggtggtgggtaaggcatcctgcttctaaaggccagggtttgggagggcaaggaagcccctggcaggagtcagggcaggcatcccgggcaggtagtgtttgttctgtgaagcaggcttccccaaggaggggccctagagcagaaagctgtgatgtgcaggtgactgggagacctgttctctttcgagccgtgcagctccggttagtggatgacagatttcaagccctgctcaggccagtgtttttcacacatgtttgacctttggttgacagcacacagcacaacagcttatggtccaggagtgcacctcggcatgcagtttgggaatcctggcgatgatgtgattaagattctggggccaggttctcaccaagccaaaaggctttttttttttttttttttttttttttttttttttttttgaggcaggagctaattctaggtacagaaaaccattggtaaagtggaggaagctgtttccagatccacggaatgacggtaactagcgtcacttgagaaggtttcttctgcccttttgtaaaaaatagcatgatgttttctcctagagacagacagggcctctgtacgtaagagcagacatgtatggagaaggccggagagtcacaaaccatatgtgcctgagatgtgccacctgtggggctgtgaataaggaagcagaatcagtgtgtttactcagagctggatttggctgtttgttccttcatctttcttggaccacatgtcctggtgttcagaggctcctgagagcctggggctcagtaggccgtctcatagcccctctaacccaggtgagaaaacaggtcccagtgggtccctaacccatgctcattttctcaccaaacaacaacaaataaatcagaaagtcctgaaaaatgaattctggcctgttttctggattctggattgaaatatggagtaggagctgacttttagtaagttgatcaactctccccgccgaccccctagccttctggaactgtcttcagtaaacacaacccccgccacccctgacctacccgcaccgcactgtggtcggcctcttctttgaacacttcccttacagcacgcactccccccaagctgggccttctcttgagaccactctgctgtccttgggagtgatggtggaggcggggtagacaccctgtccctgtctcgtggtgctcctttgggccacagctcctcttccctccgtaggaggaaccatctggaatccatcttcctccttgaccacacctctccattcattaaggagcagagttccctgctcactgggtctctctacccctcctctgtccctgtctgggtgaggtcacagagagcctcacccgcctgctctgttggcctctcacttgccgtcctctctgccccgttccctctcctgcacacctgtccgcggtatccccagctcttagtgactctagccctctcccgccctcctctgcaccctgcatgcacttgtgttgctgaatgtggccggagaaaaacacagccatcttgactgttctgtgagacttcatagatttccagggctgtgtggaatcaaaaaatcttcctgcatttccccagccatctggcctccaggatgactatttcacatctcctcaagcctttcacatctcatccccctcacacctgatgattttgcttcctatttcactgggaaaatgaaggtaactgagaactttcttttttttttttttttttttttgagatggagcctggctcttgttccccaggctggagtgcaatggcacgatctcggctcactgcaacctccacctcccgggttcaagcgatttctcctgcctcagcctcccaagtagctgggactacaggcgcccgccaccacgcccggctaattgtcttgtatttttagtagggacggggtttcatcatgttggccaggctggtctcgatcttctgacctcgtgagccgcccacctcggcctcccaaagtgctgggattacaggcatgagccaccgcgcccagccaaaggtagctaagaactttcaacagcccccacacctactccctggctctggtacagtggacagcctcccaggcttgtcccccctcccagtgaccttgacccctctcatcttttaagacctcgctcccgcagtttccccctttccttcctaactcggtcatttgcaccattataccaacaggctgtcttagctcacattaagaaaccctctcttgaccctggcctccacctcatctcttggttttcccatgtgacgaggttgtctacacaccttccctcttcccagtctcccttgaagtgactccagccaggctgtgtcctcccactcttctgaaacctttcctcaaggcctccaggaccttctggctgctcagtcttccatccaacagcatcccacagatgaagcattttcttcgcttggcttgtcttacgctctgttctcatcatattgcttcctcactgcctgtttttctccagagcctagaaccatgcctggcacacagtgggcatctagaccctttgctgagtggtgaaattgaagtgtgacagggtgcgtggcttccctgctcaggctccctcagttcccaaagctgtgctccttcctggatctcatgtagcacaaggaggcatacgtgggtcgcaccacatggcttctagaggagtatgtgtgaatgtgttcatgttcatgtggaaatagggaggcggccctgaggtgggaggagccttcccaagaggaatcacctgagagaggaagaagagctggggaggaactgaggaactggtttggcaggttcaggaagaagtgagtgaagaaactggaaaagtagccaggatcagaacctgcagccgcaggacctaatttgttaggacctaaattaggggtgattgtgcaaggcagtgcagcatggaagccccactccaggacttccctggtggctaggaaacattgctccacccctccctcttgtcaaaagagaaggtgcacacacttggagagaaatgggtatttttgtgcttctttcttgttccctgttgggtaggagggttggggctaccaggcccagtgaaaacacagcccagccctgcctgttctgcctcatcctgaagtgtaaggaactgcccattgtgctgggccctgtcactggctctgcccgaggcatatgtggcactgggcctggctttttaaggtgcaaactgttttcctggatttcttatttttaagggaaaaaactcaactacaaagactcagtggccagtcctgtgctcaagccctcttgttaggggagctggcctccctctttggccacagctcagtgcagggaggggtgtggaaagtgctgggaaagggggaggacccaccctccccacagatgggtttctggctctgactgcgggaaaccaaactttcttgtattttctctggctgggttgtgatgtgggcatggcgttggtgggaggtagtgcatttgctgagggtgatgtgttctgagtgtcccctcactccgtggctctttcatgtggcctggactttttggtgagggagcagcagtgggaggacaggagagtcctttagcgggctgatgtgtgtctgccagttggctttgtcttggctcgcagcttctgtttcagacagatgttttgatccccctttgcttagcaaccagctgcagccttgctctgtcttgggaaaaccactgtctttctgaagagctgcttcagctccaaaactgataactctggaaggagcagccaccagccagtcagaactgagctccgaattaacacatgaaggagactttggcctcttgagaccctgaaatacaagaagatggtttcatgtcatgtccaagaatgtggccacaaatgctacctcagtctcgggctgtctgcattgttaaatgacctcattatttttctgacctgtgggccgggcttcgttggcatttccttaaggcgtgttattgtggaaaatattattcaagaaagaagagcatgtggtttgcttggttactgagctggactggctctgggtgaccagagctctcacgcagagccgtgcacggctgctcccactgagaccagcctctgcctcgggatggtctgacccacggagctctgttttgggacccagaatccatgagccacatttgctgtgctgtgggacaaaccacagtttccttgggagcctctcaagtggtggctgtttctcttccacacccttggaccactggagctggagacggggagttccccagcctcctccaaggataagcctattccttaagcctccacaagccccatcattatttatttttatcataagccatgttgttcgagtagcatagacaactttctcaggttaccagggaaacaggactagaaagtcaacccacgatcaaattaccttgccgaaagggaaccagctcagttaacccttgaccccacacgccattgtcagaggcgtatgaaccagagcgactccatcttgaataggggctgggtcaaatggatctgagacctgctgggctgcattcccaggaggttaggcattcttagccacaggatgagataagaggtcagcacaagatacaggtcataaaggccttactgctaaaacaggttgtggtacagaagccggccaaaacccaccaaaaccaagatggcaatgaaagtgacgtctggccatactcactgctcattatatgctaattataatgtattagcatgctaagagacactcgcaccagcaccatgacagtttacaaatgccatggcaaaatcaggaagttaccctatatcctctaaaaaggggaagaaccctcagttcctgggaattgcctacccctttcccagaaatgaataatccaccccttatttagcatataatccagaaataatcataaaaatgggcaaccagcagctcatactgctgccctgcctatagagtagccattcttttattcctttactttcctaataaacttgctttcacttcatggacttgctctgaattctctcttgcatgagatctaagaactctctctcggggtctggatcgggacccctttccagtaacaccacgagactgcgtccctcactgcccctcgtttcggcagttgcatggttccttggtgagttttccctctttctcgctgtcatttctcactatgagtctggcgcttgttcttggtgtcttcagtggccacgtcgttgatccttcggaggaccttcgccccctctcctccagtgagtgaccccacccctgcagccactcgctcccatgccacgcccctgacccctccagcatctgtctcaaacatcccactcttctttctccactttcaccttgtcactcatcctgcaattcccagtcccagtgactattttttttttttttttttgagacagtcttgctctgtcgcccaggctggagtgcagtggcgcgatctcggctcactgcaagctccgcctcccaggttcacgccattctcctgcctcagcctccctagtagctgggactacaggtgcccgcaacgacgcccggctaattttttgtatttttaatagagatggggtttcaccatgttagccaggatggtctcaatctcctgacctcgtgatccacccaccttggccttccaaagtgctgggattagaggcgtgagccaccacgcccggcccccagtgatctttgaccccactgggatggcgacccttagaacccatggccttctcatagcccctcgtctgtctcacaccttccctctttgccatgtcagtgaccagccctgccttgcactcaccctccccacccgcccttctcttgctgggtcctccccacctggtgaaacctcagccctggttacatcctgcactccacgcctgcaccagccgctgtgcagtagaagtttctggagatgccccactaccacacgggcagagcgtaccatcaggtcacaacccctgagccaaggtgggcctttcacttgcgtttctgtgctctgtccactcccccaccctcccagatggcaactccaccctcccctttcctcagctctgctgtgcctcctccccatcctcactttcagctgatggcctcgtcctctcattccaccccaaaatttgaagccactggaagagaattcccgctggctccctgcaccaccactacccgcccaccatgtctgtcccccttcccacctgctccccgcagtgcactgtctacgtttcaggccagtgctacctgtgtgcagatgcccatggcctgctccagggcatggctttcggagctccctgctcctgccacatccgtcctgacctctctcttggctgcattggtcctgacctctctctcagctgcatcaatcctcgcctctctcctggctcatttctgccagcacaaaacttggtataaatgcccctggcctaaggaaatcttttgacccactttcctctccagcagcctctccatttctctgcttgccacacgcacacatgcacatatgcacacgcacacacatgcgcacacacgtatgcacacacgcacgatccatgcacacaatgcatgcacacacaggaaattcctcagagaatcatctgttgccactgtgtccattttctctctccctccccattcaggtttttgcccctcaactttactgaaactgttcctctctgagctgccaaagtctgactaaagtgacaaattctcagtcctcaaattatagatgcagaagcagcctctgacctgctgactgctcttgcttccttgaaacgctttcttctcctggccgccaggatgccacgcactgctgggttttcttgtatcttcttggtcacttctcagtccaccctgaccttcaaacatgctgcacccagaagtcggtgccctccactcactccctaggggatcccctccaacctcatgattattttattttattgctgggattacaggtgcacgccacactcccagctaatttttgttgttgtttgagacggagtctcactctgtcgccctggctggagtgcagtggtgcgatctcggctcactgcaaccttcgcctcctgggttcaagtgattctcctgcctcagcctcccaagtagctgtgattacaggcgcatgccaccacacccagctaaattttgtatttttagtggaggtggggtttcaccatgctggccaggctggtctcgaactcctaaacctcaggtgatgcactcacctcagcctcccaaagtgctgggattacaggcatgagccatggcaccgatctgtttatttttgagacagtgtctcactctgtcaaccaggctggattgcagtggcgcaatcatggctaactgcagcctccacctcccaggttcagatgatcctctcacctcagcctcccaagaagctgagaccacaagtgtgcacaccttgcccgactaatattttttattatatttttagagatggagtctccctatgttgtccaggttgttctcgaactcctgagctcaagtgatcctcccatctcagcctcccaaagtgctgggattagaggcaggagcccccacacccggccccatgattgtaaataactctgtctgctgggacgcctgggggatctttccaaccagatttctctgctggactccagacttgcagagctctgtcgtcagcctccacgcagggctgcaacagagccacggcatgtctggtcccagcagatgctctgcccagacctgtcctctcactctttgctgtcacgccagggccactccatcccttccattgttcaggcaatgaacatggcatcatccttgaaccctgtctttctctcatatcccataaccaatctgtccatggttccaccttcaaaatatacccagatatgtgatgatgttgaggaattgctggtaacttttttagatgtgataatggtattgtggttgtgttttgtttttgtttttgttttagacggagtttcgctcttgtcacgcaggctggagtgcagtggcgtgaccatggctccctgcaacctccgcctcccaggtttaagcaattttcctgcctcagcctcctgagtagctggagttacaggcatgcaccacctcacctggctaatttttatatttttagtagagactaaaaacagggtagtggtgtgatcacagctcactgtagtcttgacctcttgggctcaagcaatcctcctgtctcagcctcccaaatagctgggaccacaggctcccaccaccacgcctggctaatttctttaaaaatttttatagggatggagtctcactgtgttgcccagtcttgtcttgaactcctgggctcaaccagtcctcctgccctagcctcctaaagtgctgggattacagggagggagataccatgcctagctagtttcatttgttatctgcctggtgtgtgtagacatctgctttgtcacctccattgtggagagcaacatggggtttcaccatgttggccaggctggtcttgaactcctgacctcaggtgatccattccccttggcctcccaaagtgctgggattacaggcatgagccaccacgtctggccatggttgtgttttttaaaagagctcttatcttttccagagtcttactgaaatatttacagatgaaataatgtgatgcctggaatttactcacaataacctagggcagtgcttctcaagctttggcatgcattcaagtcccctggagggctcattaaaacagctttctaggtcttgagcccagagcttctgattcacaaggcctggggtgggccccgtaacttgtatttctaatgcttggtgctgctggtgtgaggagcccattttgagttgagctgatctaaggtataggagagtgagtagcctgggcgtgggctgggagaaggtggagttggtgggtacgtggtaatgaaggtacaagggtttattatgtcaccctacttttctttggaaagttccgcaactaaaaagcacgtgtgtatgtgtgtctgtctgtctgtctgtctccagaactcttcagctcttccattgctgcgccctggctcaggctagagtcctctcttgcccaggtggcgctagcacctcctaactggtctccttccttctctccttgttcctctagagtcagttctcaacagagcagccaggatgatccccagacccctgcagtggcattcagagtgacacccaaaacctttctgtgacctcaaacttctgtgcagtgtgttccccacgccacttcctccatgaaccttcagtcacactgcccgcctcgctggggcttgcactggtcaggagtgcttctgccgcaggacctttgcacgtgcccttctgggcctacagtgctcctccactctccatgcagccatctccctggcttccttcaggtccgcattcagatgtcacccttgcaatgaggccttctcagacaacaccatctaaaatgtcacttccccttccccactattcataccctactccctgctcactttttctgctccgcgcctgtcactgtctatattgcactgattgatcttatctatcctggcaggaagcttgagcagcgcccgcctcttcctggctgtgcctcggcagtgcccccaccccagcctcccaccccatcttggtctgcaccccctgccatcactcatccattcattcctcctgttcctcttggccactgccaaatgctggatggtttccatctgtttggttcactgcagtgtctctgtccctggaagggtgccagccacagaaggcacgaagatgtgtccacagagccggcggctaaaaatctggcaagaggagtcgaggaagggggctgaggaggtagaagggagggctttcctcaaaaggccagaaattcgtggccagccaaaggggaagcaaagacattctcgtgtaggaaaacttacaggaaatgcaactaaaagcgtgggagacaggaagtctgtgtatttctgagattatcaagaaaggggggatggaagttgcaaatgggcaggccaaattcagtctgcagaggtgtgcttccagcccacgcagtgcttaaaataaatggagatggttgccagcactggaaggtctggagtgccctgtctcctggaaacactgcagcctggcaccactgggctggtgagcatgactggcacctgcagcagctgcccaccagctaatggcaggtgtgtgttctctgctcacccaaagcccttccagcagcttcattttgttgttgttgtttatttgtttttgagacagggtagtggtacaatcacagctcactgcagtcttgacctcctgggctcaagcaatcctgctatctcagcctcccaagtagctgggaccacaggttcccaccaccatgcctggttactttttaaaagaatttttgtagggatggagtctccctgtgttgcccaggctggtcttgaactcctgggctgaagcaatcctcctgccttggcctcccaaagtgctaggattacaggtgcgagccaccatgcctggctagcttcatttgctaccttcctggtgtgtgtagacatctgtgttgtcacccccattttggaaagcaaaaaggatttcttcttccttcaaacataattgagaaaatacagttgtttgggggcaagtagggtgcggggtgactctggaaccggcctcctgggaagccaggcctctgggagtgctggaggtgggcagtgaggctgccaggcccctgccttctggggtggggtgcatgctcctgatacatcagaagggtcgggggaggacttggaggtgaaggcactgcaggaagagaggaagcttactggagagacggtcaatggggcagtcaggctttaaaaggacgggcccaccaagtgaaaagatgaccaagtgtttgggctgaattgtgtcctccaaaaggatatgttgaagcctaacccccgggacctcagaaggggatcttatttggagatagggttgttgcagttgtaacgctgagatgagattatactggagtagggtgggcccttaatccagtgtgactgctgttctaagaagatgtacatgtgacaatggagggacatgtggggagaggatggccacgtgatgatgggggggacatgttgggagaggatggccacgtgacaacagggggatgtcaggagaggatggcctcgtgacaacgggggaatgccaaaagaggatggcctcgtgatgacaggggacacatggggagaggatggccttgggacgacaggacatgtggggaggggatggccacgtgatgatgggaggacatgtggggagagaatggccacataatggtggggggacacatggagagagaatggccacataatggtggggggacacgtgaggagaggatggccacatgacaattgggggacaccacgcggggagaggatgaccacataacaacgaggggacatattgggagagaattgccacgcgacgacggaggaagggactggagtgaggaagtcataagccaaggaacgccaaggacagaacaagcagcaaacacaagacacagggccaggtaaggaggtccccggctccaggtatcagaggagccctgctgatgcctggatttcagctctctggcctctggacccagaagagaatgaagttctgctgcctggggcctcccagtttgtttacagtgagtctgttcatggtggagaaacatcttctcatgatgttcctgtccaccatggtcaaggcctgttttgagctcctgcattgtataagtcagaggtaaagctgtttttctcaaggggtcaataattgacagtattggaatgggacaaggtggtcctgttgggttttgtttgtttgtttttaaaatatgaggatagaaagtcgtgtttttacttgtgcttaattttcccagtggccgggatgtgaagtccacgcctgtcatctgtaatgcaccagggcaaggggtcggttttgtttgcatagcttctcccagggtcatcttcccacccctcaagtgtggatttggccacaacactttgtttagcaatttcctgtcattttgttttatttggtcaggcttatttgcatagttgaatgaatgcacaaaggcctccttgtttcgtggttcacaaagtcagaactggatcataccagggcatacgggttctgtttcaaggctttgtaaagctgctagggttgaaataggtatttttggtgtcggaattattttattgcatttatcagtttatctactgagatggggcactgagaactgctgatttacctctctgcagccctgtctgcagtacctgaaggctgggggaagacatttggcaatgcacacagcctttgtttctgcctgtgaagttggggtttcataggccacctcccaggagggccctgtaggtgcatgacagagtccgagtgtctcaccagtgggtttgtcattgcacccaagcagatgctgggggagaggatgcctcttccttctcctcacccttcatcagtgtgtgagcagaggcaggagacctgtgggctggaaggcccacatcctccttcccaggctgtgaatgtggcacttacatggcaggaggactttgcagatgtgatcaggaccttgagaggagacattatcctggatgatctggatgagtccatcgcactcacagggtccttaaaagctggaagagggaggccaggcagggagagggaaggaaatgtgaggatggaagagggatccgattgccgcgattgctgaatttgaagaggaaggaaggagccgagagccaaggaatccaggcagcctctgggagctgcaagagacaaggaaatggattctgtcctgcagccttcggagcagatgcagacctgccgacaccttcctttcagctcagcgaaatccatttcagaattttgagtgcagagctgtaaggtcatgagtctgtgctgcttaagccactgtgtttgtagtcatttgttgcggtagtaaaggagactaatatgctattttgccaccattctgagcttttgaggcaggctgatggaaaaggtgggacagtggcttcccagtacttttctaagtgatcctgagaacctaatatcccaggcacttcatattctgtaactctccaccctgctgccagcagagtctgcttagtcctcaagacgaggggcttctgctgctctcagaggttgatgatttcattgattatctttaagttactctgcactctcccttccccagagaaaacccagtcaaattcaagtgagcattggggaaaatattcattcattaaactggttcttaacctttttgggggcaccgacctcttgagattctgttgaaaatgggattttagcccccataaaaatacatatcaaaaatttgcataaattttggccaggcacagtggctcatgcctgtaatctcagcactttggaaggccgagacgggcagatcacttgaggtcgggagttcaagaccagcctggcaacatggcgaaatgccgtccctactaaaactacaaaaaatagctgggtatggtggcgcatgcctgtaatcccagctgcttgagtggctgaggtggaagaatagcttgaacccaggaggtggaggttacagtgagctgagattgcaccattgtactccagcctgggcaacacagcgagactgtcaaaaaaaaaattgcatacaattttgagaacaattttgtatacagattcccccaggagctaccccttgaagctccaatggctgccaggggcttcctctgtcaccccaggtgaagagcccttgtacagattaattcacattaaggctgatgaatggctgttttcctagtaagtctcctcgctgtttgccaggtccttaaaccatgttcagtggatcctcattatttgtggattccatatttgtaaattcatctgctctctaaaatttgtttgtcaccccaagatcagaactcatagacaccagcagagtggcaaaaatgtgttacccgatgagccttttcccagctgaaaaggatgctctgccatcttgtttcagcctcttggtgtaaacgagtgtggttttcatgatttgtttagtgccatgttttccatgttttgtgctttttcttcgtggtttcactgtttgaaagtgctgtctagtgtttccaagtgcaagaaggcagtgatgtgccttatggggaaaatatgtgtgtttgataaactgtattcaggtttgtgttctagtgccactggttgagtgttaacgaatcaacactgtacagatgattcctgacttacgatggttccttccagtatgatttttcaacttaacaacggtgtgaaagtgatatgcattcagtagaaaccatctttcaaatacccatgggaccattctgtttttcactttctgttcaatagtctatacatttcataagatattcaacactctttcagaaagtaggctttgtatttcatgatttcgcccagctgtaggctaacatgtgttctggataggtggaaggcaagctgagacatacctctatggtgtttggtaggttaggtgtattgaatgcattgtcaacttaggatattttcaacctatcctgggtttatcaggacatgaccccattgtaagttgaggaccatctgtttattcagtaaggtgtcttttaaatagaaaaacacataaaacaaggttagtattgattgattgacaaaaatgttgcaacctgaggctttcaggaacctaactctgcatttcctttaggagtgctgcttgcttcagtatctgctggtaactctatggaacatagctactgtgaataatgggaattgggtgtattttcaagttgttggcctctccagctacgctggtaatcagtcctgctctttaaatcacatcttaccatcagtcctgcctagagaaatggaggaagggaggtctctggtcttacggtctgtcccgactctctgccccaccagctatgtcccgagaaccagcctggacagagccatctgattggtgggtggtagcaggtcatgttgtgaggccctggtgcctgccttctgtcctcctgtgctcgctagaggagcatgaggcaggagcagccagtccatgctggttcctgagcgaggcagctctagggctgccagcacccactcctggggggctgagggtaggaagagcttcagaggggaggatgggactgtctgactatatttccaatcccagttgggacttgtggtctgatgaggacaagtgcctttgagggggatggggatggttgagaggaaccaggaaatcaaatgtgtcctggaaaacatggcatggtggatcttttgagttggggtgttgggatgtgtgtcagctaaaacaaggttcacctgcttcaaatgttcatccaagctttctacacttgcctctctgagtcaacatctttagagacagcaggaagtgatgaaagtcagttcacagtccatctgctctgagggcttggtatgaggggctgatgttttctgtcattttctcctttctaacatttcactttgggatcttagttcctggttgaaattccttaactgtgggagtcgaggcagcctaagaatccttttcggctgcttaagacaatgaggtagagagggaaccagctgccccttttcttacctccatgatgatgtagaaatggttccatccagcccaagggttcttctggggcccaaagctccttaagggctctgtgcataggatttgaggattagttttcttgggtggggagaaaagtccatctttatttgtataaatcctacctgaaatgcagcatttcctctaattaggaaggcaggcaacaaaaccagtatgttagctatgtctgtgactctgtcaccaatgtgggttagccgtatctctgaccctgtcaccaattgcaattacagatgtctccacatcacattagtgttgtttcagatatcttgaagtagcatttgttcccattactagttttaaattaaggtggttaatagaccccactggattttgcgatttaatatgctgataaggcacatatattgctatactataacattttttaaaaattttgataactagatttcaataagattggtatttgtgatcatatttattttcttgatttttataacagctttattgagatataatttctgtaccatacaactcattaaagtgtacaactccatgtttctaaaatatattttcaggattgtacaaccatcaccaccaccatcaccataatctaattttagaatatttttgtcccccttaaaagaagcttcgtactcattagcaattatctacattccccctttccccactctcagcccctggcaaccacaacatctactttctgtctctagaaatgtgcctgttctggacgtttcatagaaatggaatcttgtttttgagacagagtctcactctgtcacccaggctggagtgcagtggcgtaatttcggctcactgcaacctccacctcctgggttcaagccatccccctgcctcagcctcccgagtagctgggattacaggcgtgtgccaccacgcccagctaatttttgtatttttagtagagatagggttccgccacgttgcccaggctggtctcgaacttctgacctcaggtgatccgcctgccttcgcctcccaaagtgctggggttacaggttacaaagtaagccactgtgcccggccaaaatggaatctttctgaggtcttttgtgactggcttttttcatgtagcataatgttttcaaggttcatctatctttgtattttgttctgtgcacttaaaacattattctgagaaggggtctaaaggcctgccccgtcgtcaccagaagggcctgtggcatcattggagaggttagggctctccctaaccattagggctccctgcgcctaatggttcttccctctgtcagttttgcattaaaactagtacatgccttggcttgagcatggacaatcactgccaaagacccggcaggcaaggcacgcagctttccttgggatgggttggacccaggccctgggcactcagaggtactcaggcacctctgcccagtctccccaagttaccacctccacaggtgccttggagtgagtgggcatctccaggatgtagcctctagtggatgatacccgtggacagggacagcaaggtagagtaatagggccaggccccaggtgcctgcccccagctggacgccagaaccccaggaccccagctcctccagcccccaggaagctgtcagcacttccagagagcaagctgttggtgggaaggtctgaatccttgcagctctgtgattcgcgaatcataaaacctccacacttggtgtttgtgggccgagctattgtctttgtgttttctttttggagtgggtgggaagccagcttggcaagccgggtgtgaatgaacaggaatgagcaggagacgctcgctgatgccttctgtgatgtgtttcttccccagctccagaagaaaaggaagtcattaaaggacagtatggcaagctcacggacgcgtacggctgcctgggggagctgaggctgaaatctggtgagtagccgctcgctggaggagcaggcgccaggctccccggtgggcaggagcctctgtgtcggaaggggcctcagtgcaggcattctgtttgaccgctcttctctctctcttcttttttttttttttttttttttctccgagatagagttttgctcttgttgcccaggctgcagtgcaatggcgcgatctcggctcaccacaacctctgcctcctgggttcaagcaattctcctgcctcagcctcctgaatagctgggactacaggcatgcgccaccatgcccaactaattttttgtatttttagtagagacggggtttttccatgttggtcaggctggtctgaaactccgacctcaggtggtccacctgcctcagcctcccaaagtgctgggattacagccatgagccgccgtgcctggccgacctctcttctcttttaagatgtttctttatgcctcgggacctgctcctcctgcaggaacctgcaggtggggaggtcaaggtgagtgttgcctggttgtcacctgcctgtgctggggagcagggtggggttcccggcacccccaccctgtgccagagaagctcgtcttcattgcttgccggcgagggcctaagtgtttcgaaagtctggtctggggcttctgcccagggcattgtccgcagtactctagaagatgtgccaaggcgggtgggtgaagacagggaccagggcagatgcccgggggcacaggggtgggctgggagttgtcagcaggagaaaaaagccaccgatgtgtgactgtcagtcagtgtggggtgggagggagaggaagggacagtgtgatctgacttgcgaagggagagaacttccaggaagacgtgggcatctctgctcactctgagagactcgggggtgagccggtggtggccggctgtcgtgggtggtcacagccaaactcagctgttcctggagctcaggagccctggggctttaggttctaccacctgtttccttccttctctctcaggggcccccttgccatctgtgacctggctgtggacatctcttgtgacttctggggccgagacaagagcccagtcgcattcctgattctcagtcccacctggctgagatgggaatggctgtatgggttgtctgaattcgggctttccctgagccaagcgcacacctcccttccctgctcacagcagctgttttcagagactgaggatgtttaaagctgccagaaaagcacggttacgttggccattccttttctgggtgttttctgtcatggaatgtttttccctgaactgtgacgattacagtgatcatttccaaatagcatttaggaaaaatacacagtacccacatgacaaagtgcatttatgaaatgtctgtttcgtgccaagagctagccgtacattcacttatttaatcctaaaaataggctaccgtgataatgcatctttgtccccgtttacagtaacgggaacaggctcagaagcttcaagtaacttgccttaggtcagaaacttagttggggtttgaagcgcctccaaacgcttgctttttctgtggaaatgtgcgggctgccgagggttttctgcaggactttccgctctgcagcgatcttcctgaagttgcaggaaatccctgtggcccttgccttccatggtgatgaccgtgaggatggtggcctgcacctgcatgggactcacttaggaacttgttaacacggctcccgaggccacctgtgctgttgtcaccctgccttgcaggtgtggcagggatgccgcgttccatccatgctgatgcccttttttccacatggtagtatctgggcccccaggatgcctcacagtcttggcttccttcagttatagttggcagctgcttttggtccttacatgaatgactcattttgcatccgacagggactgggattcgacgaattacagtaaccggctcaaggtcacgccattctcaagtggtgccctgggttttaaactcatgccttgcggcaccagggactgccttcaaccaccaggctgttctcctttctgaaagggacaggtggctgggctcacaagggggacaggaagtgcagtaccttcccccatcccaggggaaaagtgttttttcccagggctgtgatctaagatcagctgtgggaaattggtcctaaccaggaagggtggcagccccaaagatgtcttattagagcgagccagggtgtctgcgggggtcagcagggtctaatggggcagggagtgctcagagaggagaccacctcccagggctgccctaggcgaggcctcctccctgccttcagccagtccccgccaccccacaccccacagaagggaatgaggcttcttgtggaccatgcgagaccagccctgctccgaggctttgggtgcccccaacccctgcccacctgtgagagtcaccccccggagtgggttggagtttctctgagtgtggtgtgtatgagtttgactttggcgatgtcaggataatttggtctgttttcaacacattctggaaagcaccctgagcatctgaaggatggaaggattgggctttaaatcaagttttttcagtccccattggttatcttaaggggcgtttgactttaacttgattttctttttcccctgtaagtccctgacccagaactgtgatctattttcttttgtgttttcagctgttgagcatgttgggcagcacggagtgtagctacaactgtgtgaccccacctgtgtgactgactccacctgtgtgactccagtcgtgtgaccaactacaactgtgtaactgactccaattgtgtgactaactccacctgtgtgactctgcgtgactccaactgtgactccatctgtatgactccaattgtgtgacccccacctgtgtgactctgactgtgtgacccccacctgcgtgactctgactgtgtgacccccacctgcgtgactctgactgtgtgacccccacctgcgtgactccgactgtgtgacccccacctgtgtgactccaactgtggactgactctaactatgtgactgactccaactgtgtgactaactccacctgtatgactccaactatatgattgacttcaaccgtgtgaccccacctgtgtgactccaattgtatgactgactctaactgtgtgactccaactgtgactccatctgtatgactgacctcaactgtgtgaccccacctgtgtgactccaactgtgtactgactctgtgtgactgactccacctgtatgactccaactatatgactgacttcaaccgtgtgaccccacctgtgtgactccagttgtgtgactgatttcactgcgtggctaactccactgttgcctgactccagctgcgtgacttcagctgtgtgactccatgtatgtgaccctagctgtgtgactccaactttcagttgccacgaagacaaccagctgagtcaggagtgggcctccctttcaatgtttttagctaagcatctctgcgcaaagaaagaggcttccccacaggctcttaatttgggacaagttttcccttagtttgggaaaaatttcaatctacctaaattagccttttacattagaaatcgagaaatatgcacaaaaattcataaaagcctttttccaggttccaaggtttttgtagaaagcccaaagttcccctttccttcctgaaatgccagcaggaaggggttggagctcccgtgattagccagggagtcaggcttcctgaagtttacacaatacaaagcatattaagtgagaatgtagcagaaaaaagaacttatcccaatgattatagcaatttaaattctcttgaacccaagctctcaaggcctacctgttttatagcctcaagggactctactcctatcccagactataatgaattgtgtctcctggagttgtgcagtacgcaacctgtgaagctgtacacgacagccctataaattctctagcagacagccctcctagattctagttcccacttcacagctgaactgcatttaatctctgtaggactgttttcctgtctgtaaacctgggaaaactgcctcatctctatgttgcctagttctcaggaggtccacatgggccatgcacatggtagccatgaagagtgtggagtgctcctccaacaccaggcgggctggccacaggcagtttcttagagtgtggcctggggacgctgccaccactgagaagctctgctgtctctcctctgtccctgggagggctggagggaggagggtgctgagtgagagggacctggcctgcagagggctgaggacgaggtgtgagctggaaggccaggctgtgtggcctcggggtgtggactcctggtggggggctcctctgcacaggctagcagagggctggtttcatgggcagtcacttcagaaggaggattccctggaggggagtttgaacccttagtcttttgggatgcagtgttctctagcaagtcttgaagcgaactggcctttgtcggtcttagattaatttaattcctgtgcccagtggtgggatattaccaagagagttgacacccagctccctgagggggaagctctgagatgatgcagcatttgccagtttccaaggtgtaaattcacgggccagggctgatttcaggttcccagcgtggagctgaggaaggatctgcaccaggggtgctcactgcgggtgttcactgctgtggccgccgctgcctacacctccctcatgttctgcagaagggaggcgggagaaggccctgagaccatgccgcatgggcacacagtgcttagggttctgaacctgcgggtggcgggggaggctcaagggtcatctggccgaagcttcccccttcacaggtgggaaagcctagacatctttagtcctttgtttggagctttaagtctgagggtgtctgtgtgagcagagggacagataggatggctggagggaccccagggttgggattggcacagaccaggctgggaaggtgaactcagagctgagacaacacaaggaaatgccagcccagagccttgtgggaggcctggggtggtcccggtaaacggggccttgggtctgcaagccacgtatcatgactccaacagccagctttcctggcctgataacaaattgcctaggacctgccactggctcttgcctccctccacctcactctggcagctccctctgacccatgcatggctttgctttggccagagccctggaaccaaagccctttacctggaggggacattgagactattggcgcatcctcctgggaggcccagagagggtaagagccttgcctgaggccacacaggccactggaggtgtgcagagcctggagccccactcttctgagttttgtttttccacttgctatgagatccttgatggtttcagggccctggtctctccctcagctgaggactgccaagaaccccgcaagcctagttagcttcttggctgtcagagaattgatcctgcctcacaaaagcaaatcctgtgctctaggtgagcatcgggaggggcctcacacacctggggcaggtggggaccagtggcttgtaccacactgacggtggcccgggagtcagcgaccccccacagcctggtgctaggctcaagccaggacactttccttaaaacccatagtacaggccaggcatggtggctcatacctgtaatcctagcacctcagggggccgaggcaggaggatcacttgagcctagaagttcaagaccagcctgggctatgtagcaagactatgtctctacatagtgatggtatctacagcaccatgccaggagcggtggtgcacgcctgtagtcccagctacttgggaggctgacatgggaggatcgctggaacccagaaaggggaagttgcagtgtactgagatcaagtcactgcactccagcctgggtgacagtgcaagaacctgtctctaaatttaaaaaaaaaaaaaaaagcaaacaaacaaaaaacccatggtatacagagaacacagtcaggcagtcaggctgtcaatgagattaggcaggacacagtgaggctgggattgaaggaggaggaagccatcagtgctgggtcaggtaggcagggcggggccttcccggagaggcagcgctccacacagcggtcctgaggtttgggtaaggctcttccacagaggcctctgtggttacacccgtcccaccaactgtctgggacacacaggcaggggcagttctaaggaaaagtgtccaggtccttggcttttttctatcatggagcacctgtgatggaggacagggttcttattcccctctgaggtctccctgcttccatgttagggtagagggtaggcccttctctcttctggaagctcaccgtgtgccgtgctccaggaagtaactccccctaggattccagacaaagggacagttcaaaagcttgtcaacagcattgcaataaggtcaggactaggtagcaatctgtttgcaagtcaggtgatgtccaattgtttgcttcccccataacggaaggagaatttaattggggtatcagctgacacattagtaaccattttatcagcaggttattgtcatttcttagcgctaactcagaaggactttgaagaatcgagtgacatttctacaatgaagccctttccattcccatctatttattaatgtgaacaggatcttttagtgtttgcgtctacaaaaatgaaaactagaattagaattggtgcagaacctactttcattccttcaataaatatttattcatctcattaagagatgcctttccaacacattatgactttttgtatcaaatgattatttgtcggccaggcacggtggctcatgcctgtaatcccagcactttgggaggccaaggtgggcggaccactagaggtcaggagttctagaccagcccagtcaacatggtgaaaccccatctctactaaaaatacaaaaattagctgggcatgggggctcatgcctgtaatcccggctactcaagaggctgaggcagtaaacctgaaaggcgaaagttgaacccgggagacagaggttgcagtgagcccagattgcgccactgcactctagcctgggcgacagagcaagactgtcacctcccagagaccccacctcctaaaaccatcgccttgggtgttcatacttcagcatattaatttgggggtgcacacattcagccaatagcaggtacactggttgaccacactcttaaagaggacagccaaaaaaaattatttggcagtgttttatttacattgtattgtttacattgtttgaccagttaggtatcactggaacgataaaccagaacgctctctttttaaacacttggagttgaggaacacacggctgcaggggctgatggggtgatcagaacaggacgtagaagcaccagatatgctacattaggatggaattctgaagaggggggactggaaatatgagtgaaagttccatgtggtaagaaagagcatgctcctgcaatcctgtaaataatagatggcaatgagtatcacgttactgtgtagattccatgggatactgacaagaggctcccagagttttagttttacgtgtcaatatttagaatacactgcacaatatattatttacaggcatttcaactaccgatgaaaaccttcaatggcagttttaaaatgggcagggaacgctgtctgagtccagtgtgttgctgtgacaaagttccgtagtagacggggtggcttatcagcaacagacatttatttcgcgcagttctggaggctggaagtccgagaccagcggcccgcagattggccggctgtgaggacctgcttcttgctccatagatgctgccttttctctgcatctgacatggtgggagaggtgcaggagatctctgggcacaaaccccattcatgagggctccactgccataacccagtcacctcccaaatacccccaccacctcaaaccatcaccttgggtgttcgtacttcagcatattaacttgggggtgcacacattcagtcaatagcaggtacactggttgaccacactcttttaaagggtacagcaggccaggtgcagtggttcacacctgtaatcccagcactttgggaggctgaggcaggtgaatcacctgaggtcaggagttcgagaccagcctggccaacatggtaacaccccatctctaccaaaaatacaaaaaattagccggtataatcccagcaactcgggaggctgaggcaagagaattacttgaacccaggaggcggaggtagcagtgagctgagattgcaccactccactccagcctgggcaacaagagtgaaactccatctcaaaaaaaaatagccgggcgtggtggctcacgcctgtaatcccagcactttgggaggccgaagcaggcagatcacctgaggtcgggagtttgagaccagcctgacctacatggagaaatcccatctctactaaaaatataaaattagctgggcgtggtgacgcatgcttgtaatctcagttactccagagggtgaggcaggagaatcactagaacctgggaggcagaggttgcggtgagccgagatcacaccattgcactccagcttgggcaacaagagtaaaactctgtctcaaaaaataaataaataaataatacatgcatacatacatacatacgtacatacatacatacatacagggtacagcaaactaatccgattggaaactgccggactttggggctagatggagcatgggcttaaagtgaaacctacattttggctccaacacagactagctgtgtgcttgggcgggtgattcagcttccctgggggacagtcatgcgtgtgtgaaatggcagtggtagccctgagacagcagcatgggtaagcaggctggcgacgtcatctgcaaggaggtgtaattaggagcaccagctctggggccagacttggcttgagaaacttgcccaggcactgtagctagaaagtggatttggatcccagctccccgctctgtcaccttgggcaggctgcttaacctctctgtgcgtctgtttccctccctgtgagatggggctggtaagggcgccccttgcggtgggcgggaggatggagtccgcgcctgtacagctcccctgcctccactgcgctcaccagataccggctctcctcactcccctgtaccactcccgaccccctcctccctggacccaggagccccagtgctctgtggcaatgttaagagcctctcctggctgctacagtgctcctctccccagcctcccccaggccgtggtcctgcccaggaaatgcacctgggactgttgccaggcactcaggccccccacacggaggctgttgaggaagtggtgctagaaatcagctcatgactctcacggagtgatgtcatgcaaaattttccatagctctggcagccacaggggccatcctcctgcctctccgagggcacttctgctgaactgtgcttttccctgcactgtgtcagaagaggcaggtgggtgccgggagcgctctgtggccaaggctctgatcacaagctgccaaccccggaaccccacctatcctacttgagaagctgaactctgacccctgtccctgtccccagtgtgataacttcctttgttcttaggtggttttgaggtggtttcctgaggatgtgtctggggagatgtgatgggatcaaccccctgccctgctggcagccccaccccatggcatagcagcaggcccctgggagccctgagcgctcattaaaggaacgcactttaatgacagccacacgccaccctgccacaagcagcgctcttctccctatgaagtgtggtgaggaaattggggtgagagggtggtggaactggttgttttgggggtctcttcctggagtgtggagagatcagaaccatctccagaccatggctgtagacagcggcccttgatcattcacagaagatctcgctgggcggatccttcagacctcagcggggtgggaagagtgtccttgggactagagccctgccagaccccaaaggccggtttctacccgatgatctcttgggccccgtcccgagagtgaggcacggcgccaccaggcacccccgatacgcagcgtgttgtgaagtgcccttgtgagcagcgggggatagggaacagaaaaccagctgtcagcgacagcgaggtggtgccccagagagggctgcctcattcgcctggctgcagggtccgaggtcgtcttggtagcatttggcaggaatttatttaggaagcattcagcaaaccgagtgtgtgtggtgctgggagatgacgacgaaatggccctgcccccaaggaagcccctcccctgggggcacaggtggggagggaggtcatgagctttgtgtgtgtgacaactgctgatgggaatgctattggcacgtacgaggggtgcctgtccgtgtcttgggagagcaaggaaggcttcccggaggagttgctgccaagttggcccagaaggatgaggaggagttcttctggtgaagtggggagggcagaggcaggatggtccctacggagcatgtggggacgctcgtgttcttccagaggatggaatgctgggcccgaagcctgaagtattgttagggtagagacaggcgggaggtgcgtggagaaggggtcatggaggtcttgttgggcagatggcggtgggacgtcccaggcagggggagcatcttgggcaagagcccagggtgcgaggtcatgcttatggcacattggaccagctggaggacagccagctcaggagagcagccggctggggtgtctgcccacgtgtggggcagggatgggctgcagcggggagggatttgggagcttctgtcgtagtcctgcagggagtgggagctgtgcaagaaggaagggcggagcggctgtgatccaatgactttgggaaggccactcctgtgatggagtgggggaagacagaccccaggccaggggtcctgagtcaaggcagtggctgaggaggcactggggaaggtgatttggagaggctttgggggtaggtcctgggggtctggaagggctctaggccaggaattttcagactcctgggggcatcagaatcacctggagggcttgttaaagcaaagcttgcccccagcctcaggcagctgggcggcaggaatctgcatgtctaacaggctcccaggggatgctgacttgctggccagggtcccacactttgagaagccccgcctgaagcttacaggacagggcaggttcttgagccattgagttgggcaatgccatgggaagttgcaggtgcacagacgttgccttcctggctgcggttgaacctgggctccatttgtccccttggagctccaggcggccgggccgacttcgaccctgagctctcctgtctgatttcctttccaggtggcacgtctctgagcttcctggtgttggtgacaggctgcacatctgtgggcagaattccagatgctgaaatctacaaaatcactgccactgacttttaccctcttcaggaagaggccaaggaggaggaacgcctcatagctttgaagaaaatcctcagctcgggggtgttctatttctcatggccaaacgatgggtctcgctttgacctgactgtccgcacgcagaagcagggggatgacagctctgaatgggggaactccttcttctggtgaggccctgggtcccctgcagagggtgggccctgggtctcctgcagagggtgggccctggttggcatctgaggccttgacctccacttgcaccacccccgggttatggggcacctctggagagttaggacccaggcctgctctcagcacaatgagaggaaaactaaccctgaactccctgccaccccccacccctggcccctggaatgtgttcagtgtagatttggaaaagaaacctgcgccaggcatggtgcctcatgcctgtaatcccagcactttgggaggctgaggcaggtggatcacttgagttaaggagtttgagacaagcctggccaacatggtgaaagcccatctctactaaaaatacaaaaaaaaaaaaaaaaaaaaattagctgggcgtggtggcaggtgcctgtaatcccagctactcgggaggctgaggcaggagaatcgcttaaacccaggaaacggaggttgctgtgagccaagatggtgctactacactccaccctgggtgacagagcaagactctgtctcaaagaaaaagaaagaaagaaaagaaaccctgttccataagtaaaaaacataagagccgacgtctgctgagtgcttcctcagtcccgggtgccgagctcagtgcttctgcctggattcactctttcagtcttctcaatcatggttacctccagtgtgcagccgtttaccgctgatgtttataaagcactgtgttcgggtcaccgtgctaagatctctctgctggtaataactcatcattattataaaaacctttataataattatgcggaggctctgttaccccattttacaggtagagagactgaggcacgaatagtcgagggaattttgccaaactccacacacttactaagtggcagagccaggatttgaacccaggctttctgggtccaggtcccaagctggtaatcacagtgctaaaccagtcccatcaatggggaagctgagtcaccctgcccaaagggacttgtagcaatgcactaagactagtcccggagcccaggcagaggcggctggatttctgtatgtttaagatctcctggtgctttttcactccacagcaggacagagacaagagtggacaaccctgtaaatacataaattatctattgccctttctggacataatgctgtttctgtcagattcgcactgatgcctagagatgccaggtagaagcaaaagtgaggaaagtcctgccatgggagtcgttccaatgaacctcatctaatgtaatgttttagaatccagtgtctgccttttgaagctatatcagttttcccagctctgagacgggactcgtgaggtttatttctgacctgtttgtgcctctctccctttgccagaggcagccacaggttttcatctggccttggtgctttggattccccagaagtgaattcctgatttctgccggaagaaggggaccctccccacatccctgtgtccatcccaacgctccccacccccacatcctctttggttctctggtattgtggatatttgggggcagtaatgtgcccagacttcaaaatgcacgtgaatcaaggctgggcatggtagctcacgcctgcaatcccagcactttgggaggccaaggcaggcggatcacctgaggtcagcagtttgagaccagcctggccaacatggtgaaaccctgtctctactaaagatacaaagaaaattagccaggtgtggtggcgcacacctgtaatcccagctacatgggaggctgaggcagaagaatcgtttgaacccaggaggctgagattgcagtgagccgagatcgcaccattgcactccagcctgggctacagggtgagactctgtctcaaaataaataaataaaataaaataaataaaatcgtgaatctcatgctgatctcattaaaaatgcagattctgggatggcaggtctgggctgggcccaggattctgcatttctaataagctgccagtgctgcttgtctgcagacggcaggttgagtagcagcctctggggatggcatttctgtgaatcgctggttacattttgcagggcccagcatgtgccccgcgagctgttacatgttcccctaaaggcagccaagcttaagcacagaggggctgtgtattatgaggtatctttgtgtggagtccgtgaaactattttaaaccagaactgtcaggggagcagaggtgagagctctcagcggcagtgagggtccttggaacccctaggggatccttggggtatctgaattgcaccagcacctttgcaagttctcttccctatgccagctctgtggctggaggtgtgaggggcactaacaaagcgaggcaaaggggattcacgaggtggaggctgagaggagctttggaaggaggagccccatggtgtccctttctgaagggagaggaggaagtaactctggaggtcgccaggctcctcagctgtaacacgccagggcgtggtgtttaggctcagggtggagcccccagaactgaccacaactgagtcaccacgggcagtgtggttctgggcttgatcgcctgaacccccactgttgtggcgcagcgtgaggtctggagacccacagcaggagtcagatggggtcaacgctcagcgtggctggcacataaggcagagtgagcagcagggtgaagtcatctttctgggctggtaattgatcacactgacaattgcctcccagtacaatcaggtcctgggaggaaactctttgggggtcctggatatgagtcatcctcctgccagagggccaggcagtgtcactagaaacagggctgatttaagggttgtccacttggcaaaaggtttcttctcctgagccctggtgatagtggccatagctgtgtagctggcagactctgaaatattctggaggctttgccttgatgccacatgcagatttcatatatgtgtttcggaagctggcttatcatctgaatttgagagagtgatttggaagagggacatgtgtttttgtacagcaatgcttcagcagcatttttcaagcagaggagcgctgtggctgtgcgacctcagatggggtcagacgcgggctgtgctccctgtgggggtgcatgtgactgtgcgacctcagacggggtcagacgcgggctgtgctccctgtgggggtgcatgtggctttggtcacagtcggggaggctggcctgagagcaggaagcttggagaagccccctgggacccatcagagctcacagcacagatttccagcaatgagaaaatgctgctgctgtctttgaggaaggctcaagggcaggaattgtgttgccttttttaaacaagtagggcactgtgatctagattcactcagtgccctgtaagagggcatctcctgatgatgggtcctcctccctgagagtgagtatgggccctcaggatggtaccactcaggtcccctgggtgctaaagcaagggggccaggccagctcagggatgagagaactacgtggtcgttcgcaggtgcacatggaaacgtagggcctcatgaagaaaggctcggcgtgaagagcgcgggctccaagctccatgacgccactggctggctctgtggcattagacaagcacttcacttctctgtgcctcagctgctttatctgtgaaagggggtcactgatgatacctttcacatagggtcacttcaagggtgaaatgagttaatccaccccaaagtacttagaatggggcttagtgcacaggataaatgttggctgtcaccctgtcgttatcatcatggactctagagcctacagcaatccactaggcatggagagggaatacttgaactttcattacattttattttcctcggatctttttaaaatttattttggattgctttgtagcgctctcgtcataatcatctcatggtgcatgtgtgtgtatatgtggataatttaaataactgttcccatatttaatatgatttttaatcacttattgatcatgattgtttaataataaaagatgattaattttttaccaatggggcctgcgatgaaaactgtggggcccacagggctaaccagaggcccctttgcgattccccgaaaagtgcacgctggctcactctccagctttgcttccatttagcgacagtgacgacctggtagtggctttgggaaaggactccctggccatcctcctctacgtgacacagtggtcctgctatttgggatctctttgaagcacatgaacttcccagatctgtacagcccaagtgcagagtccactggggagcagcatgcattcgctgacccgaaatgctgcaccgtgcgccccccagttcctcagccacactcgctgtccaggcagcatgtattggaggatgtcaagtgactggaattggtgtgggactgtgttttgcaggaaccagctgttgcacgtgcccttgaggcagcaccaggtgagctgctgtgactggctgctgaagatcatctgcggggtggtcaccatccgcaccgtgtatgcctcccacaagcaggccaaggcctgcctcgtctctcgcgttagctgtgagcgcacaggcactcgcttccacacccgtggcgtgaacgacgacggccatgtgtccaacttcgtggagacagagcaggtgagtgcccaggcccatctgtggcaccaaatggttccgagtggctgcagctcttgcacacgcgctttccacttggggcagaagaggccctggcatatttgtggtggtctctgatcaggcttcctcctataagtggagaacagcacgtgtaattgggctccacatgaaaatgtgacctctggtttgcatggtgtatcctttctgattcacatctcatgcagggaaaatgctgcttagccgaggtatttttaactaaacggaatcaggaatttttgccttggtcgtgaaaggtgggcagtattccaagggcagctgacagatgaacaaatagggtttgaaaatccttttaggacaaaaataagtagatcaatacaatggggggatgaaagaagaaaccattattttttattctaaatcaactgaagcttctcctggaagccagtattagcaccctagagttgtgaaatctgcgtgttaagcagccgctcccatccgttcccctagaatatagccatctgcttaatttctcctggagttttttctaaattctgttctcatttccagagatgctgtcttacaacttttaaatttttgctctaacttgcaatctgtaagataaggccaccatgtggaatacagtggtgtaagccataagaaaggaaaaccccggaaggcacatgtatggtactcctgccagggcaagctgggtgccctgtgtttactgagtgaaggcgtggctgtgcgtcccccctcgctgccgctgctgggagaggaatgccttatgcggactttggccactttaatccagcagaggtttgagcacctacctttactgtgtgggactttctgcctgctccagtgttcagagggtagatacagagatgaggaggctgctctcagagtccccactcagaggaacatcagagcagggggccctaagatgggcaacagctgcaattacttgcctgtaattctgctcagaatgtctgcactgtggatatcaacgaggctattatgtaaatatctggttaaaaatgagattgcttttggcatcttcgtcatgaagtctttgactgttcctatgtctagaatggtattgcctaggttgtcttccagggtttttatagttttgcgttttacattcaagtctttaacccatcttgagttgatttttgtatatggtgtaaggaaggggtccagtttcagtcttctgcatatggctagccagttatcccagcaccgtttattgaatagagaatccttttcccattgcttgtttttgtcaggttggtcaaagatcacatggttgtaggtgtacggccttatttctgggttgtctattctgtttcattggtctacgtatctgtttttgtaccagtgccatgctgctttggttactatagccctgtagtatagtttgaattcaggtagtgtgatgcctccagctttgttctttttgcttaggattgccttggctattcgggctcttttttggttccatatgaattttaaaatagttttttctagttctatgaagaatgtcaatggtagtttaataggaatagctttgaatccataaattgctttgggcattatgtccattttaatgatattgattcttcttatccatgaggatggaatgtttttccatttgtgtcatctccaatttctttgagcagtgttttgtaattctcattgtagagatctttcacctccctcataaactgtattgctaggtattttattcttctcacagcagttgtgaatgggattgtgttcctgatttggctctctgcttgactgttgttggtgtattgattttgtattctgagactttgccgaagctgtttatcaggttaaggagattttgggctgagactgtggtgttttctagatatagaatcatgttgattgcaaacagggatagtttgattcctctcttcctattgggatgccctttatttctttctcttgcctgattgccctggtcaaaacttctaatactattaatatgttaaataggagtgatgagagagggcatccttgtcctgtgctggttttcagcttttgcccattcagtatggtgttggctgtgggtttgtcataaatggctcttattagtttgaggattgtggatctaaccaaactaaagagcttctgcacagctgaagaaactatcaacagagtgaacagacaacctacagaatgggagaaaatttttgcaaactatgcatctgacaaaggtctaacacccagcatctataaggaacttaaacaaatttccaagaaaaaaaaaaaaaacattaaaaactgggcaaaggacataaacagacacttttcaaaagaaggcatacatgcggccagcaatcatggaaaaaagcttaacatcactgatcattagagaaatgagaatcaaagccacaatgagctaccccctcacacaagtcaaatggctattatttgacttgcgtgaatattatttgacttgtgtgaaatgagatacctcctcacacaataatggctattgttaaaaagtcgaaaaataacagatgctggcaagattgcagagaaaaaggaacgctcatacgctgttggtgggagtgtaaattagttccaccattgtggagaacaatgtggtgattcctcagagacctactcacaatagcaaagacatggaatcaacctgaatgtccatcagtggtagactggataaagaaaatgtggtttgtatacagcatggaatagtatgcagtcatgaaaaggaatgagatcgtgtcctttccagcaacacggatgcagctggaggccattaccctaagcagactaaggcaggagcagaaaaccaaacactgcatgttcttacttacaagtgggagctaaatgatgagaacacatggatacaaagaggggaacaacacacactggggcctatcagagggtggaggatggagggtaggaggagggagaggatcaggaaaaataactagtgggtgctgctaggcttaatactgggtgacaaaataacctgtacaacaaacccacataacatgcgtttacctatgtaacaaacctgcacaagtacccctgaacttaaaataaaagttaaattttgaaaaattttaaaaaggggacagagagagaagctgtggccccagctgggtggttttctcttttctggctgatgtctgcatggggagagtcccttccctgccccacttcattaccacttgccttttattttgaacttttatttaaaatactggttttggatttcaaccagaattttaagacttggggtctcatctattgcatctcatcgagtaagtccctgggaaccactgtcctttagcggcactgtccttcctaaaacaccggacattctaacacggaaaatgaaagcaaaccgcatgcatttcctaggactgcccataataaagtaccccaaactgggtggccgaaaacaacacacttattctctcccagttctggagactggaagtctgcaatccaggtgtcggcaggactgctgtctcttcgaagtccccctggggagaacccttctgagcccacctgaccgccccggctcttggtggcctctggcaagcatctctccatcatctctgcctccgttttcgtgtggccttctctgcctgtgtctctccaggactccagtcgtactggatcagggacccaccctactccagttgtcctcatctttttttttttttttttttttttggagacggagtctcgctctgtcacccaggctggagttcagtggcacaatctcggctcactgcaagctctgcctcccgggttcacaccattctcctgcctcagcctcctgagtagctgggactacaggcgcccgccaccacgcccggctaattttttgtatttttagtagagacagggtttcaccgtgttagccaggatggtctcgatctcctgacctcgtgatctgcccgcctcggcctcccaaagtgctgagattacaggtgtgagccactgagcccggcccagttgtcctcatcttaacccattacttctgcaaagaccctatttccaaacaagttctaaagtactgggagttggtacttcaccatatggtttttggaagggacacagctcaccctgggccgcggatgctggctcctgttagaggactgtgctttacaggcagcgcctgtggccctgtgagaactctcgctgcaatctttgctttctcacttttacagaccaacaagccctaccacagaccaggctgggccttggctctggccacttcgtgtcgcgtgcctgctgactggcgcttgtctcctgtgttgccagcctgcttgttagagctcagaggcagggaccttgcccccacatctcctgaatctcccacctcgggcagcctggcaaggccatagagatatgaacagcctgcccttccagctcctggggtacagcccgatgctgttgacattgcctccacctcccttccttgtctgggctggggagggatttcttggctcccataagcctttgtgggcttcctagtgtgtgtgttttgtcctttttcgtcctctgggctctgggctagacagggctgctctccatgaagtccccacccaaccttactcccaggagcagcagtgattgacagacagctgggcaccaccacctgccgctcacccacagatgcagccgctgcggatgctgcccccgccccacctagagagcataacttaacccatggtgacttcgttaacaagagatgcgtagcggggccccaggaaggtggccctacacccacggtagctcttggttgggtgcctatgtttcaggctgtgctgatgagcctggaggtgcctgggctggcccatccatcggagaccccggacagcctggctacccaggaaggggagctgtcacttcccagcgctgagtccagggctgtccacgtgggccttcagcaaagcctgactgagcctgccaggtcccaggctctgctcccaggtgggtgggcatggggggcagtggtggtgtgatgggggcgcagcaggagtggggcaggtgaagctggtcctgccaggtgctgccgcccttccaggtggtacttccgataggtggtgttcggctggtgacccctgcctggaggtcgaggggaagcacagcagagccagggcagggagaagcgtgtgctgcgcgcagcccaggaaggaggggcatggagcagaaagaaacacaggtgaactggaagagcagagagggttcatgcttcctgcacacatgggaccagggcatgggcctggtggggggtcagcattcctccaagccaaaaaacacaggtgtgacagccctttttctaaaacattacagaggcagcaggagcagagatggctgcagggaagtgactgttccccaaaagcaagaaactcctgttgcctcacttgtataagccaagggaacccctcgctttctgtctctggagtcactgaatatttttgtttatgtcactttatagcagtactgatgcttaggttgatctaagttcgtttttaaaacacaaaacacgtctttaagtggaatgcacagttagtatgctcctgcgaagcggcagccccgctgccctccctggctctgcggccacctgctgaggatggttcttctaggatgagtcaggagagtggagcaaggctcagcctgcaggtccttgctgagctcagggaagcagccccgtgaggatcgggctgcgtggtctgcaggggaacctgcctgggaccctgtgagatttacctgtttcaggtgccagtgatctgctgggattctggagaggtccctcaggggagcctggcacttcctacccccttgagtttgcaaagtcacaactgagggcctgggttgggacggtgtcatgagctctccataagctttgcttatggtacaggagcagactgtctggcgcttctggagacctttaacgtgctcctgtagacagtcgggtaaactcattctggtagcacagcgtggcctccccctccacctgacatctgaggaagtggcaggctctgcatctcggtggcctcgccccagggtgcagggagcaactttgaggaaattagtgctgagcctccagtaggaaggaggactgtgctggggaggcaggtgagccccttgtggtgccgcccgcaggtcacactggcctggggcccctgcagaggaaacaggatccaccagccaggcccgctgaccatttggaagtggagcgtgcacacaggcggctgtgcggtcatcgtctggcaaacaaatgatgggaccggaccaggagcagactggctccctgtggtggggactcttggcaggcggatcggcttcttaggaattaattctcaggaagccagaaaagggggaccctgtggcaccctctgcttttgctttggtttaacatgtttcctaggaggaataattaatcttctttctctgaggcaggctgtgtgtgtgtgtgcatgggttgtatgtgtacagtgtgtgcgtggtatgtgcatttatgtgttgtacatgtgtgtatgtgtcatgtgcattgtgcatttgtgtatacatgtgtgtggtgtgtgccttgtgtttgtttttcatgtgtatgtgtgcagtgtgtgcatttatgtgttgtatacacacatgtgtgggttgtgtatgtgttgtgtgtctgcacgcacagatgttgtgtacatgtgtagatagcatctcagcctccttgggaggaagccttgagtctttttggctctgctgagtcatagctggtgggcttgctctgcagtgctgactcaccacacagaaaaacaagaccaaaaagtcccctcagtctattaaaaaaaaaaaaggatgtaagataaatatttggctattcaagataaggccactgactcattcagggaggttaggatgactgcgtgtcctcccaggaatgcagacttggagataattggtttgcagacactgtatctggaagcagaaggtcagcagaaagcctttcagatagaaggtatatgtacccctgtgagttttcctgcctcgtcgctctctttttatggccattaggtttctgttcccactgctctggaagcgtcactcagggtcaccctctggctgctcagtctggggtctaggcactggcctggcctcatcacagcactggcacgggcctccgacttttcttcccgtggccccactgctcttcccggtctccctcccacctcttgtctgttccttcttgaatccctccttcttcccacgacccaagctctctccgacgccagcaggtgcccgcatgcatagtcatagcgtcagggcctctggggaagagaaaacagcttcgttttttgagtggctactctgtgctgggactatgcccccctcatttacccctcacagctcatcccttctccgtgcacaaggtgacatgaacttcatgtagagagagggaaactgaggctgaagatggctaagtaatgtgcccagggccaccctgctgggcaaatgggggtttgcaaagtggcagtcggacccagcttgtgctaataccagagcccactttctctcctgcttccactctctgtcctgcctccccaccccaagagccctctgtcaaaatgacatctgtgaggtgagacatcacttcttccactggtattaaaagttgttcgcccagaatggaaatgtatcacttgcatttgatggtcaagttatgcctactgccttgggaacaaagaagacagtcttgatgataggacggggtgcagatgtcacctacttcccctgtggaggacggggtggagaactttggagctcctttcttcttgctccagtgtgggcagggaggggcatacagagcactgacagccctcagtgttttcagaagctggttctgggcaagtctcagcttgggaggagcctgatgtgatgctggaagtggcattgttagcacttggggcagtcagagtgaagggagacattcctcagcctaaatagatcgtgggcattggtttttgttgttgtttggtgttttttggatttcactctgttgccccagctggagtgtcgtggtgcaatcatagctcactgcagcctcatcctcctgggctcaggtgatcttcttgcctcagcctcccgaatagctgggactacaggcatacgccaccatacccggctaactttttaaaaattgttttggtagagatgggggtctcactttattacccaggctggtctcgaacttttgggctcaagcccgcctcccaccttggcctcccaaagtggtgggaccgtaggcgtgagtcactgcgcccagcctggatattgttaaacattgtctttatatacaaatgttggtttcttttccaggaacctgggcctatgcagggcacacacgccggtcagttgtatgtacctaatttcacggtagccaactatgtctgtagccgttcaagcaacctgctattttattctgttttgtcagtagaagaatggagttcaacagctttgctggtactcaatacctggaaacagacagcatgttcttaacacatgcttttttcctttggagattaagggatagtattccagtttgacaatgtagataccaggctcctgtaattcctgtggcccagggaaacagtggctctaattttcaggtcctccactgcagaatgactcattcctgtgtgatctgagcgtgatctcgcctgcatgggaagctgccctgtaagggagcaggccggtgaggaacggaaaggaccacagcagcgcccaggccgccctgccaggccaggctagagttgcgcagataaaggccccgcatctgataagtgtcgccgcctgcccctgctggcgctcaggatcgtacttcttgtccttttaaaactcccttgcactccagcgtcattggaggcctgcaggcacactctgaaatagctgtacgtgtgggtggggaggagatagatgtcttaaagtgtacggatcatttgtttctctgcaggtgctgtcacactggaagcttgtggaaaccgtgttgtgtgtgttaactgagtggtgtgtttaagaacacagtggggcagggccaggaccaagtacaagatcaggttgagtcttgcattgtcaagtacgagactggctagcacagtcagtgaggtcttttggctatcactggtgcattttatttcattcagtccttttctcatagctctcttctgcttagctatttgccaaggcaaaaatagagggctctaaggaaggttacattccagagcacactgacttctattcatacagggggtggcggaaggctgttcctgggattttcagggtgacgataaggttgtgccctagaagtgtgaattcccggagaccctgggaggccccaacccccagcagaccccctcctcagaggctggtcgacagccagcatgcccgcccagtacctggcgagaggtcagggcgcattgccggatgggggagcagaggacgccggagtccaccgtccgcccttcattctggctggtgtcgggtcacaggtggccggatcccgttacccagcccaggacgttcggtttcattgaagaatacctttccctttctgtttccttgtgccgcagatgatttacatggacgatggagtgtcatcttttgtccagatcagaggctccgttccgctgttctgggaacagccagggcttcaggtaggtcatgaaaaaacttaaatgtccccttgtgatgttgtccgccctgcccttcccttcaatagctggggaagatttcttttaacacgttcgtttcatggcatagtttccagtctttttcctcagccctgttgtgttgagctgagctatcaaagtgtgcacacgtgtgtgcatatgcatgcgtgcgtgtgtgtagaaaacacagacaccactttgttgtttctggtcgtcaaggatgctgtgtgaaaccgctgactcgggaacggtgctgcggtgcctgctgagtgggtgccgcgaagtgagcttgggtagcactgcctgaggttagaccctgagttcggtgtactgaggacgtttctgagagccgtgactctcatggagggcttcaggaaggctctgtggctgcgtaggtctggcacccggtgctgcctgttgtggggccacgtgagacttccacagctttcccgtgatttctaaaaataccccttgccgtccaaagcagggctctggtcagtgccagagagatttggcattctttctcctgggaagagcacagggtggggacacattccaagaacacatttgtcatcaatggaatgacacgctgcctccttcaccagggtctctaacaaggtgggttatgggccgagtggactggaggggcctccccactaatccccagtcttcctccctgtcccgaggggacgtgggtgccttcagaaagcctctcggccagggcctttgtcgcctctcggctcttcttaccgacagctctcgtgtgactgcatttgggttgccagccagtggctactggggcccagagtgccatctgccaggttccagggggtgtttgacaacgctggactcagggtccccagtcctgggttcagcttcttagcctgctctttgacttgaccctgtgccaggagcaggtgagtcacttgtccccatggctgtcagcacgctgcagtgacagcattggtgaagtactgggtcagcctgggcagtgagatggatgaatggaggtctcgtttaggctccacgctctggtagggagaaaagtcttgattaacattcagtctttccactagaaagagcgcaccacactgcacgagataactgacggcctccggagaaacgctcctgaggacagctgtgacacagaaactcctccggagggctgcccaaaggaggtttttggaaaaatagctttattgcaatataacttacacacccatttaaagcctacaacttggtgcttttactgcatttatggtgttgtgtaaccaccactgtaatctaatcttagaacactttgatcaccactaacaaactttgtccccgttagtggtctctcccatcccctccaagtctccctcatgccaactcgactgttcatctactgtctttatctatagatttcccattccagacgttccaaaagagtttttgaaacctgattttctttaaatatggagttttcctttggaaacttctcgagctctgtattcaggagaatgaaagaattgatcgaatgagtgtggcacaaaaaggagacagggagaccatgttgtgtttcatgtaaagtttgtaagaaatccaaaaattaggggaatggtcatgatggattcttagaatttgggaaggaccctttggaattcatccattccaccctctgactctcagttcaggggtcctccttttttttttttttttttttttttttgagatggagtctcactctgttgcccaggctggagtgcagtggtgcaatctcggctcactgcaacatctgccccccgagttcaagccgttcccctgcctcagcctccagagtagctgggactacaggtgcccactaccacacccagctaattttgttgtatttttagtagagatggagtttcaccatgttagccaggctggtcttgaactcctgacttcaggtgatccacccgcctcagcctcccaaagtgctgggattacaggcgtgagccaccgcacctagccaggccagttcagggatcctcttccaggacctccaaagggctgtcctccaggccacaactggggatggttccgactcttggtgaattcctcctgtattgcactgctgcgtctgtctgactctagagtgttttggggtgcgcgggaatatgtctgattcttctccgtgtgactcaccctcagtccttggagggagtcttctggttccctcttcttcttcttgtcttctctaaggcctcccaactcctttggccaccttccctcctgtttctaagactctcaatgttctcatctccctcatctaaaaaatgacactcctttttgtcgttcccctcttggatttcattttggtcttaccttgaccttcgtgctgcctcagatgtagcctgacccgccatgggatgactgtgccttggtctgtcaggggccaggagcagtggaccacgaggtctcagctttttggcagctgtttcaccctcttaaattcctaacatttgtgctgcaccaaagcctccatggtttcttctttttgtttcttgttttgttttgtttttgagacgaagtcttgctctgtcacccaggctggagtgcaatggcacgacctcggctcactgcaacctccacttcctgggttcaagagattctcctgcctcagcctcacaagtagctggggttacaggcacccaccaccatgcctggctaattttttttgtatttttagtagagacagggtttcatcacgttgaccaggctggttttgaacttctgacctcaagtgatctgcccgcttcggcctcccaaagtgctaggattacaggcgtgagccatcgcgcccggcctccatggtttcttcaaaacaagcttcagaaggctttagtgttccttaatcttattaaggatttgctaacctttgggcctaatacctgtgtttagcctctaaacaccactcatcatcaaagagagatgaagtcatcttcacagggggccgggagggcagcgggaagtggtggtctaccgtcaccggcttcaactgtcactatcaagcctaaggctgcttctagttatttttctccactttgaactttttctcttccttcttcacttaggttagatgaaaagtgcaaagattttggggtgagtagcttgcgtattaagctgcaatgctgtccctccttgacagctgccgttggaaacccaggagcccagcaggatggggcagggttgagcagagggtggtggatgaggatttgtctgcatgttttcctgggtaatggtaccttcagtacttcctgactccatttctagcagccgtgtacctttaataaatttcatttttacgtgtaaatgggctgtgcagtttataaatagccacattgaaattttacccttaaagcaaattgctccctggtctagctagttcgagaatctatttatgatctgtgtctgtggttgacaacgttgctcccctggtcattgtagaagcttccccccaccatatgctgtatagacacgtgccttgccaaggtgagttcagtctgtcttttgaagtttcctgcaactgaaccaaacggaggaggatgccgagtagagcagacccctcttgccctgccttcacctctttcctgccagaaaccattcgccaagtttgtggagtcgtggcgctggatgggcttgtgtgtttgtaccttccttttttccaaaaaggacatgagatggcttgtagtataacagtttcaaaaataagtgaagaggtctggatgaagggcaagagtcgaattggtgcccacgatgcatgccgtgggtcttgtgtgcgtgggaaggaacctgacgcttgttccaagcttccccgcagccaccacagaaagaaccacagtcacagccagtttatgacagtgactcagagcacgagctttgaagcgacgcagacctgggctcaaattcaaactctggctcccctgctttgtaaccatgtgtgtttgagaggctcttatctgtgccaagccttagtttacttttctgtaaaatggggctaacaatatctaccttatagggttctagagaggattaaagagcgtaatataagaatttggctgggcatgggggctcatgcctgtaattccagcaatttgggaggccaaggtggacagatcacttgaggtcaggagtttaagacaagcctggccaacatggtgaaatcccatccccactaaaaatgcaaaaattagctaggcatggtgtcaggttcctgtaatcccagttattcaggaggctgaggcaggagaatcacttgaacctgggaggcggagtttgcagtgagccaagattgtgccaccacactctagcctggtcaacagagtgcgactctgtcaaaaaaaaaaaaaaaaaaaaaaaaaaaaaaacacacagtatctagaatctaaaaagtactcaaaatggcagctgctattgatactaatagaaacaaatgataacacccaggagataaaaccaatggtggcatccggagaagcatggctcttggtgccgtgagcactgaatgagagtttcctcctgtctttgtgggaacagggacaccgtgagatgtagtaacatgaagacagcttcctggtcagtcttatctctcatccctcatagactcatcgtaaatcagtaaccccagatgaagccatttattcatcccaaacattcactgagcgtctgccaggtgtagggggcaccagggatcagatacagtccctaccttcagggagcagggggcaggacagggcagtgttgtgtggacagagccgtgttggaggaagggagaggccccgggggcagctctcccaggctgagggtgtggggtgggctgcccaagggtccagactggggaggggtgaggaagaagcactcaggcaaggaaggcagcccttgcagagggaacaatgggtgcaggtgttgtaacccttgggttcacagtgatcagggagcatcactgggtagcttcttgaagtcctgggcatgaagggaatgggaggagagataggagaggtgagcagggctgggtcaagggcctgtggatgctacactgaggagtttgcatcccataccagcagctactcaagcagtactccccaaccttgctgcacagaagactctgctggggagcttgaaaaatcctgatacccaggttgataccatacacattaagtcacaatatctggggccgggagccaggcagctgtcctttttgaagacccatgggtgactccagcatgcagaaaagtatgggaaccactcggtgctgtgctggcaagccagttttattggggtcagactgggtgcagggagctttggtttgtagcatttgtccattgctgtggtgtaaattctcccatcgtggccactttcaacctacggctccacatcactgagctcagagttgggaccagctgggtgcaccgtcggcttgcaagcctgcaggagctggctccagcacacactggacactgctaaagggctgcaagaggtagagacacaattagacagaagtctaggcagtgttagtttggaggggaaagacaccagatgggaggccgttgagctgagatttttgggtaaccttaagtctggtaggagtggtggggtgcaggggagaggtgtggaggtgctgtctgcgatccttgggcctcttgagtgctgatcgagactctgctgtgacttccacagccaggagttctccagaccccgactatcctcatggctgtctacctaacctcagtctctggtctataggattgaactaatgactttaggggccagataagagtagctggccctttgcccagaggggaggaggacggggtggaggagaagggaagctacaaaatgcagtgacagtggtggaccctgccctcagctgcagctcgtgcctgtggcttctgacacccagtgacctcaggactaggtgacaccagagaaggtggatgctggtcagtgttggagcaggacagaggggaggaaggatatgaggcccaaggaacccagacaaaagggatgcacggggtgacggaggaagggtgagctccggagagaacatgaggcccagctcccctccacttttgcccaaggcctcactgtgttgcctttccacctgcctaaaagaagcagcttagggtcatgactcagggagaggcggttagacaagtccaataatacaacttgtttaggggatggagggacccagcctgaggccctgagcccagggaagcagctgtggcaagctgagcctggtcatggtgtccctgaggctctgcaggtatggacatgcctctgctggtatgcatgcagctctgcaggtggggacacggctctgcaggtggggacatggctctgcaggtatgcacgtggctctgcaggtggggacacggctctgcaggtgtcgacatgcctctgctggtatgcacgcagctctgcaggtggggacatggctctgcaggtatgcctgcggctctgcaggtatgcatgtggctctgcaggtatgcatgcagctctgcaggtggggacatgcctctaccagtatgcacgtggctctgcaggtgtgcacccggctctgcaggtatggacacagctctgcaggtgtggacagggctctgcaggtgtgcatgcagctctacaggtgtggatgcacctctgcaggtatgcacatggcccctggagctgtcttccctgctgtaccttctaccccttcatgggcatttgtaacctaagccaaaagggaacataacaagtccagaaataagtcaaaaccagaaccactcaaacttcagcgtgtgtgcataggaatctcctggagggcttgttaaaacacagattcctggccccacccctggagagtctggctcagcagatctggggtaggcccaggacttcgcatttctaacaagcacccagaggaggtccaacgaccacactttgagaatcactggtctagacttaacagatcccttctgcccattccctgctctggtcattcacccgggggtggtgctcccgactgacttcttagttctctgaggtagaaaggtttgttgtcagcagtgatactggactagccactgcaggggatattgaccatgcctgtgacagttgggcccagccctgtccacacggaatgcttgtctaagtccaggataaaagacaagcctgaggcctcagaaaagatgtgctgcagcccctgtccgggctgtgccttctgctgtgggcagctgattccagggcatgccgtctgcttgccacattccctgagtcctcactgatgtggttgaggggaccccatcaaaggcaggtgcctcatttcactctgctttgctgcctgttccctggactcaagggcatagtttctgtcaaattaatttgcgcttgtgcaggtttgttagaaactttgaagtgcttctgggtctttccatgggggttctggttaggtgtcatcacccaggccaggggattcagcgtctcccatccctttcccacctttccatgacacccaatggcatgttgactcggagggcgctcagtaactgaggaatggactgctgactgatagtgcagtttatatgttaacgggggagctatagagcctggggattggagcctgctaggtccagtcatctgtgcaacagtttctacctaattaaaagaagaggctttgggttatgactcagggagagacagttagacatgtccagtaatagaacttgtcacgacggagagccaggctcctcagccctggcctgccaagcttgtattctcttcttactgtgctcccatggggaatgatcctataaacagctgctgctcattgctgaagccaggggagacttcttgtgatgactgacagaccacacagagcaggtagcccctctcttgggttttagccctggtgacctctcatagggtggctgaggggtacacagacccgctgacttccctcagggtgcaggatggagcaggcctctcggtagtgcgaccatgaaagttttcaaattttctgagatttcctcagccaggtgttgatggccatggggataaaggacagaggtaacacaggcagcaaaaaaataaaaaaaaaccccacaggtttggggtgagcctttcttaggagctccattagccaacagccaagatacctcattttgcactcacttcacttgtgaccaaagtgtcttaggaccaaaagggatttgggactttgttgaactgtttatataaaaaaaacctggctgggcacaatggctcaagcctgtaatctcagtactttgagaggccgaggtgggtggatcacttgagcccgggagttcaagaccaacgtgggcagcatggcgaaaccccatctctacaaaaaatacaaaaaaaaaaaaaaatagccaggtgttgtagtgtacacttgtagtcccggcaacttgggaggctgaggtgggaggatcatttgaacctgggaggttgaggctgcagtgagccgtgattgcacctctgcactccagcctgggcaacagagtaagaccctgtctcaaagaaaaaaaaaagaagaagaagaataagaagaaaagaaaaggaaaccttctccaaggaatctctaaatctattgctgagaaaccagttctctagatgggtgcttttcttgagtctgagatggggcagttgtatcacctgcagtgttgagttatacaatgatacatgaagcatgataatagctgcatctcataacatagataaatctgctgacactacttttacaacactcaaacagaagcaaaactaaagagtgcatttttaactacttattcttgaaataatttcagacctacagaaaaaatttaagaacaagagggaactcccatatgtccttcacccagattcactaaattttaaccttttgccacacacgttattattttttgaaccgtttgaaagtaggttgcatatatcacattggtgttagtccatttgccttgctgtaaaggaatacctgaggctgggtaatttataaaggaaagaggtttatttggctcatggtaatgcaggctatacaggaagcatggtgccagcatctgcttctggggagggtctcaggaagcttacagtcatggtggaagaggaaggggagccagtgtgtcatatgacgagggagggagcaaggagagggaggttgcaggttcctttaaacaactagctctcctgtgaaccagcaagaactcattcattaccatggggttgtcaccaagctattaatgagggatctgtccatatgatccaaacacctcccaccaggccccacctccaacactggaggtcacgttttaacgtgagatttggaagggacacacatccaaaccatgtcagtgtctctttacttaagtgcaaaatatactctcctacatatagtataggtacacatttgggaaatttaacattgacaaagtacttcaatctcatctgcaggcaatattccaaattgatcacttgtctcagtgatgtcctttgaagcaccttttcccgccttgagtccagcatcacatactgcattttgtggtcatgtctctagtctttaatctgcatctgttcctcggctttctgtctttcaaaacattgatgtttttggagaatgcaagccttcttttccgttaagtcgagggtccctacatttacattttcctagtgtttcattataatcacattcagtgtatggatccctgaccagaatgctacctacatgatgctgtatccttctcagggtaccagatctggaggcacacggtgtccatctgccactcattagtgatgttaattttggtcacccagtcaaggtgctattcagtttctccacttacggttaatatgttttcccttccaactaatcagcaatctatgggagacactttgagaccatgctggtatcctgccttttactaaactttcccttaagatttatcatcaacagataatttttgctgaacaattatttactatgacagttgtaaaatgatgatttttaaatgatttcctccaaatttattacttggtattctactatagagccctctcttgttccccattcacccacctacacacccacccacctgcacactgattcacccatctgtcacccattaacccatccattcatccactcattcacccacccacctgcttatccactcatcgtccacctatctacccacccatccacctatccacctacttgtctacccaccatccacccatccctctatccagccagtcatccatccatccatccagtcatccacccatccagccatccagccatcaatccacccagccatccacccatccatgcacccacccatccacccacccactcacccacttacctatccatccatctttcatctacccattcacccacccatccatccatcctcacattcacctgtccatccatccacccacctatccatctactgatgcatccactgatccatccatccacccacccattctcttatccacctttctatccatccactgatccatccatccacccacccatccatccatccccattcacccatccatctatccattcagtcgcccatctattcacccatccatccatccccccattcatccatccacccattatccatccattcagccatccacccatccattcacccattcatctatccatccactcacccacccacctacccatccacccatctatccatccactcagctatccatccatccatccatccatccatccactcagctattcatccatccacccacccatccatccactcagctattcattcatccatccatccacccacctacccatccacccagctattcatccatccatccatccatccatctattcacccatctagttatcatcagtatagattcatgaatttctattttattcatcaggttaaaatccattactgtcctcatacagtttgatgttcagattgtcccagatttggccagcaaaagcccctttaagctgactccagcaacaatatgtattttaaatgtattttctaaaactaagttgagtattaaataaatagttctattaataataaggcaaatttgatcattaggatgactcagattttagggggaaattagtgtccctgaaggcataaaggagactgagaagcagtttctgtctccacagttggcttcactgacctctgtgctatcagagagcttaggatctgacatctgcctcatcatcttaccctggatctgctttctgtggaagaattgcagcagacatggtcatgttgcagttaggactgggcagcagcaaagccagactcgaggcacctagacctgagtttggagcactgttagctgaatccagagagctcagccttcctgagccctgaagagaccacagaggtggcctagtgggtgccacatgcagcctggctgggagtaagaaggagaatgggaaaaaccatggcctccttggtttgcagagaaggaagaatcactgttgttacttctctttgctttaggttggctcccatcatctgagactccacagaggcctggaagccaatgcccctgctttcgacaggtagggattgtctgacaccatccaagcctgtcattgtcatccttagacatcgtcctcccatcagacacaagggagagggtgcgacgggaaagggaggaccctgaaccctgaatctaaagctgctttccctttggtcctttatgcaagaagggagatgacaaaatgggatttttactttgttctcaggtttcctgaaggtaaattaatgaatgttcaggtagcactttataattattttatcttaccagtttcttgcaatgaggcttcatctctatgccctggttaataagggatcatctaaattatagggtatttgaagctgtttgttttttgttttaaaatagtatagaataaataagtatagaaaagtataaagtgaaaaataaaagtaccctaactcccagttaccactctcagagattttactattagtagttttttacatgtcattctagaaaacaattttggcattttatgtgtgtgtgtgtgtgtgtgtgtgtgtgtgtgtatttaaatacacaaattggatcataacacatttactgttttgcagcttgcttaagaaaagcagagctatttgtaatatgtatttgaaataataacttcttaaaagatttgcttatttaatctaaatactcaatattttaaaattgtcttagtgaatatagtaaaaattctcgaaagtaatgtgttaagtgtttgagtccttctacctgaagctttattgagactttaagtttgctttcatactcttgttaaacataacacttgtcatatgagcccagatgtgaccccctgattagtgtgtgacatgtaatgcgcttttctttaaagagatatttaatcaagtatagacaagaccattgccttttccaaagcattattagtatgtcctgagcattctacatgcggagttctttcagttgacattcatctatactaaattgtcttaggaaatagtgaacatgaaaccaaaaatgaaattctacctggctgagcttggtggctcagattttagggagtcgcctgggtgacagagcgagactccatctcaaaacaaaacaaacaaaaaacaaaaatattctacccgaagctgacccaaaacaagagggaagggtcatgctgggttcgcttcaggaaccctcctatgtttaggagctttcttaaaaaatacatacatctagttgaagcacatttgcatagactgcagatttttcagaatcctggtaatgcatggtgtgtgagatgcacgtaccacagagaatgagacctctctctcctcacaagcaccccagaggctgccttgccccttggaaagcattcctaaatctaggggtacacttagatctcttctgcaaatcacaggacaagctgctgaaagggtgagtctttctacaggcagctactgtgtccaggaagtctcttctgtaatgcttcttacccacgacactgggctggaggcaggagccctcccgttcccttgcaggtgctgctgctctcatgttcattgctgactatgttcccctcattcgagataacgtttggaaataaggtgacatgtctgcctagtggccgcagtggggcaccatgagggtccccctgaaagcaggctgcccaggtcctcgatggtgtccctggactggcatgtgcattgtcctgggtgcttcccaattctcttctctgggacatcactgcgctctcaagagtcgtgcggttctctgatggatttggttgagagtaaatcctttctttcccccgcaaaaccttcacacagatagtttttcttcccagaggatgcttgttttcctttgcctgagctgcatgggtgcccctgttagccgaggcggtctcttgtcactttgctgtatgtgctccatatctgaggagggctgtttgcagcaggactttggctgcagctgcttgagtggggtcttgtcatctctgtgtggtgatgagtctcggtggaagggctaacctttcacagggcggtgcctcagtctctcctcacaggacagtgaaccccttctccttccccgccccgctctgcgggcggctgctgtgcacatcagggtgtgctgaactcttggtccctccctgaagatgagaaggatgcttccaaatagaaatctgattcctcagtatcccgaaaaactcctgttttccaagtagcttcctatgacagtaacccgtaggcaggggaagtgaaaaaaaggcctcaatgctcagggtgacccaggaagaagcccgtatgatgccgaccttgctgctggtgccagcgtccccttacaccctgggtgccagcgctcccttacgccctgggtgccagcgtccccttacctgggtcggcagggcctctcagctcaccaataacgagcattttacaataaagggaaagaaagaggaaccacgtcccacacaccaagcactgtccttgtcactttcactcgtctttttagtcctcctcgccattctccgcaggaggggaagtagccctgctttatagatgaaggagccagctcagaagggatgaatcatttgatcaggggagtttggggttgggacagcatagagtaatgatgaggaatagtgagtaataatgagtaataacagtttccttctggccctgggctttggaaccagttgagaagaaggggcaggaatgagacaggaagagatcagaaatgggccttgtttccgatgagccacattgtgggatgtggcttggatgtgtggccacggtgggctccctcaccaggggcagagcctgcacgtgtcagagccaggcctgggatgcaccttctctgggcagaccgacccaaaagaaagcccacaagggctgaagccacacacagcccgccccagggctgcctggagctgcacgtggagacgggagcccgggagggtgctcacccttaacttaggccagggagtcagcaggcaagcctaacttcaaactacccacttcaaaatccatagtctttctactactgtcccttaaagttagtaagagaatgttttctcttactgcataagaaaaaaaatgatttttttcatgatcattattagctctttaaaaaattccgctcataaacgtgtcattacagaaatttggaaaagagaaagatgtttaaagaagaaaagaacttgaatcatataaaattctaccacttttgacatcatgtgtttttttccagtgttttttctatatttaggcataaagattgcaccattaaacgataatttgacatctgctttttgcattgtatcatttccctatgttttgtttaaggcactacatttcaacatgtttaaatttgaaatgtaaggttacttttaaaaagctggtgatcaagaataaatattggaatctctccctaatatttcaacatacatatttagaaagtagcttccaatacaaggaatgttttccaaagcctgcaagttttgttgtatctccttgttgtggtttagcataatgcaatatagcacttagattgaaaacaggatgctgagttgagagctctcctgccagttgttctagttttgagaagggtgggtaccaagcaaaataagagattcatttcacacatgtgcacattgcatgtgtaagactctagcccaggcacggtggcttatgcctgtaatcccaacactttgggacgctgaggtgggaagattgcttgaagccaggagttcgagaccagcctggacaacatagcaagaccctgtctctatgaaaaataaataagtaaaaattagccagatgtggtggcatgtacctgtagtccctattacttgagaggctgagttgggaggattgcttgagcccaggagtttgaggcagcagtgagctatgatcgtgccactgcactctagcctggacaacagactgagatcctgtctcaaaaacaaaattctcttgatgaaagttcaggttaggtgttctagatataatgggaggtgctttatagaaagtgcagcatatcctttgtctgattccaaacaaatgtagaagtctacgctagctagtagtaatggcagctgggaggtgcaggttctctccacccaggctcattttccacgatttgggtcatgggggacagctggtcctggactgtggcactaagaaagcatgactcctgccccgtcttcccttgaggggcagaacagggcagagtctgcacctgtgcccgtgcccagcatcacgcccaccccgctgcctttgcaggcacatggtgcttctgaaggagcagtacgggcagcaggtggtcgtgaaccttctgggaagcagaggcggagaggaggtgctcaacagagccttcaaggtaaggccaggctgtcctctccacagctgggctgggcggcaggtggccatggtggagcgttgagcctggaggtggctcctgcagggactggagctgacagcccagccctccttcgtttcctgaggcttccccagcattccgaccagtgaacacggcagtgctcagtgactcgggccctgatacagtgagtgtaatttcttttctttttttttttttttaagacagagtttggctcttgtcgctcaggctggagtgcagtggtgcaatctcagctcactgcaacctctgcctcccaggtacaagcgattctcctccctcagcctcccaagtagctgggattacaggcacttgccaccacgcctggctaatttttgtatttttagtagagacggggtttcaccatgttgttcaggttggtcaagaactcctgacctcaggtgatccacccgcctcggcctcccaaagtgctgggattgcaggcgtgagccaccgcgcccggcctagtgagtgtaatttctgtgagctgatggttgggagaatttgctcaaagtcaaaacagagcatctcctgtccccagccatgtgtcccttaccctccctccccatggggctttgagggcttctgacctctcaaggtacccctctcagtccagcccaggagcaggcaggcctccctttctgccctggctggtcctgggtgagttcccccagccccacagggcacccggcctcagggctcaggagcaggaacttcggtggctttcccctgcttgccggctggccttcaaatttccccctcttcctcgggctttcatggcagctcctggacctgctgctgctgggctcctgtgggctccttcagacttccttggggggcttttcctggcgatcctggacagatcctgggcagggtcacagagccatgggagcaagagactccgcccacctggccaggttccatccctgtgcatggatcccaggcctccagcccccgccccctgctccccaggcgcaagacgttccagaatgagccaagggggctcctggttcctttaccagcctccatgtcccctgcctaatagagaaaaactctctcgttgtttaaagctcaaagatatcccttacagagagagctcgaagtcgcctcactgggggttagggcgatctctgagcctttccctctgcttagaaatgccacatgctcatgctcagagcaggcacttcctggttgccaattttatttggccagacctgcttttcctgtttggtttgttgctattagcaacgagctccagaagtgtctcccttcccacccatcttggcagtgatgctggctgctaatttgaaggaagaagggaaaaagctaaaaaataagaataataataagaaccccaagtccttttcccctatgccttgagttgtggcccctcccatcagtgggtgaagtgcccggcactggtgagggcgggagatggcagccacctcatgcggagaagggtgggctcctggccaggtagggaggggcactctagctgaagacctgggtcatggccctgcctggggtggccctcagccacctcagcttggcccagaccaaggttggtggcccagcagcctgcccagggcccaatggccatcagtcctgctggatgaagcactggctgtggaatgcatggcactgagccaccaggcactgttgggctcctccagcttcttgctcacagcaagacttgcttgatgatggcagcactgcattgatttacactcagacctatcacaggcagtcacgttgagtcagatcagatgacccccaagtccttctagtccttccaagtcactaggacctctggctgggcagaggctggactggcctgacctgaagccacaagggcatgagtgcagggtgagaggcctggaagccgggtggcctgggtaggcggacagtttgtccttcatcacggggctctctggggagaaagccagggagctgccaggccagggaagcctcatatggaagggagggctcttaagggcatcctggtgccatcagcagccccttgacctgcttcccatctctccccaccttcactctggctccctgaccatcctgaagtagcatcgggatgtgggacccacctgggccacttcagctggagacttggtctcttcagagcataaccaccagaggctggtgcgcggcaggatggggccggttactagggcaacggggagctggattatgagctctgcagcctgccacagcactgctatctctgagggcctggggcacctgggccacctgaagaacagagcagtccttcctcacctgtgccctccagagagccctgcaggagtatgatctctccaggaagccacacctgctctggcttcttttgctcaagggggaccttctgccctttcgcaggcaagacgctctttgtgggttttgtccccccagggcctttgtcctgtgcttcccttttggggtcaactgcctggtccactgtgagcttccagctaaagcacgtcctgcggcgagtcaccttggttagccgcacgggtcaagctctgcaaggagcttgccctcctcgtcctcccttccctctgctcccctcaccgccctcccctcctcttttcagaagctgctctgggcttcttgccacgcgggcgacacgcctatgatcaattttgacttccatcagtttgccaaaggtgggaagctagagaaattggagaccctcttgaggccacagttaaagctgcactgggaagacttcgatgtgttcacaaagggggagaacgtcagtccacggtgaggctcgctgcgcactgtgccgcgtcttctgctggggggaagcgtcagtccacggtgaggctcgctgcgtgctgtgccttctgctgggtgaggcggcagaggggccgtgcagtctaggacatgtgccctatgaggggcagcttccttccctccccactcagttacccttgtggtttcctgggtcataagcttggcgacgccgggaatcttgggttccagcttctcatctcccttcccacagtaggagacaggcttttgaatttctcaaggagatgttgagtcatggttttctggcaaaagaaatgaactaataaaggggactgcattaaaacatggagctccacgctgtgacgcaggcctgtgagagtgagggccacagtcgcggtgggatggctggcatagacttagattgctagaggagaccagggtatggacttccctgttcagagcagaggagaaaaacgaagtccagttccctcaggtcacatgcagggggtcctcattatttgcagattccatattggcttatttacctattccttaaaactgatttgtaaccccaaaatcagtatgcaaagcatttttgctggacagagtatttaaatactctggcctcgtatttaaacaagtttcctttttaagatttagtaccatgtttttcacatttgtggggtctttgttaggggcccccctttgttcggggatctcatggtttagaatggccccaagcagtgtgccgaagagctgtctagtacttctgagcacaagaaggtggtgatgtgctttatggagaaaatgcacgttaagataagctttgtccctatatgagctacagtgctgtcggccatggttcagtgttaattaagcaaatatatatattcaataaggtgtctttatatggaaacatacataaaacaaggttgtatattgatcagttgataaaaatgtgaccagaggtttgcaggaacctaaccctatatttcccctaggagcgatggttctgtgttcatgtccaattcagtgttcctacaactttatagaacataattgctataaataacaaggaccagctaaacgtaaaacgacccagctgtgcaggctactgagtgtgtgtcctggggtctgcctgcctttccagaagtgctggggatccactgggatggacactggggtttctggggggctattgatgaggaggtgaggggttccctcttagaacatgtttcctcacacctgtaatcccagcactttggaaggctgaggtgggcggatcacaaggtcaggagttcgagactagcctggccaatgtggtgaaacaccgtctgtactaaaaatacaaaaattagccgggtgtgatggcacgcacctgtagtcccagctacttggaaggctgagacaggagaatcgcttgaacctgggaggcggaggttgcagtgagccgagatcatgccattgcactccagcttgggtgacagaggtgagactctgtctcaaaaaaaaaaaaaaaaaaaaaaaaaaaaccatgtttccttgggagtcaaaagtcagacatgggcctctgtgctatggccactgcttctttgaaaacaacatataaccgtttacatttcttcttgtcctaagttttcagaaaggcactttgcggatgaactgtcttgactgcctggaccgaaccaacactgtgcagagcttcatcgcgctcgaggtgcgtccctgccacagccttttcggccatctgtgccaggtcctgtgacttcagctggacaggctgggctgagcacctttagcggcaagatgagggtggcatcaccaagacaaccttctgactatggggaaggtggacagggagacactgggacatccagagaggggttccccaggaggctgctttctctgtcgtaggcacactttctcacaccctcttgtgaaatgcatcccagacatggtggcccaaaggctcctcgggaacagcggttgtgtgtaatgattatcgtggatgcaccattggccaaaggcagtgtgaggctggccggatgaggctggatttgaagctggggagggagacctctgtctgcatggccccagctgcctggttgacctctcctggctggggggtcgggggtagggtcagcaccccctgctgtccaccactgtttgctcttcagcctctggcattgggtggggcggggcggggtgcaggggcgttcaagtgtcagggggtgagaggagggcttgggtggaccctatagataaagttggggtgagatgtgggaagtcactctctgctgtgggaactcctcatcctctggaggggcacagagtcttccaggcacagcgtaatccacaggctgccgaataaggaacctcctgggacagtggctgcagggcctctgtgggagaagccagtgacagccatcccttattcctccccaggtcctgcatctgcagctcaagaccctggggctgagttcaaaacccatcgttgaccgctttgtggagtccttcaaagccatgtggtctctgaatggccacagcctgagcaaggtgttcacaggcagcagagccctggaagggaaggccaaggtagggccccgccgagggggcagggtgggggccccagggacccccctcacggcctgcggtctgggctctcggcaggtggggaagctgaaggatggagcccggtccatgtctcgaaccatccagtccaacttcttcgacggggtgaagcaggaggccatcaagctgctgctggttggggacgtctacggcgaggaggtggcagacaaagggggcatgctgctggacagcacggcgctcctgggtagggcctgccgcagacagggcgaggcagggaggtagggtgctccccagccccactttcccaccgcctctgtgctatccagagagcgggtggcagaggtgcctgggatctgagcagtggaccatgcaccttgcagctgtcactgcctctcccgggagcctgcgctttcctgctgggcctgggagctcacgcttcctctgtctcggcttggactgtgtttccatcctgagaagcgagagacaccaggcgggctcagggagaggccgtgcactctcctaaacgcatcggtgcctttgaatgctaacctactccagaaacttcctcagctgcctgggctcttgggcccttagcaggtgatgttggctttgggagcttcccatgaagttggcctccagtttctctcttggcccctgaggaccctgtggaaacagagaaggaggatgctgtcatcccctggggatgagggcaccttctggtctcagcggcaagacatcgtgattccatcaatataggaggttcctttgggagcattttaatggcatcttcttacctgagcctgtaaacatattaggtctcatggaaaagtaggggaaacccagcatttttccttataagaatgtacaagtgtcgctttagaaatgtcaggtgtttttgaaaaatgaactagcccatgcttaaaatgggttcacggccctttccactgtcaccgtcactgggggagctctaatttggcttccgataggcacggtgatatttagtttctactctggaaacagtgccagctctgtaaaaggtgaacaaagctccatgttgtacagtgagtcttatttaatagcaaggcagacatgagttagatttggtttacatcacaagtttaaaaggtggaatatattttggctatctagaggatggagatggttctgtgtagtgactttttaaagccttaagtctggggcaaaacaaaacatatcagacatgcaggctggaaggcagaggatgcaaaggtggctgtctgggttggtaagacacttaaagttatagtgtatatggatgcatacacaatgaaatatggtcagttacagcatgcccttgcttaaattcctatgccttgttcttctacggagtggacagtgaggacacggcttttccctgtcgtgtctgagatccctatggtctgatgtcccatggcttctggcttcagttgggggtaggggtatagacggtgagtttccagtcttatgttttcacgcctttattgtagaaatgccataagggaagccccgtggtgaccgtggttttaagccttttgtcgtcttcgtaaggagcataccctggtttatctctagaggctcatgaaccatctgtctctgccaggcagcctcatctgtctttttggaggatgcctgagctttggaactgcaaagaaatgtgcctttttatgcctcctgacagtgactcccaggatcctgaaagctatgactgagcgtcagtccgaattcacaaatttcaagcggatccggattgctatggggacctggaacgtgaacggaggaaagcagttccggagcaacgtgctcaggacggcggagctgacagactggctgctcgactcgccccagctctcgggagctaccgactcccagggtgagggcagtgactttgggggagacaaaatccaattgcacctaacctgacatgtcacgcttgaccctttagtggccatcgtcttgtggaatttcatctttggtgtcttccctcctcacaatgtctaaatagcaccatggcctgactctcaagaatgctgcctcgcaagtaactgacctttttcctttcccagatgtttagaagagttagcagatggtgaatctctcttttctctttgcatacagtgatggtgaagtcttaggctttcatcagtagaatcttttcgtcaccagtcggaaggtgtggcttctagggccatgtaactgtgaggttgggagccaagcctgtcttcggtgttttgtttttgttttttgttttgttttgttgttgtttgtttttttgagacaagtttcactcttgtcacccaggctagagtgtagtgacgcaatctcggctcactgcaacctccatctccaaggttcaagcagttatcctgcctcagcctctcgagtagctgggattacaggcgcccaccaccacgcccagctaatttttgtatttttagtagagatggggttttgccatgttggccaggctggtctcgaactcctgacctcaggggatccctctgccacagcctcccaaagtgctgggattacaggcatgcgccaccgcgcctggccctgccttcagtgttgatattgaccaagaacagctcatccctgcctctccccaaaccaactctattaatctgctttaagtagtcacaaaataattcatgtgctatttaggaataaaataattccaaatgttgacacctcaccttttatcttgtaagatacactattgaatggccccagaacttaggatctgaagaataaatgattcttgtccagtcatcgttgactcgggccttggtttttttgtttgtttgttttttgttttgcttccttggactcaggaacttgtggttcaggtttttgcctgttggtgagtgacctgtggtctagctgacatgcagtggcccatgtgtacattcatgccccacagctgcctgggtagtacccagagccccatcccttcctgtgcacacgccatctgtgccctcctttctgcctccaagggcaggtggcagagtccaccattcagagccactggggctctctgtgtcggtggtagcctgggttgctgcttgtggtgcctccagaagccattcaggatgccctccggagcaggcccatcaacgcggagagtgcttagcacagccgtggctcaagagccgtccctccagtccccacgaaagtgactcctcttcttttccctgcaggaaggtgtgcatgtttttagcaagctggctggtattttgcaggggatttttttggggtagacactagcaggctccccagcagtcccactagagatacaccaggttccagagaaggaaaggagtgctgtggttactattgccaagcagatcagacagagggacggggattgttttatttaaaaaaaaaaaaaaaaaaagctttaagtcagggaaactagaggttccaggttgcccattgtggtcaacagagaaggaagtggacagcctgcctggcctctcgctgacagaggccatgtcctcctagctggaccctggggaggtgggcctctcactttctgcagcagctggagccatgactgggcttggtggctcaggagcctgggtgtcagaggtcgtgactggacagattcagtcaatggctacaaggttatattaaattctgacctcccctgttcaaagggaacagaatggacggagggcccctctgggctcactgctgcatttaagccaggcatttctgaagcagattccactggggcagttcccagcagcaatggtagccacctggagttggactcaggcagtggacagcatgactcgggagagggcactggggagccccatgaactcgtaatgcgggacttggcggttctgacttctgtcatctcttgccttgctccccagatgacagcagcccagctgacatatttgctgtggggtttgaagagatggtggaattgagcgcagggaatattgtcaatgccaggtaaggggccaggtgtgcggggccaggcagggacttcctgagtcaggtgcctggctgggagcagagcctctgaggctctccgggagccagcctgcttctgagccagctaagctgtggccctggctgtgtggggatctctcacctggctccttctctatgctcacacatgcaccaccccgttctttccctgccacttaggaagtaaaaggaagggctgatgattgctgtgttttctttgcagtgctctggcctcggccacttgttgaggctaatttatgctgccagagggagctggcatgtgtggacctggggtgcaggggaagggcggggctgggactgggagagtagttgactcatgtttcctggggagaggtgagaaagtgtgagtgccgggaagaggtactttcttcctgcacaccagggcaaaggaaaaaatcaaaaccactggatttttatttgatatgaagtcaactgggcgctccccccaccccctgctgaactggcctggctttattttaaggaactttctgaacaaataaataagactgactctgtggggctgctatgagaaggtcctgggttgggtttcaggggtcaagggagggctgctgtgatgtgtgaggcatagccaaaaacacgcagatcctccagtagaagaaggaaagcatgacactaatattggggtgcgggcagcgtgaaatcagttctgcaaacagaataggcttgggctggagcatttggtaggtgggagatagatgtacttccagctacctgtaaacagcatcctttccttttctcttccagtactaccaacaagaagatgtggggtgaacagcttcagaaagccatctcacgctctcatagatacattctgttgacttcggcacagctggtgggcgtctgtctttatatctttgtacgtccataccatgtcccgttcatcaggtaagaacattctgtttacacacatctggggaacaaggggttgttagtctttgtgttttgttctttgacttccccctcctcccccatccccttctgtaacaggaatcgggacttaccattattttagataaatgtagcaaaaccccctaggaaaaactgggctgaatagaatattgtctagcgattaaaaagccaccatgggaaatgtctaactcaggaagctgaactcttagaaagggtgttacatgattgtcatcgcccaagctcaattccgtgcaaggaaaagggttccttgttggaatcttatagacaggaaacctctgaccaagagctgagtaactcactgggaaatgccaactcttttgtccctttttaaaagaattctaagtagaacgtgtgggcctctacaactgtgacctcattgtcatttctccaaggtgcatgctttgtgagcatcagaaagggggcgagcttaggggcggcattcctcttggggtgtgggtgtgggtgtttggatgctggaggaactcatcttttccccagcttgtggttggcctcatcttaccacctgggcctacccatggcttttgaatttccaccagcctttcggcgagctggcagcaggcgttgaactgacctccccactgagcccctgggtcccgggaagggcctgtgcctgccaagagcaccacgggtacacccctgcagcacctggagactaagactatgctgcccataatcctcttctctgactttcagaagatgtttaggtccctgtccctctgcttgtgttatttgggcagcttggcagtgtcctaggttagcaggtgaaggttagtaaaggttaaaggcaagggcggggtgagggtgagaggtaaagcatttgagaaagggctcagagctgaggagagccaggtttcccaggctcggtgtcctcggcttcacgtgcctttagccctgagctgcttccgcctacaccccttccatcagtcatccccccaaccttgtctgccagcgagcagatgcaccagcaggcctcagtctgtggcatggctgtggaaatgttaacaaatgtgcttgcagcccatgtttctatggactcgtatgcgtcataagtgggcatttgaatgcaagcaggctctggcattgcataaaagtccttttgagaccatctacccagcccagcataaacagctgcccgtttcctagctcttaaagtgcattgattgctgggcacggtgtctcacgcctgtaatcccagcactttgggaggccaaggcaggcagatcacttgaggtgaggagtttgagaccagcctggccaacatggtgaaaccctgcctctactaaaaatacaaaaattagccgggcgtgatggtgggtacctgtaatcccagctactcaggaggctgaggcaggagaattgcttgaacctgggaggccacagttgcagtgagctgagatcacgctgctgcactccagccagggtgacagagcgagactctgtctcaaaataacaataataatttaaaaatgtgttgattgcccagatgacacctcccatgcatggcgtgatggctgcacaggagtggggtgggctggtgggtggtgatgtttgcgccgctcctggtggcagtgagaacctgggcggatgcaggcattgccctgtcttcggcttcatggggtgctcaagtgagcacttcccagttggggtgtgggggagatgtccaggcagcggtgggcagcaggagggaggcggcctcctgaccaggagtcgatgacggccacggtggccactgtgttgagctgatgattttggagcactcagagcagcaggtcccgagctgctgctgggcccttctctgtggcaaagcagggtcacacttctccttcaggagccgacggcatgcgcgtatccttctgttccagggacgtagccatcgacacagtgaagacgggcatggggggcaaggcggggaacaagggcgccgtcggcatccgcttccagttccacagcaccagcttctgcttcatatgtagtcacctgacggccgggcagtcccaggtgaaggagcggaatgaagactacaaggagatcacccagaaactctgcttcccaatggtgagcggcgccgtggggacagccagcacctccctgctcagctcagtcccaaatgtgactgttgataggagccaggcactggggacacaaccacagggagggccccttcctggagggctcagcgctgggggagggggagagggctatgtccctccatggaattgacctggggcagggttagccacgtgcctggagggggccagctttgcagcatttcccgttgctgtacaattcctgagtgtctgcatggccactggatttgtatgtgtgcattttctgattttctaattcaagtgatggtttagggaagaaaaccatgtccgtggtctgtcctgtccaagtggtgaagagcatttgaatccacacagcctaagactccaccttcctgagattcacagtcttcacatgtactttctgtggtggctcagataagcacacccttttgaccaatggaccctttttgactgggaacacggttcttgaccaaggagcccagatcctgcctgtcctcgaagctgcaatagcgaaccgcacactgccctctcgtggcggtccggagggtttcattctgaaactggaggattttcttttcaaatctagacgttaatgttctccttcctgtgcaaagatgctacccgggcacagcttcagcgtgtggtgcacacgaggccacctctttcccgaagtgaggatagacttcagctgttcttgctgcaaaatcttccactgtctgagaggtggtgggttgggtcacagagctcttccctgtgagaacagatccttaaaactgacgtcccattttactgggctgcacgagcactcaaggcaaaatttccttagttttcattaagaagtgccataattcctgttggtgttgtttatttcttatgttaaaaaagaaacaaacgagttgggaaattttcaattgtgtgtaatgcagtttaaaaaaaaaaaaaaagtctaacccttctcacttaaaaatagctactttggggccaggcacagtggctcacacctgtaatcccagcactttgggaggccgaggcgggcagatcacctgaggtcaggagttcgagaccagcctggccaacgtggtgaaaccccacctctactgaaaatacaaaaaaaattagccaggcgtggtggcgtgcacctgtaatcccagctactcaggaggctgagacaggagaatcgcaacccaggaggcagaggttgcagtgagctgagatcgcaccactacactccagcctcggcaacagagcgagactctgtctaaaaaaaaaaaaaaaaaagtgctactttgacatagtaaacttgggatacataataagtaattaaaggatttataatgtagttcttttctaccataaaaatattgagggacctattaacattctacacttcttttttgtttttgttttttgagacagtctcactctgccacccaggctggagtgcagtgacatgatcttggctcactgcaaactccacctcccaggttcaagcaattctcctggctcagcctcctgagtaattgggattacaggcgtgcaccaccaggcccaactagtttttgtatttttagtagagatggggtttcgccatgttggcccagctggtctcgaactcctgacatcaagtgatccgcctgcctcagcctcccaaagtgctgggattacaggtgtgagccatggtgcctggccaacattctacactggtattgtctgataccgtagtcactggccataagtagctatttaaattcaaattaattaaaattaaataacatttaaaattccttgctttccctggccacagtgagaatgatcagtatccatgtggccagtggctcctgcatcagatggcacagagaacatttcggtgctgcagaaagttctgtctgacagtgttatctagacgctcattttatttggttgggacctgtttaatcttctgtccagattattgtcatggggggagtggaaatgcctcatattataggagaagagaagctgattttggagctaggcagatgggagctgaaatcccatctgtatcatgcactagctgtgtaaccttcagcaagtgcctttgtttctgaactttgtttttttttttttaatctaagagagagctggtggtatctgctttgtgcacctggaacagagcccagcccttgcggacagttgatccacagcagctgctgtcattgtcttccccattcctggggaagagacagggaaggcaaggaccccaggagctctccggggctgagctggggccgtgggctcctaggactgggcaggatgggaaggaggagctagagagagatggagaagggtcacctgaaaaagctcaggaagttacatgaaggtgcacatcctgagcatttctgctgctcttttgaaacctcattctcctaacgctgaatgctgggtgctgcttcctaggagtagacactccaaagtaagggtgcatctgatcttcaggacggggatccatggaggaaatgctggccatgttgctctcctccgtttagggtaggagctttcttcaaaccactcagaaacactattatttaaaattaaaaagtaagccatgtaaaaattcctccatagttttatgggatgagtgaaaaacaagatgctctagtagaaaactttcttttttctaagtagcattttgagaaaaatactcctgcttgccccagtgagcttgtttttctcctctctcccaccttccttgcaagatgggctgaatgattatgattttcttttcaacttaggggagaaatgttttttctcatgattatgtattttggtgtggcgatttcaactaccgcattgatcttacttatgaagaagtcttctattttgttaaacgccaagactggaagaaacttctggaatttgatcaactacagctacagaaatcaagtggaaaagtaagttgtgctttaaaaacattttttagcagctgctccaagatggaatgacatctgtgagatgtagaggctggtgcagcaaattcagttccgtgagtggatttcactgtttccaacattgtagaaaataggtgggcttgtgaggttacagtacaggagtggctgttcatacacacttcctgtccttttttttttttttttttttttcctgaggcagagtcttgttcagtcacccaggttggagtgcagtggcactatcttggctcactgcaacctccaccttcctgggttcaagcaattcttgtgcctcagcctcccgagtagctgcgattacaggcgtgtgccgccacacctggctaatttttgtatttttagtagagacgggttttcaccatgttggccaggctggtctcgaactcctggcctcaggtgatctgtgcgcctcagcctcccaaagtgctgggattacaggcatgagccaccatgcccggtcaaccttctcctccttctaatactgttattttagtgcctgtttgcttcctagcaggatgagctgagatgaggggagtacatttaaattccatttagctgtggagaaagaagctggttaaatgtgtgagggccaggtgcggtggctcttgcctgtaatcccaacactttgggaggccgaggcgtgcggatcacctgaggtcaggagttcaagaccagcctggccaacttggtgaaaccccatctctactaaaaatccaaaaattacctgggtatggtggcaggcgcctgtaatcccagctactcaggagactgaggcaggagaatcgcttgaacctgggaggcggaagttgcagtgagccgagatcgcaccactgcactccagcttgggcaacgagcaaaactccgtctcaaaaaaaaaaaaagtgtgaggacagggcagataaggtctctcctgaagcaagatttggacgttcttcgaggtttactgtgtcttcccacttgagccccttccagtgtgtggagtgctaaagggttgccacatggacgagtgaccataccaacctcctaaagcaggttttcctgtcttcctactaccaacattctcacatcctctcagtgatgcccaagagaatgagggtgtgtttgtcccttggtcttcccatggaagcaaggccaatccaaagttaaacaaagaaaagaaggatgtgcatgggggctcacgactgtaaggcgggaggattgcctaagcccaggagtttgagaccagcctgggaaacatagggagactttgtctctacaaaaactaaaattagccaggcatgatggtgcgtgcctgtagtcccagctacttgggaggctgaggcaggaggatcacatgagccccagaggttgaagctgtagggagccgtgattgcaccactgtattccagcctgagcaaaagagcgagaccccagggggagagagagaggagagctgactttcactctgcgcttctatgtacttagctcatttagtcaacaaacatagatgaaggcctcggggttgtgggccagacatggcaccaggcatgggactgtaaagatgagcacccctgacccgtgcctcggaccctgcactgtctcctggggggcaacaagaagacagtggatagatcagacactggagtgggtggggagatagatacgagggcggtgtgtccctcagtgggatgagctgaggatcacttttttgctaattaaaagacacatatgtccagtttcagatagattttcaaatgtaatggagcttctgttactttttaagaatagggacttgccttttcagttttcgtttttgtatataacattcaggatcgaaaactacggtggcctgatgacttctttttctcccaatagatttttaaggactttcacgaaggagccattaactttggacccacctacaagtatgacgttggctcagccgcctacgatacaagcgacaaatgccgcacccccgcctggacagacagggtgctgtggtggaggaagaaacatccctttgataaaacaggtgagggggccgtgcccgttcgagagtcggcagagggtgaataagaaatgcgacggagggagagtcacgtttacccaaccccaggcgctgctacataaatcagtttcttcataaccccagatgacacaaaagtcatcccagaccttaacccctaagctttggaagttgtgctttcagggagcctctgcttctggcctctttttttcccttttcttttcttttttttttttgagacagagtttcactcttgttgcctaggctggagtgcaatggcgtgatcttggctcaccacaacctccacctcctgggttcaagccattctcctgcctcagcctcctgagtgctgggattacaggcatgcaccaccatgcccagctaattttgtatttttagtagagacggggtttctccatgttggtcaggctggtcttgaactcccaacctcaggtgatctgcccacctcggcctcccaaagtgctgggattacaggcataagccactgcgcctggcctcctctggtctctttctagagacagtgacctgcaaataggtctgctcctggctgcccctgcatcacagctcccccccacacccccacctcttttttctgggtggggaaagcggggagcatgaggttgcctccctccctgccccccatgctccccctcatgttctttatccagcctattttgttcagctacacttttacctgcttaaagccctaattccaaattggacacgagcaagacacagtaaaaataagttagtttttaaaaatcattagttgtcaagtatgttttgaacaactgttgatgcccagctaggaagtgaagtttatttaaagttagaatatctgtaactagtacataaaaaaaaaaaaaaaaaaaaaaaaaaaaacctaattacacattttgggagagcatagccaggaaattgcatctgtgaaaagaaaatacaaattttcctctagatgagtttgtgaacgcctgtgtggccccagcgctctgagaggtggggcctagaatgagtccgagtgttctcagctcctgcagctcttaccataccaattgctgccaaccttctgggattcctgggtcctggaaacccggcagcaacactgtgtctcaagcctacagtgggcatgctggcgaggactgcaggcatggtcatgactgttttgaataattatatgcgaggaatgtttttaaccaaaggccccaaagcatccgaagcctggcttcaaggtggaggagtaaggaggatgagtctgggacgtggggtggttcgtggcgcagacctctattgtggaagtgtcatgatcgcattcttggatattgactcgattctatatgggtctctcgaatggaacccctgcgagtagctggagaactcaaccttctagacagtgatctagatgttgacaccaaagtcagacacacctggtctcctggtgccctgcagtattatggtcgtgcggagctacaagcgtctgatcacaggtgaggtcctgacttccatggcgttttctcctgtgctgggcaaggcagcgtctccctctccgcaggaaaatgcatgctgtccccataaggatgtgtgtgcgcatgggggtgcattttgtgtgcatacaatacaccaaagaacaaagaatgatggaacaaatatctgtggacccaccaccaagaactaattaatcttagcattttgtcattgctccatatcataaatgacatcattgatgaaaatttcaaagatgcaacctacgtattttgcggcttttatattttcttaaatgatgtcgttgtgcaacttgcttttttgttactatttttgagatacagtcgtgttgatgttatagctctggtgcattcatttgtaactgctgtctagtatcccactaaatatatccatggaacttacaacttatccattcacctcttgatgaatattttctccaggattttatgattacaaacaccatagggtttttaaatctgggatgcacaaccttttttttttttttttttttgagagagagtcttgctctattgcccaggctggatggagtacagtggtgtgatctcagctcactgcaacctccgcttcccagattcaagcaattctcctgcctcagcctcccaagtagctgggattacaggtgcacaccaccatgcctggctaatttttgtgtttttagtagagacggggtttcaccatgttggccaggctggtcccaaactcctgacctcaggtgatccacccaccttggcctctcaaagtgttgggattacaggcgtgagccaccgcacctggccctaggatgcagggctttttaaatgctctgtgcatcatgcattgaggatagagtggaggcagcagagggagcaccgtgggcaccagcacctgtgccctgggattgctgcagaggaagactcaccctgcagaatgtctttaaagacagaggagaggatggcatttgagggtgtgaagaaggaagagtttgatcttcccaaggctgctgcctaaactctcatgtcagtttcaacttttacaaggaaagaaattaagaaaaagaaggtaagaacagttggtcaacgaaaaaaccttttttttttttttttgagacagagtcctccaggctggagtgcagtggcacaatcttggctcattgcaacctccacccccagggtataagtgattttcatgtctcagcctcccaagtagctgggattacaggcgtgcatcaccatgcccggctgatttttgtatttttagtagaaacggttttgccatgttagccaggctggtctccaactcctggcctccagtgatgtgcccgcctcagcctcccaaagtactgggattacagccaccatgcccagactctttagataattctaaattctttagatacctgttgttgcaaatacatacctagaagtgaatcttgaggaatcttcagatatgtgacatcaaggtttgctagctcaatgtattttgaaaccttaatttaaccaatatttcttgaggggcccttacatgccaggccctgttgctggcctggagaaaagcagtgaacaaaacagatgagaccatgttatcatggaattttctggacaggacaaacagacaataaacaaacatgtgtgctatgaaagaaaaaaagtagtggcaggagtcaggccagagtcgagctattttcaatcaggctgtgtaattttcgtaatataggattttctggaaatttatagagtaataaccatccctgtgtcagaattactataaggattgcattatttcctgctggactgttttcctgtttacatcattgatttttacattattcctaatgattgcgtagggtattatatgaaggtatcataactgtttccccattaagaaacagagcattttggcctggcgcagtggctcacgcctttatcccagcactttgggaggctgaggcaggcggatcacctaaagtcaggagttcaagaccagcctagccaacacagcaaaaccccatctctaccaaaaatacaaaaattagctggtcatggtggcatgcgcctgtaatcccagctacttgggaagctgaggcaggagaatcacttgagcccgggaggcggaggttgcagtgggctgagatcgcgccactgcactccagcctggacaacagagggagactctgactcaaaataaaaaaaaaaaaaaaaacgagcatttccctttttttttttccctcccatcaacaatgctgtaaatgatcaacctcatgcattaaatctttgtctgaatccctggtcatttccttagaataaagtccgagaagtgagattactaggtgaaaagagatgaacaattttggaactctatgtaaagtgccaagtaaccctctgaaaagcttgcacccctggcagagtgcagatgtctgcttccccacctccttggtggtactgaggattaccatgtcaaaaatctttgctgatggctggttattttccaagtactgggatacatctttaaggtgccacactttattttccccctcaaatcatctttagataaaaatgccaaggtgatactaaggttaaggaaagatgaagactaaaacgccagagcagggcagctagcctgcaaatccacctgctggtggccacattcgcaggttgttggtgttgactgtttacaaagagccctgggggacagcagctggggactgggggctggagatgtggacatctgtcccaggctaactggggactggaggccgggggtgtggacatctgtcccaggctaactgtcatccctcttttgttcctaacgcagacctgtgctggcgatcgtggaggtggaagttcaggaagtcgatgtgggtgctcgggagagggttttccaggaagtgtcctccttccagggccccctggatgccactgttgtagtaaaccttcaatcaccgaccttagaagagaaaaacgagtttccagaggacctgcgtactgagctcatgcagaccttggggagttatgggacaattgttcttgtcaggtaactgctcccctggctgatgtgggttccaggggatgtcgatgaggatccgtgagagctgccaggtcgttcttggcattgacttggagtatcatttattccaggatcaaccaagggcagatgctggtaacttttgcagacagtcactcggctctcagtgtcctggacgtggacggtatgaaggtacgctgtacttggccacactgtggagtggggtctgatcaatccctctttttatgtgggcatgtcttcttcctcctcttgccctgacctgtgccttttttttttttttttttttttttttttttctctgagacaaagtcttgctctgtcattcaggctggagtacagtgatgcaatcacagctcgctgcagccttgaactgccaggcttaagcaatcctcccatctcagcctctcaagtagctgggaccgcaggcacgtgccaccacacccagctaattttttttaaattttgtagagagaggatctcactctgtagccccggctggagtgcattgggacagttatggctcactataacctcagcctcctgggctccagtcatcctcccgcctcgatctcccaatgtgttgagattacaggcatgagctttcatgcctggccaccaatctgtctttatgtatagacgccatatgcgggagggagtttggattcttcactctggttctaaggtgtctcatgtccggctctagctacttgcaaaatagggcggaagggtgggcgcagtggcttatgcttgtaatcccagcactttgtcaggccaaggtgggtagatcacccaaggtcaggagatcgagaccagcctggccaacatggcgaaatcctgtctctagtaaaaatacaaaaattagccaggcgctgggtgtggtggcttacgcctgtaatctcagcactttgggaggctgaggcgggcaaatcatgaggtcaggatttcgagaccagcctggccaacatagtgaaaccccgtctccactaaaaatacaaaaattagccaggcatagtggcaggtgcctgtaatcccagctacttgggaggctgaggcaggagaatcacttgaacccaggaggcagaggttgcagtgagccgagatcgcaccattgcactccagcccaggcaacagtgtgagactctgtctccaaaaaaaaaaaaaaaaaaaaaaaaagtagccagacatggtggcgcgtgcctctagtcccagctactcaggaggctgaggcaggagaatcgcttgaacctgggaggcagaggttacagtgagctgagatcgtgccactgcactccagcctgggtgacagcgagaccctgtctcaaaaaaccaaacaaacagaatggggaagaagaatgtcagtcactgtgtctcacgttggaaggcagctctaccagcagctgcagaagcttagccattttagagtgtagttctcgccgagttacttgatctgtctatgctcgcactgccatgtgggagactattccagtctttctctttagagtatgtattttggaatatgcagctcatagatagtttccgtttttatagtatcttggctttaaatctgtaccaaatgggaagctggagatgagagttcaactttttttttttgagatggagtcttgctctgtcacccaggctagagtgcagtggtgcaatctcggctcaccgcagcttccgcctcccgggttcaagcgattctcctgcctcagcctcccgagtagctgggactacaggcactcaccaccacgcccagctaatttttgtatttttagtacagatcgggtttcaccgtgttggtcaggctggtctcaaactcctgacctcaagggatctacctgcttcggcctctcagagtgctgggattacaggtgtgagccaccgcacccagcccagttcaacttttttttcaaccagatgtatgagagctatgctgagcctgcgtgaggtctggacccttggtttttcagggccaaatgtgaagattggcctcgttgagggtgtgtgggttttggtgagaagcattgtgtgatcaacaggaggggtcatgatttttatttattcctgggtggccgctctgccctcccaggtgaaaggcagagcagtgaagattagaccgaagaccaaggactggctgaaaggtttgcgagaggagatcattcggaaacgagacagcatggcccccgtgtctcccactgccaactcctgtttgctggaggaaaactttgacttcacaagtttggactatgagtcagaaggttagtgaccctgcagggagggacaggcaagccgttcttctagcaacaggcctgagcttttaaggacaccttctaaagcctcccttgcagaagtgacggaggacacccgcagggcaagccctctgtcccatgtgatgagcatgtttgtatgtgtggacgatgcatgccatgctacctgggacccgaggcatctaaacttaggctacaaacagtggctatgaggatatcagggctgtgggtgtaccaatggaactggggtaccgtccctgctggcgcctgggccctgagctgcagggcagggtgcacgtgtcctgacaggagctgaaccagtcccactgatggaagactgagcctttccccctcattgttttcacccgaattgtgattcatttccttctcccaggggatattcttgaagacgatgaagactacttggtggatgaattcaatcagcctggagtctcggacagtgaactcgggggagacgacctctctgatgtccccggccccacagcactggctcctcccagcaagtcacctgctctcaccaaaaagaagcagcatccaacgtacaaaggtagcctgacccttcttttctcaggagcctcagcgatggagtcagctcaggacagactttcctttttctcttggcgattgggcactgtgtgatatcaagtatgcaggtcccaggagagacctcaaccaggcaggccaagcgaggggtagggactgagccctgtggaggtagccagctccaacaccctgatttcctctagttagtttatttttttacaataacttgtacccccataacacaccagattcaagataattcttgtttcctctggatattcaaatggccacggttctgaactggttttatatttgtgattatttcccgcccccaacaaaactcttctgattcagccaggcgcagtggctcacacctgtaatcccagcactttgggaggccgagacaggtggatcgcttgaggtcaggagttcaagaccagcctggccaacatggtgaaaccctgtctctactaaaaatattttttaaaaattagcagggcatggtggtgcacatgcctgtaatcccagctactcaggcagctgaagcaggagaatcgcttgagctggggaggcagaggctgcaatgagccgagatcgccccactgcactccagcttgggtgacaaagtgagattccgtctcaaaacaacaacaacaaaaaaacttctgattcaatcccagtagagacataatccatatctatgtcctgagttgctggcgtatggtcacactcatataatatcatattattatacagtcatgtcatacggtcacatcattgtatcattttagacttcagagggcctgaaaggtcacattgattgaaccacacacccctagattaaataatacaactttttttttttttttgagacagggtctcactgtctcccaggctggagtgcagtgatacaatctcagctcactacaacctccacctcccaggctcaagcgatcctcccacctcagcctcccaagtagctgggactacagggttgcaccagcatgcccagataattttttgcattttttgtagagacggggtctcactatgttgtccaagctggtctcaaactcctgggctcaagtgaccctcctacctgggccttccaaagtgctggaattacaggtgtgagccactgcacctggccagtaactgttctgagtaacttttaaagcccactaatgttacgtggctggcaggtcgggtagttcatatttcagtgtcagctacattgatgctgttccattcatagccaggcatgcctctagctgtcaatcactgagccccgagttggaggacagctctaaccagcaggtgcaggagcttagccacgcattgggcccattgagctggggctgagagcagagaacagggctgaaagtggattaaggtacctctcagggagggtactttgccaggagaggtgcgaagacctccagcccctttgaccgtacgctggtccccacactgaccaataacttgcctataccgaaccatcaggagcttttaaacttatggatttttgagccctaccagagagatctggatttggtaggagtggggtgggaccctggaagcctggcgtttcaccaagctttccaggtggtttggacgcacagctaggtttggggacttctgcccaagactgaagcagcagccttcgccggagcatcgcggtggttctgcacgttgctcctgccaggggcttctgcccgggagttgaagtggctggagggatgtgctcttcccataagaaggacctttctctcgggggtggccgtcatgcaggcagcctctggagccagtgcaggtgtgagcacagatagtcctttgcatgaagaaactaatagcgcaacacgggacacgtgggtggctttgctacctggtgggcattgagagggtcttcccttgatgctgtggggtgttcagccattcccatttgtaggagaaatcctgcctttccccagttccagtctccaggacacatggggtggagctgctggatacagggagtggggtgtccgagtcaaagtgaaatggagaggcccatgctttgggggagccctagggctgctgatttgatctgtaaggaagcaggagctgtgcctcctgaaaacccctcagcctcttggaaggtgtgtgcagggcaggtcaagatggcagacccttgggagtggccagccatgggcccacagggtttgggatttgatgagtaagcaggacccctggtcctaggcactggccactgcatgccaggctgctctgctgccagagcagggagaacaccctcagcttcctcagccggtgtgttctagagtgaggaattgaaaacatctgcctgtggttggttgactcttcaggggttgtggtttgcaactgtctcctccactctgcccaagtcttgttatttcacaagaaaacacactttgaaatagctcagtgtctctcaagtctgagaaatacccattatccatggttcactgaatgttccaagcaggcactgggtgccctccccgcccccgcccctcgccggcagacagaggtgcccgtttctggacagagccttcagctgtcctacagcaggtccccctgccacagtcggcctcctgtgctcagatccgtgtctgacacgctcacgtgtggaacagaccattgtactcatgccccgccatgtcctccagatgacgcggacctggtggagctcaagcgggagctggaagccgtcggggagttccgccaccgttctccgagcaggtctctgtcggtccccaaccggcctcggccacctcaacccccgcagagacccccccctccaagtaagactctgcttgctttcagctccctggatgcctgccaggaataaccgcgcgttccctgctactgaaaacacggctccgaatccacttctccccggccttccggtccccacagggcttcctcctccttgggctccgttttgttgtaaatccaggacacgtttgacgtcagggctggttgtgtttctcatggcaaatgaaacagctcctttccaaagctgctgttcaccctggagctgtgctattgcttcaaactgctctcccttggcagcattagaggatgcagaatgggggccgcagccatgggagggacgtgagcttcgcagtcagaagtctctcctcagctgctgcgcagtcctccctctacttatgaggaatctggtaaacccaggtccccgcctggaggtgacctggtcacccctctgcgctccgaggcctcctgttccccgggctcagaacaagttcccccttatcctgggtctaggagcattttcttctggttgttcgaacaatgctttgcccgtccagccctccctgataacctgaaagcaaagctgtgatgtgcttttgatccacttgcattttcccaccactgtttacttctccctccccaaaaatgtgatgatcagacttagatcttcctaagccattacttcagaattgggctcattgtggctgacgtcacggtagtaaccaatggcaagccacaagcccagatataaaaataacccaaaaataaaatgcataagtcatgtattattgtggaaattttagagataactacaaagaagaacaaaattttaaaattcacttgatgacctacgggtcgtagttgttgaaaaaagtcttctttttccagtttcatgtatctgcagcaacatacttctttttttttttttttttttttaacaaaattaatacccattttctctggtcggttgtcttttatttaatgggttatattttctgtgtcattgaatgttctaaaacatgatttgttaatggctgcaagtatattttaacagtttattcccctgctttggaattttttttttttttttttttttttttttttttttttttttttttgagatgggctcattctgtcccccgggctggagtgcagtggtgcgatctcacagctcactgaagccttgacctccccggctcaagcaatcctcctacctcagcctgccaagtagctaggactgcaggcgcataccatcaggcttggctatttttattcatttatttatttattttgtagagacagtttcaccatgttgcccaggctggggtttttgaaatattttttccccacaaaatattttaaaaatctggtcctagcaatagtatttggaaccatttcaaaatcaattggtttttatatcagatctgaatcccccaagatgttaaagtttgcattctagtaatgcttctccagatcatctacatcaataggcacacactggtagaatcaagtgagaaactccatagagagtcaaggaaggcctggctctgtgggtgccctaagtgccgagtgagtattcggacctcaccgtgtctgtggtctgctgggacatccgcctcgtctagtcgggctcctggcagctggctgggaagttgtgccttcactgagattgagactctgccctcgttggtttttacagccggtttaatggtgaaaaagtcggcttcagatgcgtccatctcctccggcacccatggacagtattcaattttgcagacggcaagacttctaccaggagcacctcagcaacctgtgagttcttctgcatacatttcaatcccaagggttttgcccccgggatagtgtgggatctctcttctcagtgaatatatagatttatgtgtctttaaccctctacctgctcaccatctcatctccaaaccccataacccttcctcgcaggttctccatagggcttttaaatggttgtatggagtgttctagaaaaaatcacttttgatgaaaaatcccaaatatccctggtttccatactcatccatttctctctcttcccattcttgcctctgaccttggtgtatgggcagagcattgcttggtagaagggaaaatgggagaaattcaggtcgttatcctgggaaaatgatgatcattctggagtgaagttggttgagagaagaggctaaaaagagatgtaaataatgaagttggggaacacactaggaagactaacagccatagaggattgtggaggtgcctggttccagagggtaccatgagctgctggggaagagagcaggtgaaggcagggaagtagaggggagagaggggaagctgggtgctagggggaaactgctatgaccgggatgcctctggggtgctgggcctggttaagtgcttgtgcggccccagcaggtggaggggtgactggaggccagtgttttacagtagtgaaaataggtcataaaggcaacccacatgctggatgaagaagtagaaaaagcacttttaaggaaggtattttaacaactcagtgggaccatggaaagagtggcctcttattttgctttctggctttcacctggttattgaaaaaaagatagaagatggtctgtccatatgcaaaaatctgtaatcacccggctttgaagaccagggtcatcaggtctaagtagtatggcactcttggaaagagagtgctccaggaaagagaggattgcagggtgtggtggaggctggagtttgtatggtcagcatcgtctggtggagccctgcacagacccacgggtagcagatacgtcccacgaggctgtcctcctgcctctgctgatactctgctcttcctcattctgtcctcaagcccaaggctcggactggaataagtaaaccttataatgtcaagcagatcaaaaccaccaatgcccaggaggcagaagcagcaatccggtgtctcctggaagccagaggaggtaggtgctttcctgggggcaggggaaaaaccaattctccttttctttttatctccctgctaaaagtggtctagaaacgaaaataactctttttattcttctggaggcaatattaaatgaaaacatcctttagcaacattttatataaatctatactaagattgattgtccatttaaaattgtattttcaaaattctgtgtgtatataaaaatcatcccagggctattaagcggcgtctaaaggagagaccgaaaaaaaccaaaatgagtttttaaaaaaggtgaatgctgccggcatgaagtcattctgccagctttataaaacagagacagttatagtgtttgtcctaatttcaggcacaaaatctaccttttaaatcactggcaagtggaaataaagtttttagtgtcaggcagggacctctttcccaccacattattttttgttgctgttacttaaaccatgttagttaccttgggctctcccccacttcattcataatcactggtaatttacacttttagttttggccttggctttgttccagaatctcctagagaggagagtgtgcccttttcttcgtttttttttttgttttttttttttttttttttgagactgagtttcactctgtcagctggactggagtgcagtggctcaatcccaggtcactgcaacctccgcctcccaggttcgagcaaatatcctgcctcagccacctgagtagctgggactacaggcgcgcagccccatgatgagccaatttttgtattttcagtagaaatgtgatttcaccttgttggccaggctggtcttgaactcccaacctcaggtgattcatccaccttggcctcctaaagtgctgggattacaggtgtgagccaccacacctggccgagtgtgccctttaaaaaggtgtaagcaatcaccattgcttaatttgcttttagtcagcatgtttaacttctttggaattctcaaataatatttaagggggcatgagttaaaaggtcgagaactactgttgtagaatgatactgctacaaatgctttctttttttttattttagaaaaataactaaaactaggccgggcgcggtggctcacgcctgtaatcccagcactttgggaggccgaggcgggtggatcacgaggacaggaaatcgagaccatcctggctaacacggtgaaaccccgtctctactaaaaattcaaaaaattagccgggcgtgatggtgggtgactgtagtcccagctactcaggaggctgaggcaggagaatggctgagcccgggaggtggagctcgcagtgagccaagattgcaccactgcactccagcctgggtgacagagcaagactccgtctcaaaaaaagaaaaaagaaagaaagaaaaataactaaaactatggatataacaacccaagtgtccatcagctgataaatggataaacaaaatgtggtccatcaatacaatggaatattgttcagccattaaaaaaaaaaagaatggggctgggtgctgggtgcagtggctcacgcctgtaatcccagcgctttgggaggccgaggcaggcggatcacgaggttaggagatcgagaccatcctggctaacacagtgaaactccatctctactaaaaatacaaaaaaattagccgggcgtggtggcacgtgcctgttagtcccagttactcgggaggctgaggcagaagaatcatttgaactggggaggcagaggttgcagtgagccaagataacgccactgcactccagcctgggtgacagagctagactctgtctcataaaaaaaaaaaaaaaaaagaatgaagtgctgatacatactacttcatgggtggaccttgaagacattatactatgtgaaagaaagaaaaaaaggccacatagtgtaccatcccctttttatgaaatggccacagcaggcaaattcatggggtcagaaagttcttcttgctttccagggactggaaggaggcctgggtggggagtggctgctgtggggcttcttttttgtgtgatgaaaatgttctggagttagatcgtatgatggttgcacaactttgtggatacactaaaaaccaatgaatggtacacttagaaagggtgaatttcacggtatgtgaattatgtcacaataaagctgttaaaaaaaaaaaaactctagagatgtagatgttagtagaggtgtgaaatctacctacagtcccggcttaacactttcttggtcatggccccattgagattttgatgtctttggatcatctaccctgagaaatgtaagtacacatgagactttgcatatgatctcagggtctcactggtccccatccaaactatccacagaccccagatcaccacccctgctaggaaggtgagcatgaaaacctgggactgctgggtgcggtggctcacgcctgtaatcccagcactttgagaggctggggtgggaggactgcttgaatccaggagttcgagacaagtctgggcaacacaatgagaccctctctctacaaaaattttaaaattagctgggcgtggtggttcacaccagtagtcccagctacttgggaggctgaggtaagaagactgcatgagcccaggagttccagcaacatagtgagacctcatctctactaaaaattttaaaaattggctgggcgtggcagtgctcacccgtaatcccagctactcaggaggctgaaatgggagaattgctcgagcctgggaggttgagactgcagtgagccgtgatcatgccgctgcactccggcctgggtggcagagcgagagcccatcttaaaaaagaaaaaagaaaaaaagctgggactgaatctagctgattactcctgaaatacactgaattagtaaatgacacttaggatgtagactgtctaaggacgaaatcatgcagtgaattgccttgtcctttacacttcagccatgtggttttatgtttcaggtgcctccgaagaagccctaagtgccgtggccccaagggaccttgaagcatcctctgaaccagagcccacaccgggggcagccaaaccagagaccccacaggcgcccccactccttccccgtcggcccccacccagagttcctgccatcaagaagccaaccttgagaaggacaggaaaggtaaaagcctggtaacataaaacctcttactcctaagttgctcacatgtctcgatagataagaattgtggcctgtaatcccagcacattgggaagccgaggcaagcggattacgaggtcaggagttcaagaccagcctgaccaacatggtgtgaaaccccgtctctactaaaaatagaaaaattagccgggcgtggtggcgcacgcctgtaatcccagctactcaggaggctgaggcaggagaatcacttgaacccaggaggcagaggttgcagtgagccgaaatcgtgccactgcattccagcctgagcagcagagtgagactccacctcaaaaaaaaaaaaaacaaaaaaaaaaaaacagatttgcgtctcacagataaaaatctagttccctatggacatcctcacgttcatgagtcccagacacaggtgtgtctttggggaaagttttgacaactgcttcttccctcatatcctactgtgtcttggctctggctgagaagaacgaggagtccactgtctggcacattgtcagtgtgacaagaacagcttggaggtattatgcttcctaagtgttttgagtccccaaagggaaccatagtgggatgcttttccccacatgttctggtaccgcccatttgcgtgtggtctgtgttgtgtgcacatggtttcaaggcattaggaaaacagtaaccgattcccagattcgccatgttcacatgctctcgtgcggcctcagcctacgagaggttccacagcttttcttgccacttttcttgcagattgttttttgctctcgctctcaagcttctcagccttgcttactgcttcaaagacatgagtttgtaaggacagtagcagcccaaagactggcatctgtagacacatctggatcttccgtttgatctcagtgttctagtaacggaccctcggtaatcccttcctggtcatcacagcacgatgctgcttcccccctagagagtgtgaggggggcttcggcttcactcttgacagcgcttgctttgtatttcctgggttgctcttctgtcccacattggctcattgccatctgtcccttgtccatgcttccttacaaagtggacctttttcctccgcctcttccctgttcagatgctcctcgacttaaaatggggttacatcccaataaacccatcgtaagttgaaaaatagcgtgtcaaaactgcatctcatacacctaacctagcaaacgtcatggtctcgctgaccttgaacacactcagaacacatacattagcctacggctgggcaaaaaaaaaaaaaaaaaaaaaaaacacccatccaacacagcctattttataataataaaaataaaagatcaaacttcaaaattcaaagtatgctttctacggaacattagcgcttgtgcactagggtgaagtggaaaatcctcagtggaaccattgtaagtcggggaccacctgctttgtcttttcttgtaaaagccaggagcagaaatagattcattttcccaacctgctgcacaggagttaaagttaaaaggctgttggaaaagagactttcttttttcttagtttgttttctaaagaaccaaagaaacactgaaacgccaatgtttaactagtctactgatcaccttttctgaacaaaagcttcattttgcctgtgcagttgttttctttgtgatagatttgaaccagaaccaaggcagtgtcaaggtttccattctttaccaatatttaagtataaaagattcaaggagctgggcgcggtggctcacgcgtgtaatcccagcactttgggaggctgaggcgggtggatcacctgaggtcaggagttcaagaccagcctgaccaacatggtgaaaccccgtctctactacaaaatacaaaaattagccaggcatggtggcaggcgcctgcaatcccagctactcgggaggctgaagcaggagaatcgcttgaacctgggaggcggaggttacagtgagctgagattgcgccattgcactccagcctgggggacagggcgagactccttctcaaaaaaaaaaaaaaaattcaaggagaaagtatatccattagtccttcagttagcttatgttgtaacacaagttacttcaccctagcatgatacagaccatgaatcagcccaggttgcaacttcaaagagtgttttcagagaggtttgctttcaataaaggaagagcatcaccccatttcctaaaggacaaagaaaagtttgtctgattatttactgtggccctggttttaaattttccactcgttttcattggacctgctggtgtgacctgataaatgtgtgtttctcctgtgctttttctttttcttacctggtcacatttctggcaccccacacattctcaaatctcgaatttgctagaatgtcagcttggtctcatctctgttctctgctggccactctgttctctgatcctcagctgcctagttattggcttcttatttacactctttgtcccaccttttctcagcccctgtcaccggaagaacagtttgagcaacagactgtccattttacaatcgggcccccggagacaagcgttgaggcccctcctgtcgtgacagcccctcgagtccctcctgttcccaaaccaagaacatttcagcctgggaaagctgcagagaggccaagccacaggaagccagcatcagacgaagcccctcctggggcaggagcctctgtgccaccacctctggaggcgccgcctcttgtgcccaaggtacccccgaggaggaagaagtcagcccccgcagccttccacctgcaggtcctgcagagcaacagccagcttctccagggcctcacttacaatagcagtgacagcccctctgggcacccacctgccgcgggcaccgtcttcccacaaggggactttctcagcacttcatctgctacaagccccgacagcgatggcaccaaagcgatgaagccagaggcagccccacttcttggtgattatcaggaccccttctggaaccttcttcaccaccctaaactgttgaataacacttggctttctaagagctcagaccctttggactcaggaaccaggagccccaaaagagatcccatagacccagtgtcagctggcgcttcagctgccaaggcagagctgccaccagatcatgaacacaaaaccttaggtcactgggtgacaatcagtgaccaagaaaagaggacagcactgcaggtgtttgacccactggcaaaaacatgactgagcagctttgaaggctgcagtcctatagaatgcataccttcctccctctagacatccctccaccagaagagacatctatttaaaggcacactggccaaaacgtttgtgcatctgtcactctcgtgtagtttacaaaaatcgtgtctcttattcagtaagatggttactcagccaccaaaatatatttcactcaaggcttgtacatctgaagtttgctcttcaaggaatgggaaccttcctgttaaattcggtgtatggattttaagaaaggaatctagccaatgaggtccaagaagttctcacccattgaatttttaaatggctgttcagttcatgttgtacgtgatggagatttgtcttttgttttatttgcattttacagatttggtataacattttggggagccacctgaaggttgatgtataaagtaaggattagagaaagaggtcgttgtgaccattagtagctgtcctggcccacttaaacaaggttacaaaaaatcagagtcggaagcagccaaataggtcaacctaatgactagactgtacattcccatgagccttcatgtttaagtgtgtacatgtgcgttaaccttgatgatgcgtgaatcccgagggagccggtggcatacaccgttagcttaaccttagcttaaactagctgaaggctcctgtgccatgtcttagacattgcatgccctatcaattactataatcctgagccatggtgtgctactgaaaccaatttttatccaccatctagtccttattaaatgaaacctcacggatcctttgttccgcttatattccatgcataccacataaaagcacacagtgcgaaaactcttgctgatacgcgatattgattctcattgttagaatatggagagtgtttcagcctcgtctgtccggctggagcttcgggatggaaagtgctatgtgtccctgcatataagaatcaccaggccagtgtttctgggtttgcttgtctatatgtttgtctatattttttgcctatacatttttcccacgtttccaacagcacttctcacctattcaataactgaaaaagacattaccatagtgctttacatttttaaagtaatgttacaaggtctggaatccatttggagcagataccgtgttttcgctatttaataagaagttcagtagtgaaatcttactgtaccgcctgttgtatctgggagcctcgtacagaggctcgcacagcagtgatcaagtgtcatcccttacgtgactgggggatgtctgtcctaaaagctgactgctaggatagtaaggatcatcttgcctgggctatgccactgtcttgttaccaattagacatctggaatttcataattagttttcattgtcactgtcaagatatattgcagattacttaaatatggccatcaaaacaaaagttacaacacgtatctcttttcatctgaaaactaatacctggaaaaggataaaaaaaaaaaggaatccgtgacccacagagctagacagataagatgcatagttgaccagtcataaaaggcggtgtttaggtgatcaggatgccgttggtggcatttacgtgctttatatgatttttacctctgtaacaaacacaagaaataaacagaatggtccttaacagagtttgggggagagagcaagatgggttccttggagaagctgatttgccaagatgcacatcgctattaacagccagagtcataaatgaaatgaaattgaagaattcattcaaatgctcttttccctataacctcttttctcaccaaaaaggagataaatttgaaaacagataaatgtaacaaccagtcaaagaagcaggggaaaagtaagctcctccaaagttgcttgcagtgctggaaatagatctcatttttaggttttctcttcgttccagataccaaataaatgggacagagaataaaatttttgttaaaatatgtgctcatctcctaagtagctcttcagagtctgaccgtaagtaaaaacacacagaattgtgttgactgggggaggtgaatcacaaaaaagttacgaggagtttaagagttaaatattatttgatcgtggctgtcaaatttagtgaacaacatagattggatttggagttggtagtaggtatggttctcataccagaattctcttaaaaaaaaaaaaaaggacaattggaattgccttatttatttttaaaatcaatgcttactagttggtaggattcccaggtcagcagcagggttgattaaataatcttgacaatgagcagctgccatcttgggggatttcattctgtggttttttaaatgtttcgtctttgatgctaccatccagggcttcttattgtgaccttgtagcctattttgttcctgctgttctctaacatggtgcagttcacgcagactggtttaggtacttcacaactcaccattgtctctctgaccccaagcctagtcccttttacatcaccatcttctcagacttcttgcctattcttaaaatatgttttggttaatgattgaattaggacatcagcttaagcaattcctgtaacggtttaacgttgttgaagttcaaggcacataataaaattctccctgatgtgtgtgtaagtataaacaaagtaatgtatcaaagcgttcactttataatgaagtcatttcattgggaaggaaagctgcaaagattattgggggactagtgattaataaaatcctgtaatatttttgaagtgaaaatttgtactgaaattgtacatgatacctattaaatgtttttgtctttttttaaattgggtttatttcttttcagatatgaagagaaccttagaatatctttggctaccttctgttctggatcaaatgtaattactggttatttagtaattcctcttgagtttcgggttttggttttttgttttttttgtttttgtttttgttttttttggagacagtctcactctgtcgcccagggtggagtgcagtggtgcgatcttgctcactgcaacctgcagtgagcaacccgggttcaagcaattctcctgcctcagtctcctgaatagctgggcttacaggcatgtcccaccatgcctggctaatttttttgtatttttagtagagacggggtttcaccatattggccaagctggtctcaaactcctgaccttgtgatccgcctgcctaggcctctcaaagtgctgagattacaggtgtgagccactgcgcccaaccggttcgtttttttaactattaaattaagttcaaaaaccagaaaagtaatcatctggttaagaatttatgacttgaatgctgctagcagggaatactgccataacatataataactttatgctacttagagatgctagaattcattttctgtacgattttatagcaaacttataaaaactgaactgctagcttgagtccattacagcatagaagcaggagacggaagtaaacacttcaagttctgtctaggtttgctctaagctaattaatacaatatagatcataaatgttctctgatgattttcaggaataagaataaatctctaataaatatggctagtccttcctgaccagtaaggaggcatattgaatttactaaatctgacagccggttgcagaaacttccttttcaagggactgggggagataggtttaaaacgcactctcatccaaggcaaattgtttgcatttatctcaatgaggtaataagagtacaaatgaggccaggcacggtggctcacgcctgtaatctcaacattttgggaggccaaggcgggtggatcacctgaggccgggtgtttgagaccagcctggccaacatggtgaaaccctgtctctactaaaaatatgaaaattagctgggagaggtggcacacacctgtaatcctcaggaggctgaggcaggagaatccctttaagcccaggaggcagaggttgcagcgagccgagattgcaccactgcactccagccagagtgtgactctgtctcaaataaataaataaatgagtataaatgagagagtaattgtgaacagacagggaagatttgggagaagagtattaagaattttgggccaggcacggtggctcatgcctgtaatcccagcactttgggaggccgaggcaggcggatcacgaggtcaggagatcgagaccatcctagctaacacggtgaaaccccgtctctactaaaaatacaaaaaattagccgggcatggtggtgggcgcctgtagtcccagctactcgggaggctgaggcaggagaatggcgtgaacccag

SEQ ID NO: 597 - DNA, 268368 bp, Homo sapiens
  source 1..268368: mol_type = genomic DNA
tgatcttgtgatccacccacctgggcctcccaaagtgctgggattacaggcgtgagccaccgcgcccagccaagattgagttttttaagatgtttttcagactgacctcactcagactcatgactcatgactcaacaggtcctggggccccacccagaggcagactcagtgcatgaggactgctttccacaccggtatgatttcatccccaaccaatcagcggcactatccccctaccccctgacaaccaaattgtccataaaaacccttgttccgagcctacagggagactgatctgagggataactccagttctcccacgtgggctcagcctcgcggcagttaaactctttctctattgcaatgccatggtctcagtgaattgatttttgtctgtgcagtggggaagaagaacttgttgggtggctccagaaccatctgtataatgatgaataagacaaagtccctactctcatggaggagacagataataaagaaaagaaaaaaaaaggatttggtcattgtaagtgctatgaagaatttaaataggctaaagggataggtggagaatagaagttgcattttttctttccctccagatagagtctcactctgtcacccaggctggagtgcagtggtgcgatcttggctcactgcaacctccacctctgggttcaggcagttctcctgccttagcctcctaaatagctgggatagcaggcacctgccaccacgcccggctaatttttgtctttttagtagagagggggttttaccatgttcgccaggctggtcttgaactcctaacctcaagtaatccacccacctcggcctcccaaagtgctgggatcacaggcatgagtcactgtgcccgacctgaaagttgctattttaggtgtgatgagcagcacaacatctttcctgaggaggtgacatttgagatgtgacttgaattgtgaggagtaatgtgtcatgcaaaaatacagggaagtcatattgtagtcaaaggcaatagcaaaaaaaagtctttggggttaaaataagtctgacacattcaagaaagttcagaaaggcatacatacctgtgttagagtaggtagctaggggaacatgagaagggcagcagagggcattccacccccacccccaaccaggaatgtcaggcgaccatcatgtgatggtcaggtggttgttacactgtttctctaaaatcatcattggttgcagccagcaccagggaaaggccggctcccaatagatagaaaacacctgaagctagtgtcagccgcttcctgataagatctcaggagttgggcaagtgggctcaagcatgggccctaaggggcaaaatgtcagagtttaactaatatatgaccttcctctaggaattctcgactggcaagggaaaaatgcctcaaatgagcacgcgcacaacttcagtaaacacactgtgagtgcggccactcccaagtgctggcagaccactgcataagtggacagcctgctccaagggaaggatcaggagagaagaaacgcaaatcccagaaccgtgccaacatataaaaccccacattaagggttgtacagtgcactgggatttctcaagtcacccgcttggtcctcttccaagtatactttacttcctttcattcctctctaaaacttttttaaaaactttcactcctgctctaaaagttatcttggtttcttactctaccttatgccccttgggcgaattttttcctctgaggagggaagaatagagttgctgctgcagacacatcagattccctactggtaacagctggagtgcggtaagtaaggaggagagggctggaaaatgaagttggctctgattcccattacttgaaaatacagggtaggaaaaccctatcttcttaggttcagtggctggggagcaccatcactcaaggtgagaactgcctggctgagcccagccaactcacagaactgtatgaggtattttcatctactgtgctaggcacctagtgagagcccttttgcgtctttcaactttggaaaaaattatgatttatttttattttttaaattaattttattttttttttttatgtttttagagataggttcttactctgtcatccaagccagagtgcggtggcatgatcatggctcactgtagcccagaactactgggctcaagtgattctcctgcctcagcttcccaagcagctggtaccacaagcacatgccagcatgtgcagcatgggaaatatttttatgttaccacctcgacactttcttccttctacttttctgtgtcatgtctgcatctcccgtcacttagatagggacctcacagtttgattctccagacctttaatattttttcatattttaaatatttctttaattctgttttttgagatattttattaaatttaccttcaaccttctgtggatttttttttttagacagggtcttgctctactgcccaggctggagtgcagtggcataatgatggttcattgcagcctcgacctcccgggctaacgcaatcctcccaccaggagcaatcctctcaagtagttggaactacaggtgcatgccactaaattcagctaatattttttattttttatagagatgggggtctcgccgtgttggccaggctggtctcaaacccctaggctcaagtgatcctcctgcctcagcctcccaaagtgctgggattataggtatgagccaccaaacactgccagaattttaaatatcaggatataggaaaggttttgctttcgttttcaattttgtttttgtcttatggcacggggccaggcagggcaaagggtagattccattgacacttatttttaattttctgcccaagtacgttcccaccattgttcctggtgtttcagaccctctccagggtctgcagagtcttgtttggctggagccccttctactctagtctaatgcccctctgccctaattcctcaactaccaggccgtcactgctttccattacccacaaccatggagaaagctctcatcagctaatgtgccttctccagtttgccacattattacattattgtctggacatacctgtttttttgttgttgttgtttgtttgtttgtttttgagacagggactcgctgtgttacccaggctggagtgtagtgttgccttctcggctcactgcaacctctgcctcccaggttcactcgattctcctgcctcagccccctgagtagctgggattacaggcacctgccaccacgcccagctaatttttgtatttttagtagagatgattttgccatattggccaggctggtttcaaactcctgacctcaagtgatccacctgtctcagcctcccaaagtactggaattacaggtatgagccactacgcctcatctggacctacttgtttttaaaaatgcctttgttatcattttaatgaagtctcttaaaggaaaggagttgcatttgtgtgttctgtcttcttcagtaaagagagggcttttatttatttattttatgtatggagataaatgaaccttaaacattgtatatttttatttttataaatccacctgtttactgtcatttcaaacattactttaaatttattttcccctcagagcttttaaataatcaggagctctaagcattgcctgggaaatgttttgttttctttgcgctgtccgccacatgctagtgattttcagcaaggttgtgtttacgtgtatttcaactgggcaaataggaactaatatgaaataaaataacattaatcaaacctgactttatgagcaagttttgaaatagttcacatctcaaattaaaaataagtcttttttgctaattaatgaatgaatgttttggtcaagaatcatttcaaagctgagcagctgagtgaatgatagaaactgcactcacactgttgctgtatggtggcaccatctcagccggtatacagagatgtctgcaggttttcatcaggatcatgggaactgcactgttgtttacagacattggaactctgacttgtgactttagtgtaatttaaaacttttttatatctcaaagccatttgcattagtccattttcatgctgccgataaagacatgcccaagatgggcaatttacacaggaagaaggtttaatggactcacagttccgtgtggctggggaggcctcataatcatggcaggaggcaaggaggagcaagtcacatcttacatggatgacagcaggcaaagaaagagcttgtgcagggaaactccccttataaaatcatcagatttcgtgagacttattcactatcatgagaacaacatgggaaagacctgcccccatgattcaattacctcccaccaggtccttcctgcaacaagtgggaatttaagatgagatccgggtggggacacagccaaactgcatcaccatttcacccacgttttatgtgttggtgctagtgggagtactaaaaaactgttcccagatcaataaactgggaacaaaagtgagaagtggtagaaagctgtgaagaaggcccagaacagcccaccctgatatgccaggctgttcttttggaagaaagcagtttgtacacaagagaggtgatgctgagaaagtgaaaaacctgaaggttttaagagccgaaaaagtgctaatgtgaaaacacgccacatggttttatgtaggggcccctttactttaatgctttttccaacaggaaaatttgacttaagttatttgagtgcagaattacacaagaacttcaagaaaagttataaaatgtaattgcacagaacaactcagttctagaatagggattttccatttttggagggcttttatgtacatcatcatgattaagtcatgctgggcctatgaagaaggtggagtgtgggatcattctctttttctgcctgatgaaatggaagtgcttagtgcttgggcaattgatccaagtcactgctagaaaataggtgaattggttgggcatggtggcttacgcctgtaatcctagcattttaggaggccaaggagggtggattgcctgagctcaggagtttgagaccagcctgggcaacacggcgaaaccccgtctctactaaaatacaaaaaattagccaggcgtggcagtgggcacctgtagtcccagctactccagaggctgaggcaggagaattgctagaacctgggaggcagaggttgcagtgagccaagatcgtgccactgcactccagcctgggcaacagagtgagactgtctctaaaaaaaaaaaaaaagaaagaaaaaatagctgaatcgagacttagcatccagccttcagaaccctcattcaaaactctctgggaagctaggcatggtagctcacacctgtaatcccagcactttgggaggccaaggcggaaggatcccttgagccaagagttcaagaacagactgggcaatgttgcaagacccctgcctcaacaacaaacaaacaaaacaaaactctctgggaggtcctttggtattacagcattttagttattataaaactcagtcttcttaaggaagacaactcaactaacttttaaatgtgtgaaaaaaaggagttgtagtcacttgaatttgcactctgaatactagaataattttgaaaattaaatatttccgatgaaaattagattaccttttaaattttctctgaaaaattatacattcacatgagataaaatccctagactagaaaagaaatatgagagggaagtcttcctctttccctgctcccgagtccacccactgtcactagtttcttatgtgagtttccagaaagaattatttatatattataatgtagcacattgtatggttaggtttagatcattgcctttataatgtagtatttacacataaatgtatatcctcctttcggggcttttgtttgtttgttttttgttttttgtttgtttgttttggagacaggttctcaatttgtcacccaggctacagtgcagtggcaccatcacagctcaccgcaacctcaaccgccctggctcaagcgatactcccacctcagtatcccaagtatgtgggactacaggcgtgcgccaccatgcctgcctaatttttttgttgtacttttagtagactctacaaggtccctctgtgttgcccaggctgttctcaaactcctgagctcaagtgatttgccctctttggcctccccaagtgctgagattatatagacgtaagccaccacacccagcccctttcttttttctttacataaacaatagtatatcatacacactgttctgtatcttaatatttttcacttgatgtatcttggagagttttcagtgacggtatataaagagctcctcaccctttctccagccgcttcgtttcccattgtatgattgcatctttaattccctggctactgatgaaactgtaggtgacatgctgtttagaactcgcctaactaactgctcattctccctttctaaaggaggcatattgacatgtttgaaaaggactgcttgatactgtcagctgaggctggtgatgacctgtccctatttactagaagcactgctaattttatgccttgtttttttcttcttttatggttgctttgttttgaaaagtggcttgtcccagccaaaatataagtcaagtaaatcaaattgcagcccaaggtagttgacactggcttcggatcccaaataaatgtgtagtgagaagcacagagagctggaggctggcggcacctgcaggctccctgctccttattaccctctccctctgggctgcagagccttctggaaagccgctgcctggcctgggtcagattgcttacacgccactgcctcccaggccggcgttcccaaccttaagccaatgcacatttatagaacaattccatgtgatcctggggaagacagactgcgggtggagggcagtgctgaaaaggagcctctggaagagagggccttctcccgcttctctcctcctcctctccacgctggggggatcctgggtgagtgagtctcagactgagggcttcttcctttgagcaacctgtggctttaaaccggtttgactactgagattagagggataaaagcattgcttgtttgctttccttataaagtgaaattaaaggcatatctgtgcctctccactccttgttttttaagccaaatgaactgtactttttctaatacgtcactggttacttttgatagactatggccccattaatctagacctcgatctcttcatttgtgaaataaggagttgcgctggatgattactggaatttcttctggcctctgttgtgattctgcccatcacaaattttagtttcaaatgtttgtgattctgcagaatgatgacttcagagagaacccctaaggccctgagggtttgtaggactttgtgggagaaagtcatttgaaagctcgtattgtgttgaccttgacatgtttgcacaggtatttctctagactctcacaagtgcctttccaggcctgtttctgatgttgtgcctgccaacttgagccgccgtgtgatcttggcaaacgctgtgtttctgagtttgacttggtgtcagttataactgaatcatcaggttaaagccaaagttaggcagaattctaagcctcatgagagaatcctacagttcagttaaacacagaagtgtgtgtgtatgtactgtttcataccctgttccataaaacagaaacgccccgaccaaaagcctttatcccactgacaccacttataatctattgtgtaatatctgcgtatgtgtgtatacagggggcaaaactcctcccagttctagtggcatggtgagtgtattagtctgttttgcattgctgtaaaggaacacctgagactgagtagtttataaagaaaagagatagttggctcatggttctgaaggctgtacaggcttggcactagcacccacttggcgtctgctgccgtctcaggaagctttcactcatggtggaaggccaagagggaacaggcatgtcacatggcaagagacagagcaagagagatgccaggatcttttctttttttttgttttgagacagagtctcgttctgtcgccaggctggagtgcagtggcgcaatcttggctcactgcaacttccgccccctgggttcaagcgattctcctgcctcagtctcctgagtagctgagactacaggtgcgtgccaccatgcccagctaagttttgtatttttagtaaagatggggtttcaccctgctggccaggctggtctcaaactcctgacctcgtgatctgcccgccttggactcccaaagtgttgggattacaggcatgagccactgcacctggctgccgggcccttttcatttatattttttatttgagataggatcttgctctgttgcccaagctggagtgcagtggtccagtgtagccttgacttcctgggctcaagcactcctcccacctcagccccccgagtagctgggaccacaggcacgcaccaccacacctggctaattttcttattttttgtagagagaccgggtcttgctgtgttgctcaggctgtgttgctcaggctgagctcaagcgatcatcctgcctcgacctcccacagtgctgggattacagaagagaactgcctcacctagcctccagccccttttaaacaaccagctgtcatgtgaactaatagagtgagaagccactgcttactacaaggaaggcaccaaaccattcctgagggatccgcccccatgacctcccaccaggccccacttccaatgctggggatcacatttcaaaatgagatttagaggagacaaacctccaaactctatcagtgagagagaagaggaatgaaacagagggaaaaatacaagattcatttcttcatttcattcagcaaacacttattaagtgatgctaagcaggcagtcaccatgaggtgtagaatgaccacagtggtcccaggccacatgactgagagaacgaggtcctctaaatctgatgagcaaggcaagagagggattggcttgagggaaagatgttaagtggacatttcaagaggctgaatcatctaagcagagacattgatgggagatttaaaaatgcagttggtgcaggagtgagacgtcagggcaggtgctttaggtttagagtcttttccctggactcaatagagaaagccatgggaatcaatggactctccaaggagaagaccaggctagaacaccaaatcctgaagctcctggttggcttcactgagagggtgggaggaggaactggagaaggagaaagagagtgggattttgcagcagctcgttagaaaagcgttaggtggaaagagcctggaggtgggagttcaggggatagtctcagatgctgcagagaggctgaaagaggatgaggacgtagatgagaccagcatctgggcatcatgggcagcttttgagtatgctttcaattggggcacatttggttgcaagaaacagaaacccacccgaaaaggggcatttgttgagcagacatagttctgggctgcagcaacttctcactcctgcttctcagcaaccactggcttcattctggtctgagggtggatggatctcctctgctgggatcttaccccgcctctccctaagtccagcgtgcacagactctgggcttctctaccactggtcctggccaccattcctcattgcctcgtgatgagtggcctcctttgatggtcttccttatcaaatatctaaagagaaaatctgattgtccccacataagccagaatctacccttagtccaattagcagggtctaagaggtgggttgatgtggtgggccaggaccactcagacaggagggagatgggacatgttgggaggggtgaggaatgagtggttttcagagagaagaacaaaggcaggccttccaacgtggctgctcaagtgtgtgctgtcatgggagcagagaaatgaatgctgagggtgatgacagtgtttctaactgcatgcaagggcacatgcttaacggccagggacatgctggggtaggggacagctctgctggctaataggggagagggagagcatggtaaaatacaattatgtacccttggagcattggtcagtagaaaaccaaactcactctgatgcgatcccgatccaatgctctgaatcccaaggaggccacaagcctaggggagatttgtccatctcagcccaagaggtcccatcccacccccaaaggcaggcacgaagaccaagacttcaggtggtggcagcaagggagcagccagacgctgctcaaggaactgacaaggaagactcctcggctgggcacggtggctcatgcctgtaaccctagcactttgggaggccaaggcaggtggatcacaaggtcaggagtttgagaccatcctggccaatatggtgaaacccgtctctactaaaaatacaaaaaaaattagctgggtgtggtggcaggcgcctgtagtcccagctactcgggaggctgagggaggataattgcttgaacccaggaggtggaggttgcagtgagctgagatcacaccactgcactccagcctgggtgacacagtgagaccacgttctcaaaaaaaaaaaaaaaaaaaaggaagactcctttttgggggcctgtactcacccttagcagatctctgaacaatccactatgacccttgtcctagggttcttaattcagctgtgtttagaagaggtggatatcactgtgtttttatcatcctagtctgcagaggcaaatttgttcctgttattctatcttgtgatatgtcatggatagcaggagcaactcaagatagccaccaccttgccaacgtttcgtaagtgttattaatgagggtgtttaaaatcgacacagtggagagagtggctgtgatgagtgactactctgaatttgtgacctaaaaaggggaaattctgctccacactcaagtcagggaacagcctcaggagagctctgtgctggatcgggtgccaaagagttggaaagagattaaacccagcaacactggctgactttatgcagccaagccgcttacatcggtataaagttcaggaatgactgaaattggttgtgtctcattgtctggggctccaaagaaatatccaatccctaccaagatctgacctcctctgagtagctgcctttactgcatgttaagcaagacttcagcctgaaacatgtatttctccctgcttgtgctcagttacatgtgaaaggacctggaaaggtacaaatgtatgggaagctggagtggccatttctttctttctttttttttttttttgagacggagtcttgctctgtcgccaggctggagtgcagtggcatgatctcggctcactgcaagctccgcctcccaggttcaagcgattctactgcctcaacctcctgagtagctgggactacaggcgtgcaccaccacgcccagctaattttttgtattttagtagagacagggtttcaccgttttggccaggatggtctcaatctcctgaactcgtgattggaatggccatttctaagtgggacaaagattttcattttgaggagacataattttgcagctggctccctgagcttaaaaagcacagctttgtattcacttttggtcattcagaaaaaccattcctctgaatatccttttgctgaaactggtcataaggttcaagttagaatctgacaaagtgcttttgcatctcatatttcatagcaaacagatgagacaagcaacgcttgaatcccagttggtcacaagctcatcgccacatgtgttccaagtctttgaaaagcatttggtgatattactgtttgcagggcctggtggaagtttccctatttggcatttgttggcgtgcctctctttgcccaacaccagcctgttttactgccccaggactgtcaatgctttggcgcattccttctcctcatttggcataaacagagagacttgggttgacatgtcttggtccaacaggtgtggagggaaatgaccctctacatacactgatgtcaatcttggagaagcagctattaaatagatagaggaaaaacgacagaggaaaaacaatgcccaagggcaatcggtcactccttccagagcttcggtcagatgggtagataccaggagttcaggaagttaacctttagaagatatgttcatatgtggcaagatcagtctgcaggcccaaggtctaggagccaggagtagtggtcagacacgtggtcctacggatcaaaccagtacagatgcaagagaagggctgagtgaagacttgggatccaacacttggacttagagttctgttggagacaccaggtctcatgtatgaagtgcaacggggaaattcagtttagaaaatgcaaatcggctaagttcgttggctcacgcctgtaatcccagcactttgggaggccgaggttggcggatcacgaggtcaggagatcgagaccacggtgaaaccccgtctctactaaaaatacaaaaaattagccaggcttggtggtgggtgcctgtagtcccagctactcgcaaggctaaggcaggagaatggcgtgaacccaggaggcagagcttgcagtgagcagagatcgcgccactgcactccagcctgggcgacagaatgaggctctgtctcaaaaaaaagagagaaagaaaatgcaaatcaaaactagcttactttagtagccaaattactggcagattgctcgatgcctgcttatgaagagatgacctgattccaaagcccaccactgacaagccagagattgactcggccaggattggcttaggaactggagtgggctctagtcacaaatgaggaaggaagcatttcttttcctcccttccaccctgtctccttttctttcttaatattttattatggacttttcaagtatacaccaaagtagagagaatattataagcatccttatgtacccattactggtttctacaattgtctacaatggttgagcttatttcatttattatcctactttccactaacatctgccttcctccctccactgttcaatttttttgttttgttttgttttctgttttttgttgttgttttgtttgtttgttttttaagaaagtctcactctgtcactgtgtcacccaggctggagtgtagtcatgtgatcttggctcactgcaacctccacctcctgggctcaagcgattctccttcctcagcctcccgagtagctgggactacaggcatgcgccaccatgcccagctaatttttgtatttttaatagagacatggtttcatcatgttggccgggctggtcctgaacccctgacctctggtcatccacctgccgtggcttcccaaagtgctgggattacaggcgtgagccactgctcctggccctgttggattgttttaaaacaaatacttccattgtttaatcagtaatattaaagtatgtattttgtattagtttgttctcacactgctaataaagacatgcctgagaccaggtaatttataaaggaaagaggtttaattgactcacagtttcacatgtctggggaggcctcacaatcatggcagaaggcgaatgaggagcaaggttatgtcttacatggtggcaggcaagagaacttgtgtagggaaacttccctttataaaaccatcagatctcttgagacttattcgctatcacaagagcaccatgggaaagacccaccctcatgattcaattacctcccactgggtccctcccatgacacatgagaattatgggagctacaattcaagatgagatttgggtggcaacaaagccacaccatatcatgtctctaaaaaattaggactctttttgtaagtgtataaccacagtatccttatcatacaaaaaataaataattacgtaatattaaaaattgtgtcagtgttcaaatatccctggttgtttcattttttaaacttttgatttatttaaaatcaggatccaaacgagtttcacaagttgcttttggttgatatgtctctcaaggcacttttccatttccccccagagtttccatatttctcctatatcctccaccatatataccctccagaaatttcctatgtcttccactattatatctaccttttccagtaaattatttatgttatggttgtaagaattgtttttgagtctttgctaattccaagctctgagtcatctttgcatctgcttatattgattatttttcctcttgattataggtcattgtcttattcagcccaggctgctataacagaatatcatagactggtgaattaaacaacagaaatttatttctcacagttctggaggctgggaagtccaagatgaaggtgctggctaaggccctagtgaggatcatcttcttggtttgcagatggccaccttcttgctgtatcctcatatgataaagggaccatttctctcaagtatcttcttacaagggtactaatctcattcatgaagatggagccctcctgacctaatcacctctcagatgactcacctccaaataccttcacattggagattagatttcaacatatgaatttggggcagggggtataacattcagtctatagcagtatggtatattattttctgtatatagtgttggagtttgctagtatgtttttcaatatttttgcatcactcatgttcatgagtgatattgctttgtagtttttgtctgtgtgtgtgtgtgccatttttatcaggttgaggaatcagtgtcattcttcataaaaggaattaaggtgttcttctgcctttaaaatgctttggaataatttgtagagcacgctgggactatctgacctttaaagatttggtaaaactccctcgtgaaattatctgggcctgatctttttgttgtgttatggttccttagtaaatttctctatcgtttttctgtggaaataggtatgtttaagtgttgtaactttagtggtgtcatttctggcaatcctcatttcactaggatactatccatttcatttttttatttgcatagacatctgcaaatcagcctcttataatgtttaaaatttcttccgttacaatggttatttccctcttgtaattttgtgtgtttgtgctttctccctttttctttctgatcaaggtagctagtaatttttctagtttattccatttttaagaattaggcttttgtctgggcatggtggctcacacctgtaatcccagcactttaggaggccgaagcaggcggatcacctgaggtcgggagtttgaaaccagcctggccaacatggtgaaaccccgtctctactaaaactacaaaaattagccagacatagtggtgggcacctgcaatcccagctactctggaggctgaggcaggaaaatcgcttgaacccaggaggcggaggttgcagtgagccgagatcacatcattgcactccctagcctagacgacaaagcaagactctgtctcaaacaaaaaaaaaagaattaggattttgatttgttcattaatcgctcatttttctcttctctacttcatctatttctgcctttaactttattttttcttctttgtgcttttcttagtttactttgtttttcctttccagttttttgagttgggaatttaattcattattttccttctttcattttcactgacaaatatgtttgatgcaatgaattttcctctgatcactgctttaaatacatcccattgactctgatatatatgtaatgtttttgctgtcattataaaactgcctttgaaaaggttgtaacactgaaagagatctgacctaaccaactctattttgcctttaacctccaaacttcctgtggtcacttccggatgtgggccaagataactttgggagtttatagtttaaacgataatagccctttccaaaactaaaccaccttttttttttttcttttctgagatggagtctggctctgtcacccaggctggagtgcaatggcgcgatctgggctcactgcgagctctgcctcccgggttcatgccattctcctgcctcagcctcccaaatggctgggactacaggtgcctgccaccatgcccggctaatttttttgtatttttagtagagacggggtttcactgtgttagccaggatggtctcgatctcctgatgtcatgatctgcctgcctcagcctcccaaagtgctgggattacaggcatgagctactgcgcccagccctaaactgcctttataaaactaatgaaaagggctaggagcggtggcttacgcctgtaatcctagcactttgggaggccgaggcaggcagaaaactaatgaaagttcaccaagttaggaagataagagaggcctaaattctgctaagatgtaggtgtagttggccaggcatggtggctcacacctctaattccagcactttgggaggccgaggtgggtggatcacctaaggtcaggagttcaagatcagcctgaccaatatggtgaaaacccgtctctactaaaaatacaaaaattagtcgggtgtggtggtgggcacctgtagtcccagatactcaggaggctgagacaggagaattgcttgaatctgggaggcggaggttgcagtgagacaaaatcgtgctactgcactctagcctgggcgacagagcgagactctgtctcaaaaaaaaaaaaaaaaattacactcgttcctgaggttgaaagatttacaacttccccaattattcctgtaaataaaatcactatagtacaacctaaggttagccttttaagatgttttcagagtttggcatttctgattaccagatgattccacctagaccagtgactcctctgtggccccacaccccatcccccagaactggactcagcacaggaggaccttttttccacattcctatgattgcatccccaaccaattagcagcacccattcccgagctccctgtcctccaaactatctttggaaaaccctagactctgaattttgggggaggccaatttaagtagtaataaaactggctctacatgtattaaactctttctctattgcaatcccccctcttgataaataggctgtatctaggtagcaggcaggaagaacatgttgggcacttacaattattattattttgtattttgtaatttaaatttgtatttttgtatttccccttttatctaagagttgttttagttttagatgtatatttacctattttttaatcctcatcctcagtgcttttaccaaagtttttcccagttatcacttggttggatgaaatacatcatctagtagattcctcaagactgaatctcatgggtgtagaattcagtaagttactgtattttattttattttttttttgagacagagtctcaccttgtcgcccaggctggagtgcaatggtgcaatccgggctcactgcaacctctgcctcccgggttcaagtgattctcctgcctcagcctcccgagtaagtgggattacaggcatccaccaccatgccccactaagttttttgtatttttaatagagatggggtgtcaccagtttacccaggctggtcttgaactcctgacctcaggtgatccacccacctcggcctcccaaagtgctgggattacaggtgtgagccaccacgcccagcttttttttttttttttgagacagagtcttgctctgtcgcccaggctggatggagtgcagtggcatgatctcggctcactgcaagctccacctcctgggttcacgccattctcccacctcagcctcccgagtagctgggactacaggcgctcaccaccacgcccggctgattttttgtatttttagtagagatggggtttcaccatgttagccagaatggtctcgatctcctgaccttgtgatccacccacctcggcctcccaaagtgctgggattacaggcatgagccaccgtgcctggccttttttttttttttctttttttttttttgagatggagtctcactttgttgcccaggctggagtgcaatagcacgaccttggcttactgcaacctccactccccgggttcaagcaattctcctgcctcagcctccagagtagctgggactctagttgtgcaccaccatgcccagctaattttttgtacttttagttgagatggtgttttgccatgttggccaggctggtctcaaactctggacctcaggtgatctgcccgcctcagccttccaaagtgttgggattataggtgtaagctaccacacctggcctactgtatgttgaaaattgtttttctctagccttgatacatgaagaacagcttggctggatataaaatctttggttcgcactttcattcatgagttgttttttgtttttcttttttaatgctgtttcattgttatcttgctttgtttattgatttttaaaaaataggatgctggccaggcacggtggctcaagcctataatcccagcactttgggaggccgaggtgggtggatcacgaggtcaggagatcgagaccatcctggctaacatggtgaaaccccgtctctactaaaaatacaaaaaaattggccaggcatggtggctcacgcctgtagtcccagctacacaggaggctgaggcaggagaatggtgtgaacctgggaggcagagcttgcagtgagccgagattgcgccactgcacttcagcctgggctacagagtgagactcagtctcaaaaaataaataaataaataaataaataaataaaaaataggatgccactctaatccttttggttttgtaagtttttagatcttcttgtctggagggcttttatcttttgtctttgaaatctaatagtttcactgggacatgtcttgggattgattgttttgggttaattttcctaggtatttagtgagtccttccagcacgtagattcaggtattttcctgtttctagaaatttttcttgaatcaaacattttaaattttagctctgttccactgttttgtttttatttcaggcactccaacaatagaactataattccttctttgcctgtctcctattttcttactttctctctgatcctttttatttatttctttatgccatttcttatcctcttcattgctttcctgatttttttttttttttttttgagatggaattttgcccttgttgcccaggctggagtgcaatggcgtgatcttggctcaccgcaacctctgcctcccgggttccagtgattctcctgcctcagccttccgagtagctgggattataggcatgcgccaccatgtccagctaatttttgtatttttagtagagacagggtttctccatgttggtcaggctggtctcaaactcccgaccttaggtgatctgccaacctcggcctcccaaagttctgggattacaggtgtgagccaccatgcccggccactttcctgattttttttaatgtcgtttattaaattttaatttacatctgttatcccttgggtgccttatgatttatttatttctgagataattttgtctttttcttatatttttttctggagttcaattgacaatctttttattcctccttgctttttgtccatttctatttgcacgtttgaatttctgattcaaggtattttatatatgctgaaatgcagacttgagaatattttattctgtttggagtgctgagttagaattttgttcctcttcatagttggtctcagggtgtaaggaagattttcctcaagtaatatgtgtgaaatattatctcctttttctgttttgtttttcaaaagctctgtgtggacttgttgaccttcttcttgtccgtttttatggcactgaggtgttttacaggattcctagtttaacagtcgcctggtctgtctgtacacaggccatgtttgttagggtgaagttcaagaacgtttctgagtccttttattttgtgatgctcttttcttttcatagaactctaacttttcttttttttctttcttttccccatttaacactgctgtggtttgaatgtttatcttttccaaaactctcattgaaattcagtccccaatgtggcagcattgaaaggtggggcctttaataggaggaagatgaattaatccactcatgaattaatagattaatgggtcatgatgggagtgggttagttatcaacagagtgggcctgttatgaaagccaatttggcgtactctagcctcttgccatgtgatgcctctgaccacctcaggactctgcagagagtcctcccaccagcaagaaagccctcaccgcgtgtggctccttaaccttggatttcccagcctccagaactgtaagaagtacatttctttgtatcacaaattacccagtctatagtattctgttataggaacagaagatggaccaagacaaacacccagttgccattgggtattcctattatcatttctgccttttttttccccctagaagccatgcattttgaaggctgtcctttgaattctgtctatccctttgttattattattattattattttttttttttgagacagaattttgctcttgttgccaaggctggagtgcagtggtgcgatcttggctcactgcaacctctcgcctcccaggttcaagcgattctcctgcctcagcctctcgagtagccgggattacaggcatgtgccaccaggcctggctaatattgtagtttcagtagagacagggtttctccatgttggtcaggctggtctcgaactcccgacctcaggtgatctgcccgccttggcctcccaaagtcctgggattacaggcatgagccactgcgcccagcactattattattttttaacctttattatttttgagatggagtctcactctgtcacccaggctggagtgcagtggcacagtctctacttactgcagcctctgcctcccgggttcatgcgattctcctgcctcagcctcccaagtagctgggattacaggcgccagccaccacacctggctaatttttgtatttttagtagagatggggttttgccatgttggccaggctggtctcaaactcctgacctcaagcgatccactcaccttggcctcccaaagtgctgggataacaggcatgagccaccatgcccagccgtacatatccctttaaattccatgtgctttgaaattcctttgtaatagtccctgctgtgacctgctcagacattttttaaagaattttctatgtttgggtatacttaatcatctgacaataatgctagaccaatgtaggcccttttcactagctgccctctgtattgtcccaactgtttctagggaactgggtctacctttgttctctacaaacacttgtggtagggtgagggcaggtgcatgagaaaaatccaggattttctgactttcctctttttatttacagttttgaaaagtgattacacttctctgttttattttctgtcttcaagttatagaaagtctaccttttgtgtacatttatttttcctttctcattgttttatatcactttgggaggaagtattgggagacaggtaactggaggcctctattattttcagttaccacaaaagctaacttaaaaacaaacaaatatgaaattagctgggtgtggtggtgcatgcctgtaatctcagctactcgggaggctgaggcaggagaatcgctcaaatctgggaggcagaggttgcagtgagcagagatcgtgccactgcattccagcctgggtgacagagagagactccctctcaacaaaagcccacaaaaaacaaatctgattaaggtgttcttctgttcttgctcttgctggggagaagtataaactggccaaatggtacttaacaaagtcttattaattaaggacatttaaaaattatataatggttgttattggccaggcacggtggctcacacctttaatcccagcactttgggaggccgaagcaggtggatcacaaggtcaggagagtgagaccatcctggccaacttgatgaaaccccatctctactgaaaatacaaaaattagctgggcatgggggtgcgcgcctgtagtcccagctactcaggaggctgaggtaggagaatggcttgaacctaggaggcggaggttgcagtgagccaagattgcaccactgcactccagcctggtgacagagtgagactctgttttcaataaggttgcctgggaaacagaggttttaaaaagctatttttaatttaaataataaagtagcctgatgttagcgaaaactctctctgaggtcagatgattgcatttgcaaagtcctatgatgtcacatggaaggcaaatatctgcagtttcttagttctgctctgacatgtgtgtcatcaggaataatctctttgcctctggtgtagttggcaccgacactatccctttctcaaaatctctcccatgttgtttgtgctggaacagcctccccaccccttcattctgtcatccctctcccttgccttaacccacaattcttcatgatgttgatactgtatttgatatccaaaaatgacagcatagtttagctttggggttcaaactgatgtctgagtttttgtgggttacagcagcttgttttaataagaatatggttttttgctaatcttgtctgcagagagggacggtatggaaattgcgagtaaggggaaccttatattttaatgtgtcatcaaatatctggtttagcaggggaaaaagaggccctttactgcaaatcatgtttccattttgcaattccagaatggaatgctcagagcctcatccccagagaggttgacacactctagcatcttgatgacactgggtctggcatagaccaagacaacactggtggctgccactcaagggaccatgccagtaaatggtcatttcaacagtggagagggattggacgcatccctcagtcttccctcgtgtggcatcctttgggatacaatgcttagatcttcatgactgccagccacaattgggtgcaggctggtgtgaaggaaaggaaagtgagagcctctggggaaatcttatcagttagcttttgcaacatcacaaaccaccccaacacttagtggtttaagacaagaatttatttatttagcttttgatcctgtgggttggcaacttgggatggacttagcagtccttctgggtggttctcttggtctcagctgagatccctcatgtgtcggtgttcagctgtgggttggcttgctaccagctaccactcaccagccatgaaaacaagggaatatgctgactgtagtctctgaacaaggcaaatttaggttggctcttgggtaaaggcctgtggcccaatctaagacgatggtccaactagattagccccattagtccttgggcctcaccactgaccattacccagttgggtgagggagcagacagagagctaggtagacagggatgcagggtcaggtagacagtgacacagggccaggtggagagggacatagtgtggctggggaagtgggaagggtgcagccaaactggggagaaaggagatagctctgcagccctgcactgctcttatgttttttgtttgtttgtttgtttttgttttttgttttaagacagagtctcgctctgttgccaggctggggtgcagtggcgggctctcggctcactgcaacctccacttcccgggttcaagcgattctcctgccttagcctcccgagtagctgggactacaggtgcacgccaccacgcccagctaatttttgtattttcagtagagacagggtttcaccatggtgaccaggatgctcttgatctcttcacctcgtgatctgcccacctcggcctcccaaagtgctgggattacaggtatgagcggccgtgcctggccatagtccctctcaattctaatagcctgtgatagagcttgacacttggatggcaggaagtctaggctgcaattaggtgataatttgttgttggtggtggtggtgatgggaatctgaaacaacatcttattaacgttggaaccaatgaatggagtgaactcactttactattcctttaattgaacaaatatttattggattccagtgcaaagagtcctgaaccaggagaaagaagacctaggtttggatctcagctctgccagcatatcagtcagagttgatgaaaaccttccagttttttgtttttgtttgctggtttgtttttgttttgagatggagtctcactttgtcacctaggctggagtgcagtagcaagatcttggctccctgcaacctccacctcccaggttcaaatgattctcccgcttccgcctcccaagtttctggaactacaggcacccgccaccatgcctggctaatttttgtatttttagtaaagatggggcttcaccctggccggacacggtagctcatgcctgtaatcccagcactttgggaggccaaggcgggtggatcatgaggtcaggagattgagacaatcctggcaaacatggtgaaaccccatctctactaaaaatacaaaaattagctgggtgtggtggcacatgcctgtaatcccagctactcaggaggctgaggctggagaatcgcttgaacccaggaggcgggggttgcagtgagccgagatcacgccactgcactccagcctggtgccagagcaagactccgtctcaaaaaaaaaaaaaaaaaaaaagatggggtttcgccatgttggccaggctgatctcgaactcttgacctcaggtgatcggcctgccttggcctcccaaagtgctaggattacaagcatgagccaccactcccagccaaacctcccagttattttaatagaattcaatatatgaagaattgttatctatgtaagtagaaaggcaaaaagcaaactctcaggtgtaatggaaggtagcaacttcagaaagcagctaccacccttaagcctgggggagcaaagagtagaagttgaaattattaaaatttggaagattagaggaggagccccacagaagtgaacctcagagctccatggagggggctccaggtggctggagctggcatccttgagggagcaccatgtgggggtgctgcaggaatcagtaaaactgcaaactcggttctttcactgctgagggagggaactgctactgcctgggtgaagcagtgggccacggtgctgctcatagaaacaagaaacagaccggaaggagtgtgtctggcctctggcccctcctggcagagcttcttgaagagcagttggcaaagcagaaatggggcttgcagagtcccccaacatctgaatgtgggggatttggagatgacaagcagtaactaataaccggcccagcctctcacgagcagagggctggatatgtcagtcctgtgtctgatcactgggtcatgagagcagggactctctgaggttttcccagccctgatattctacaagattggaattttctacatcaaaatttctaggtggcctccaaggtggaggaaaggaagaaaacagcaggctaaggggagagtgtgaaggaagagtcatcatttcactcaaaccccacagagcagccaggtgcttggtgctgtgaaggtctcctgccagagcagaaggcaagcaacctctctaacaaatctctttcctgggctacggctgtttgtttgtattaaaacgggaacatgataacagagctattagtagctccatgctcagctgtgcaaggtagggagttagagcactgaattcagtcactggagaaagaagctgaggtctcctgatggccctaggatgagggctgggctatctgtgaatagcaatgggcttaggtcgctgggtttgtcaagcagccacgggagctgctgggtcaggtgaacctgagctccccctcgatgagcaaacacaacttggaccatgtcctccactgacacagaacccgactgcccgagccctctgtggctggggagcaatgccatggcagaaaacgcagttctgatctgagcttgctggtctggtctggagaagcaattcagagcctgtagggccctggtcgagatgagagaaggcaagcctgtgtgaagccagttctggttccagccttggaactggaagactgtgggatgttgggtaaatcatttccaacctctaggcctcagcttcctcatctgtaaaaagaggctttggagagggtggtcttcaagtttcttccagcactaacaatctaaattattctatgtaggagaaaaatcagaatttattaaacttataaaacagatacatttctatcatgctgcaaaaaaaaagataattttttcaatagagaataaaaactctaatagaaaacatgatgcgattgtctaacatatcaacaaatcccaatagatcattactaggctgtactaacagagaagtatagggtaaagactttgggcaagctgcaaaacctctctaagccttcatcttaccattgatgaaatgagacctgtgtaatttttttttttttgagttttgctccaggctggagtgcaatggcatgatcttggctcactgcaacctccgcctagcgagttcaagcgattctcctgcctcagcctccagagtagctgggattacaggcacctgccaccatgcccagctaattttttgtatttttagtagagatggcatttcactatgttggccaggctggtgttgaactcctgacctcaggcgatccacctgcctcagcctcctaaagggctgggattacaggcatgagccaccatacccggccaagacctgtgtgatcttgtctccgattccttagctccctgcccctctccaccccatgctcagtgtataaaatggggcatcagcctggcctagacctcacagtcctagcaatgtcttccacctgctctgcccactgtggcttctgcagtcttgctgctgtgttggttctcatgtttccatttccccttctcttgcagacctgcccatagggcccaagtccccagttatgctcttggtcatcttggccatggttctgcctacccatttcttctaggctgcctcagccacagtgattagtcacctggcccaaacctgtaccttccactctcctccctgatcaaagagagggatcacatgagatggtaccttccaaaccagctttagttgccaacaactagaaagccatgctctgttataaaactaaataaacaagagataaaggcggaagttatctttgaattctttgcaaaaatcttctcaaggtggtagtgtcatattgttcattgaatgcaggatctccatccttcctcctgctctctggtggactttggccaaaccacttatggtacttacaggctttggcagttcatctgctataaaaaaaaaaaaaaaggacaaaacatatctcatagctttgccctaagtatgaaagaggacataagtacctaacagagcttggcacattaaaaaaacaaaaacaaaaactcaatgttggcccggcacggtggctcatgcttgtaatcccagcactttaggaggccgaggtggggggatcacctgaggtcaggaggtcgagaccagcctgcccaacatggtgaaacccggtctctactaaaaatacaaaaattagctgggagtggtggcacgcacctgtagtctcagctactcaggaggctgaggcaggagaatcacttgaacccaggaagcagaggttgcagtgagcccagatcgtgccactgcactccagcctaggtgacagagtgagactccatctcaaacaaacaaataaagaaacaaaaaaactcaatgtttatgaaatgcattaataagaagtgaattaggctgggcacagtgtttcatgcctgtaatcctagcactttgggaggttgaggtgggcggatcacctgaagtcaggactttgagaccagcctggccaacatggtgaaaacccatctctactaaaaatacaaaagttagccaggcatggtggtgcatgcctgtaatcccagctactcaggaggctgaggcaggagaatcacttgaacccgggagggggaggttgcagtgagccgagatcgctggtgcaggatttaaccaaatccacccctcccagcaaacatcctttcctcttccttcatcacagcttctctgttccaaggccattccctctgtgccctcagtgtttaaatgctttgcactttacattccaggatcccaaaatgttaaaaaaaaaaaaattagaaaaatcagtgggggtatggtggctcacacatgtaatcctagcactttgggaagctgaggcaggtggattgcttgagcccaggaattggagaccagcctgggcaacatggcgaaacctcatctctacaaaaaaatactaagagtagccaggcatggtggtgcacacctgtagtcccagctagttgggaggctgagatgggatgatcgcttgagcccggaagatcaagtctgcagtgagccatgatcgtgccactgcactccagcctgggtgacagagtgagaccctgtctgaaaaaaaaaaggaaaaaaaaaaaaaagccaggcgcggtggctcatgcctataatcccagtacttttgaaggccgaggcaggtggatcacgaggtcaagagttcgagatcagcctggccaacatggcgaaaccccgtctctactaaaactacgaaaattagctgggtgtggtggcacgttcctgtagtcccagctcctcgggaggctgaggcagaagaattgcttgaacccgggagatggaggttgcagtgagccgagattgcaccactgtactccagcctggacgacagaatgagactctgtcttaaaaaaaaaaaaaaaaaaagtcagtccctgcacacctgaggcctttctcacctctgtggtctgaagctctagttaagattggtttaaactgccccattctgagcactgtggggtgtcattgccttcccaaagacatctctaaatgcctcagctttacatttcccccagcttcttccgactccaagtttcttcttctataagatgcttaatttgtgtccccacgaaattcatatgtggaaatcctaaccctagtaccttagaatgtgattgcctttggagataagacctttcaagaggtaattaaggtaaaatgaagccctatgggggtgcctaatccaacatgactgttgtccttagaagaagagattaggacatagacgggcaaagagggaagaccatgtgaagacatggggagaagactgccatccacaagccaaaaagagaagactcagaagacaccaacccggccaaaaccttgatctcgaacgtccagcctccaggaagatgagacaataacttgctgaagccaccgaatctgtggtggtgttacagcagccggagctgaccagagcagcctctcctctctgctcagagcattcgcgctctcacagaagccccaatcaccccaggcattcgtgtgggccgcagagttgacagtttctggagggtggtttctggaaagtggtttctggagggtgctttttggattttacatcacagcagcgcacacagatggaagattgcacatgcgtcgcctgcgaagtcccctgtgccgccgccgttttggtgagccatcttctctccctccctccctgccagtcctcaggagtagcccctagttcttctccttcctttgccagggctttccctgtgttttgccgcctgttgaagacttgccgccattcccaattggctcattcaagacattttgcctaataagattctccttcttagaaaaattcttctgtggccaggcatagtggcttatgcctgtaatcccagcactttgggaggctgaggcaggcggatcgcttgagcctaggagttggagaccaacctggccaacatggcaaaacccggtctctgcttaaaatacaaaagttagtctggcgtggtggtgggtgcctgtagtcccagctactagggaggctgaggcaggagaatcgcttgaaccctagaggcagaggtttcagtgagccgagatcgcgccactgcacttcatccagcctgagtgacagagtgaaactgtctcaaaaaaaaaaaaaaaaaaaagacaaagaaaagaaaaagaaaaagaaaaattcttctgtggtttttttgagggggaagaggcaaacagtcttgtctctcatccctccaaacattttttttaacctggtagtggaattctttttttttttttaatgtaaaagtagacctcattcgttttatttatttatttcttctaaaaaaaaaaacaggatacatgtgcagaacgtgcaggtttgttacataggtatatgtgtgccatggtggtttgctgcatctattgacccatcctccaacttcccgcttctcacccccatcccccaacaggccctggtgtatgttgttcccctctctgtgtccatgtgttctcaatgttcaactgccacttatgagtgagaacatgcggtgtttggttttctgttcctgtgttagtttgctgaggatgatggcttccagcttcatccatgtccctgcaaaagacatgaactcattcttttttagggctgcaaattcttttttcaaacaatgtcttatgcagaaaccccatatatgaaacatttacacttgtaaaacttcgggtgaaattcaccttatataaaattaaacatttgaaagtgagcaattcagtggcatttagtatatcacaatgctgtgaaaccaccacttctatttagttccaaaacattttcatcaccctaaaaaaaaatcctgtgcccattaagccgatatttccccttcccccagcccctgacaacaaccagtctggtttctggctctatgaatttgcttaactctggctatttcctatcaatgggatcgtaaaatctatgaccttttgtgcctggcttctttcacttcgggtgaggcttttggagttcctcctcgttgtagcatgtcagtacttcattccttttcatgtctgaagaatattccattgtatggagagacggcattttgtttatccattcgtctgttgaaacatacacacttctgctctgttccaaccagaagcggggcactgagctccccctcctcatctagcttcctccaccacctccaaggagctcctaagggtcctctgagcttggtaagatgcctggtctccgggaagcctttgatgaaataaatgctcatttgtttccatggagtggtcctaccttgtggcaggggtaaggcgcttccatttgcctgaaaggctctgccctacacaaaaatagaaactggttgcatgcatgcaaaggatggctgagtggtaataactggaggaactgcggacagccggaggctgcggggccggagggtctttgggtcggtactctgccccaccggaggtccacagggcctcctccatccagggtgggccggcaagtctgcctatcagcgatctgggcaagcctgctactttttatgacctcacttgccgaaactcaagccacgcctgggtaagtacattctgcacactccataaacaggtgccagactgccgcgtcatcacatttttgcaagtttttgttttttctttttgtatgtgcgtttccacattatttacggcggaatttgcccaggtgcaaacaggaagccctgggagcagttggcttatttttagaaagaaaggtttgttcccggcccgactgcataaagggcaagagagaagtgagaggttcctggcgcaaggctccttgcaaaggacagttctgagctgctaggtgcggccaatcagatggcaggggccgctttagtttggataagccttttctgaaaggagccctgctgatgtaataacggggaaaatccctgtgtgaaaggccctgaaactgacgggctgggaaacgctgattccctgtgggcaggaacgcttgtctaattgcgacggccctgcacggctcctgcccaggtatgaagtgcagctggcttgcaccagtgcgagggcggagacgcgctgcttgaggtgtgtcagggcctctgcttagaactcgcgcaattctgaacggaggaggagaaagtccagttgctgaagggcagaatttccatgcgcccgcagcttccaagtccagaccacccccgaatgtaagtaggaggcagagatgtgtgcaccttcggttctgtcttgggaaagccggagagggtggtggttgcagagttccctagaagaggattccagacgcagccaggcttccctcggcggttttacaatttacacctcaccaggagttttgccggtctctttagtctgtttgtttaaaaagctagttcagatgccttgatttttaataagattattgtatttaatttggttaatgattgtcacaaattaatattacattcaaccttatgattcaacctggaagatacaaggaagttaataactgataaggcagtgattcttctaacactcaatattttctaatgagggatcatcttccaaatgaacataaaaaataaatggaagtgattaattttaaatgcatgcagatttttacgttctctgagcatgtgattgtgtgtgtgtgtgtgtgtgtgtgtgtctacagcaaaaggcaagaaaggattaaggtatcatatccttttgattgaagggttaggagtgaaagaattgaatgctgtggtgacgtcactcagttttcttagtttggaggcattttaattgggcctgtttgaaccacttccattttattttccagtgatggttcagtacgcatagtgcagggtggctacgcaatcagtgttgcttaaatgaataagcaagtcaatgggtgaattttaagctctccgaggaaacgctatgatgaaaaccatatttccatgaagaaatcttcaattagaaggctggagtttgaggtttatttccaacttttggcctccccaaactgagtctttggcaagctccttaccttttccagcctgagttcccccactgggttagactggtcatctctacggctccagctctaaaagtctatgattcttaaggattttctgtaatttagtttttctaactagaaaaagtgaaggtaacacctctaggcctgaatatgttacagcgtcttatggaattcagttggatgaggtcaataagtgtactgggcttctctgtgaactgtgtgggaagcaccctaattaagatgatcattaataggccgggcgcggtggctcatgcctgtaatcccagcactttgggaggccaaggtgggtggattacgaggtcaggagttcaagaccagcctggccaagatggtgaaaccccgtctctactaaaaatacaaaaattagccaggtgtggtggcgggcgtctgtaatcccagctactcaggaggctgaggcagagaattgcttgaacccaggaggtggaagttgcagtgagtcgagatcgtgccactgcactctagcctgggcgacagagtgagactccatctcgaaaaaaaaaaggcgggggggaagaaagatcattaataaaccatgtcactaagtgagctcatgaaatgattctagttgacctggcagtatgctgccttacatgatctcgtctggtcccaatctcccattttccttagcaagaaagccattctgccttgataaaaagtgtgtgcagaagtgaaactgatttgatgaaacaagtgtttagagtaaaaaaataaaaaccatatgttgttggagagcagtggatttcacacctcctgatgtctgacaccgagctctgccgtcaccaacagtgggaaaccagccacactctgaatttccaaactgaacacaattagaaacagaaaataatctgacaagcagcattcctcaggccctttggcaaacggaccccttttgtcactccgtttgtatatatacgtatatgtgtacgctggcactagctcagagtctcagtaacaaacccgtttttcagaagtgtctgccaaccccggggtggggaatgaaaacaccagcccgtattgggaaagaaacctgggtggcagatcacgaaagaaaacccttcaaaagtaattttccatgatgtgaccgtagagataaacatttcccatcatctggcttttgagtttggggagatgagcagacagaaaaaacctcagatcttttttcatttcacagacgtttatacccttttgtttcttccagtcacctctgacaaaattctggggacgctgggaacactgaatcaacatgggcaatgagaacagcacctcggacaaccaggtgggtgtcaggaagcttctctctcgagctacgtggtgctcttggcagaccttgactaggttctttttacagcgtctcatcttcacccaggaaggagcaaacaagacagcttctgcgtagatgtgtgcgggcatttatggatctatgcagccatttttcatttcattggaattctcttacgattaaggctagctctagttaaagccggaaacgctaattctacttattatttattattatttttaaagacatggtcttgctctgtcacccaggcttgaatgcagtggcatgatcatagctcactgcagcctcaaacacctggactaaagcgatcctcctgccacacagccttccaagtgtctgggactacaggcatgcaccaccacgcctggctaattttttaatgtttaggttttgtagagatggggtctggctatgttgcccaggctggccttgaactcccggactcaagtaattctccttctttcactccccaaagcgctgggattacaagtatgagccaccattacaggcatgagccaccaggcctggccttactttttattctgtcttctaaaactgacataagagagattggcacatttttcctaggttgtgtccacccatcaacttacatggatttagcagaggttaaaataaaacctttccacactgctcccccaaataaagctatggccattaaaaatgattttgaaatctatcagtgttgggcagattaaatgtgagtggtcattctcatgttaaacaaggttttcacaattgaagaatggactttaactgcttaattgtgcataggctgagatattacaacatattcaagtttttcattatctattttaagtttgaaagttttaacttaatgcgttggtgaacaaaatcaggaagacactttctcatttatctcacacaaactggaaaatttggattaatgacattgagttccttgaacgagaaaactggatctaaaaacccacatgctgtaattcatttccctctgcctttttcttccctacaattttttttttttgacagagtctctctctgtcacccacgctggagtgcagtggcacaatctccgtctccccccgggttcaagcagttctcctgcctcagcctcccgagtagctgggattacaggggcctgccaccatgcccagctgatttttgtatttttagcagaggcagggtttcaccatgttggccaggctggtatcgaactcctgacttcaggtgatccacccttctcggcctcccaaactgctgggattacaggcatgagcccccgcgcccggcctctacaattttcttttctcaagcaagaaaacaaagtgtcaaaagaaaagttgtcaaactccagcatctttaggggcaggccagaaacaacaattgtgttaaaagactgggtgtgaccatggaatactatgcagccataaaaaaggatgagttcacatcctttgtaggtacatggatgaagctggaaaccatcattctgagcaacctatcgcaaggacagaaaaccaaacaccatatattctcactcataggtgggaattgaacgatgagaagacttggacacaggatggggaacatcacacactggggcctgtcgtggggttgggggagggggagggatagcattaggagatatacctaatgtaaatgacaagttaatgggtgcagcaaaccaacatggcacatgtatacatatgtaacaaacctgcacgttgtgcacatgtaccctagaacttaaagtataattaaaaaaaaaaaaaagaaatcctgaggggggggaaaaaaaaagactgggtgtgagacaacagggacaggcaagtgctctggcaaacagggagttcttgtcctactgtcttaaacagggaagccaccatcagctccagtgggtgattgccttgtgggaaggtggtgccaatgttctgagttcaaaagaacttggaaacccatatttttctatgaaatgttaagtttttaaattaaacttattattttgagatattagtagattcacatgcagcttaaagaaacaatgcagagagcccaagtacggcggctcatacctctaatcccagcactttgggaggccgaggcaggaggatagcttcagtcctggagttgaagattagtctgggcaacatagggagaccccatctctaccaaggaaaaaaattagctgggtgtggtggtgcacacctgtagccctcactactcaggatgctgaggtgggaggattgcttaagcctgggaggtcaaggctgcagtgagccatgtttgcactactacattccagccaggtcaacagagcaagaccctgtctcataaagaaagaaagaatacagagaggtcccatgtaccattacttagttttcctcaagggtaacatcttgccaaactataatgcaatatcacaacctggatactgacacggatacagtcaagataacagaccatgcccgtcaccaggggattactcttgttgcccttctgtagccacacccacctctctctcctctcatccctaacccctggcaaccactattcctattccctattgttccctatttctataattttatcatttcaagaacgttatataaatggagtcacacagtaagtgatctttaaggattggctttttttctctctcagcataaatctcttgagatttatccaagtactgtgtgtatcaacagttcattcctttttattgctgaatagtattccaggaatagatgtactgtacattttgtggaaccattcatccattaaagctcatttaggttgtttccagtttttgtcttttacagataaagctgtcatgaacatgtgtgtgcaggtgttttttgagaacacgcattttcatttccctaagataaacgcccaagtgtgcagttgctgggttgtatgatagttgcatgtttagtttgatatggagctgacaaacttttctagagttgctaaagcatttttcattcccaccagcaacgtatgagggatctggtctttggaccctggctgtcatttggtggtgtcactttttggtgttgctattctgataggtgtgttgtaatatttccatgtggttttcatttacattttgatgatggataaagatgttgaacacatttcatgtgcttatctgccatctacatattctctttggtgaaaaattgctttatgccttttgcccattttctaactagattattattattcatatatatattttttgagacagagtcttgcactgtcagctgggctggagtgcaatgacatgatcttggctcactgcaacctctgcctcccaggttcaagcaattctcctgcctcagcctgctgagtagttgggattacacgcgcatgccaccatgcttggctaatttttttgtatttttagtagagacgaggtttcactatgttgggaaggctggtcttgaactcctgacctcgtgatccgcccacctcagcctctcaaagtgctgagattacaggcttgagccactgcacccggcctattatttttatttattttatttttttttttgagatggagtcttgctctgttgcccaggctggagtgcagtggtgcgatcttggctcactgcaacctccgcctcccaggttcatgccattctcctgcctcagtctcccaagtagctgggagctacaggagcctgccaccatgcctggctaattttttgtatttttagtagagatggggtttcactgtgttagccaggatgctctcaatctcctgacctcgtgatccacccgcctcggctgcccaaagtgctgggattacaggcgtaagccactgcaccccggcctattattattattattttttaaagagttttcagagttctttatatagtctagatactaatcctttgtcagctcatagtttgcagatattttcttccattctgtaacatgtcttttcgtcctcttaagagcatcttttacagagcaaaagagtataattttgaggctgggtgcagtggctcacgcctgtaatcccagcactttgggaggccaaggcaggcggatcatgaggtcaggagatggagaccatcctggctaacacggtgaaaccccgtctctactaaaaatccaaaaaaaaaaaaaaaattagccgggcatggtggggggcatctgtactcccagctactcgggaggctgaggcaggagaatagcatgaacccgggaggcggagcttgcagtgagctgcactccagcctgggctacagagtgagactctgtctcaaaaaaaaaaaaaaaaaaaaaaagtataattgtgatgaggtacagttgatcagtttttgctcttaggggtgctgcttttggtatcaaacctaagaactctgcctacaccaacatcctgaagattttctgctatttttttttttggctaaaagttttgaagttttacattttatttttgagtgcatgattcattttgaattaatttttgtgtgaggtacacgatttaggtattgcacattttctgggtttggacaaaggaatagtatcatgcagggtagtttcactgccctaaaaatcctctggactccacctactcatccctcccacacctctcaatccctggcaaccatgaatctttttactgtctacagggtttttgccttttccagaatgtcatacggttggatcctacagtatgtagccttttcacattggcttctttcactcagtaatgtccatttaaggttcctgcatgttttttcattgctttgtcattgctttttagcactgaataattttccattgcctgaatgtaccggtttattgatctactgaataacatcttggttgcttccaagttttggtgattataaataaaactactataaacatctatgtgcggatttttgtgcagacattgttttcagctccttttggtagataccagcgagcgtgattgctgaatcatataggagtatgttcagttttgtaagaaaccaccaaactgtctttcaaagtggctgtaccattttgcgtccctaccagctgtgaatgggagttcctgttccatatcctccccagcatttggtggtgtcagtattctggattttgggtcattctgataggtatatagtggtatcttgttgctttaatttgcatttctctgttgacataggatgtggaacatcttttcatacacttatttgccatctgtatatctcatttggtgaggtgtccgttcaggtctttggcccattttaaagttaggttgtttgttttcttattattgagttttacaagtttcttgtatattttggataaagtgtgccttttgcgaataatttctccctgcctgtggcttgtcttcttattctcttgaggttgagattcatttttgtgtctgtgtatttttttttaacctacgaatgtccatctttctaacaacatttgttagagtattcttcctccattaaactgtttctgcacctttgtcagcaatcagctaggcatatttgtgtggctctgtttctgggtttgctattcttgtccattgattatcttgattactgtggctatataataaggcttgaaatcaggtacagtgagtcttctcattttattcttttctaaaattgtttttgctgttcttgcacctatgacgttccctattaatattagaataaatctatccatctctacacaatactttctgggatttttttttttttttgacagagtctcactctgttgcccaggctggagtgcaatggagtgatctcggctcactgcaagctccgcctaccaggttcacgccattctcctgcctcagcctcccgagtagctgggactacaggcgcctgtcaccatgcccagctaattttttgtatttttagtagagacggggtttcaccgtgttagccaggttggtctcgatctcctgaccttgtgatctgccctcctcggcctcccaaagtgctaggattacaggcgtgagccactgcgcctggcccattgttttcttttctttttttcttttttctttctttctttctttttttttttttttttttttgagatggagtctcactctgtcacccagactggagtgcagtggtgtgatatctcagctcactgcaacctccagttcctgggttcaagcgattctcctgcctcagcctcctggatagctgggattacaggtgcatgccaccatgcccggctaatttttgtacttttagtagagacagagtttcactatgttggccaggctggtctcaaactcctgacctcaggtgatcagcctgtctcggcctcccaaagtgttgggattacaggcgtgagccaccacaccaagcctattttatttttcattatcattttttgtaatcttcaacatatagatccagcatatattttatgatgtttatacctaagtattatgttttctttggagtgaccgtaaatggtgtcatgtttttaaatttgctattcatgtgttcattattaatgtattgatttttgcatgctgattttgtatcctgtgaccttgctgaactcacttattagttccaagaagtttgtttgtttttgtagatttcttgggatttttctatgtatgtaatcacgttatttgcaaataggggctgttttatttatttattcttttcccatcctgtatacccttccttccttccttccttccccctcccctctcctcccttccccttctgttcccttcccttgcctccgctcccctcccctcccctcctctcccctccccttctgttcccttcccttccctccgctcccctcccctcccctcctctcccctccccttcccttcccttccctccgctcccctcccctcctctcccctccccttcccttcccttccctcccctcgccttcccttcccttcccttcccttcccttcccttccctcccctcccctcccctcccctcccctcccctcccctccccttcccttcccgtctttcttctttattacagtggctgggactttcagtcctgtgttaaacaagagcggtgagaggggacatttttccctggttcctagtctgaggaggaaagcattcagtctttcactgttaagtaagatattagctgtaattttgttgttaaacataatgcttgtaatcaagttgaggaagttctctattcctagtttgctgtgggtttttatcatgaatgagtgttcggttttgtcagatgccgtctctgcatcaatcgatgtaattgtatgatctttcttctttggcctgttgatatattgaactacactgattgattttcaaatgttgaaccagcctggtataattatttttacacattgttggattcaatttgctaacactttgttgaagacttttgtatctaaattcgtaagaaatattgctctgtagttttcttttatgtctggtttttgtatcagggtaatagtagcctcacaaaatgagttgggaagtgcttgctcctgttctgttttctagaagagattgtgtaaagaaatcttacattttaaaaaaatgttggcaactaatttcaattatttttaagcactctatgggccaaacgaatgtgcctgctggctggggttggcttcgggcacgcctcccagtaatttccacttaaaggaatgttctgtcttgtgttttagagttgagaagggcatagctatcgggtgagcgccctcaatgtgcacagtatgggccactaggcatattttggcctttagtcctgctcattaacaaaccaagcagctcaggttcaaccccttctttggggtcttagggatgcttttggacctcaagctccctgcaggccccactactggctgcaaacaagatagagcggtgggcagggggtggggagggtgggaggtgtgtgattttgtgcttcaggggacatttagcaatgtctcaggacagtttttgttgtcacaactcagagatggggtgccactggcatctggtaggtagaggtcagtgttgctgcagagtattctacaatgcacagaacagtcccccacaataaagaattatccagcacaaaatgtcaacagcgctgaggttgagaaaccctagaatacaagaacatttggcttaactgctttaacagaatgcctagcggaggtgggtaaacttctttaacctgagatgaatttctacctgaatataggcaacgttgaaaatgggttacatttttctccccattactttcacgaaatcccactgtccagaattgaatgtacactgtttacttagcagagactcatagaaatggaattgcagtgtcaaacgaagggttagtactttcaaaaggcacttgctgtatacattgtcaaaatgccttccagaacagtgatgtcgacttctctcaccagggcatgaaagcctgtgtcactgcatccttgcaggcgacggatgttctaatgctacatatgtttactagttaggaaggtaaaaatgctggtgtgggggttcaatacccgcatcccactccaactgttcctcatttctcacctcctaccagctcctgactccatctcccctcctcagtcttcattctccttgagtgagcagatgtttttctagctctgcaagttttcacttctccaacctcagccagacatgacccagtctggcagaggtctgggtcatgtctggctgaggttggagaagtggggttgcctttaggattccaggaccagacgaggtctgcctttggtagagaaacaagtaggaatgaagcatgggtgtgtctggctgtgggactcagggctctcccagggaattggggctccagacccatctgtacctggtgacccagagccaccgcgagtccctccaacccaaactcagcttctgcctccataatgctcagcctcctgtgatccccctcttgggtaccatgatctacctggccatccaagacagaaatctgcgggtcagccctgactccacctacttccacccccccatctgataaatcacactatgtttaattaattaattgatgaatggcctggccatttagccttccaaatttccagctaattagaactttttttaaggttgtaagagacagaagcccatcttcggtgaccataagcagagaaagggatcattggcttatagaattgagacacccacagagagggtctggctgcaatagtggctgagtccagagattcaaaagatggctctggggatccctctcactggattgcgctctactttcctttgtgattccccagtgtccagggaggtgcccccagcctggtggaaaagatgcccttggcaggtccagccttccatgcttcttccggccaatggtctagcctctttttttttttttttttttttttttgagatggagtctcgctctgtcacccaggctggagtgcagtggcacaatctcggctcactgcaacctccaccttctgggttcatgccattctcctgcctcagcctcccgagtagctgggactataggcgcccaccactgcgcccggctaatttttgcatttttagtagagatggggtttcaccgtgttagccaggttggtctcgatctcctgaccttgtgatccacccgccttggcctcccaaagtgctgggattacaggcgtgagccaccacgcctggcccagcctcctttttctttttcgagacagagtctcactctgtcacctagcgtggagtgcagtggcacaatcttggctcactgcaaccaccgcctcccaggttcaggtgattctcctgcctcagcctcccgagtagctgggattacaggtgtgtgccgccacacctggctaatttttgtactttttttagtagagatgcggtctcactatgttggccaagctggtcttgaattcctgacctcaggtgatcctcccacctcagcctcccaaagtgctgggattacaggcatgagccaccgtgcctggcctcagccttctgatcagaccccataaggaatctgagcgaccctgattgtgtcatgtaccctctctgaagtcaattgctgtgcccagaatatgggacactctgatagccatgtgagtcatgcacccgcctcaacagggccaagatgggcccagctgtataccagccccttcaatatcacttgaagcagtttctcaaaggacgtaaaggcagcacgtatctatgacatggtcttttctaacagtttttctgctccccatccctgctgtcacaactctaccctctcacacctggatcactgggaacacctccaaactgctatctctgtcccagtgagcacactccccgtcgcacccaggcccctagcacctcaggagactcttgactgtgagtgcacttggaggtccctgaatcctgcttgctagggaacgtttggaaggaaagatgcaagtctgaagaaacctcctgttcacagattaaagaccaggcattgaggagcagctgtgtcactagggcaaagggtaagggacaggcctgcccagtcctggcccttgtgtacttcatacaccttcgggcttctggttcctcttctctctctctgttgtctcatttctgggacaccatgggcagcatgggtgcatgcctcatggatttggcctgggagtaaaaaccatggccaggcacggtggctcacgcctgcaatcccagcactttgggagaccgaggtgggtgatcacctgaggtcaggagttcaaaaccttcctggccaacatggtgaaaccccatctctactaaaaatacaaaaattagccgggcgtggtggcatgcacctgtaatcccagcaacttgggaggctgagataggagaatcgcttgaacctggcaggcgcagtttgtagtgagctgagactgcaccactgcagtccagcctgggcagacacagcaagactctgtctcaacaaaacaacaaaacaacaacaacaacaacaacaacaacaaaaacaaaaaaaccccacaaaaacaccaaagattgtccatctggtcctgttccctgcgacctgtcctaacggtgagatccctttgcatttcagcaggaggactccgtcttgcataacgtcattctgtggcctccaaaccctgagcccacacaggtactggggaatgtgctgttctgcatggcttccctctcagccccttcctaacgtctagatggttgcaaacatttggtgtgtcatgtgcatttatatatttaggttttctcctcctccctcttccattgcttcttccatccaccccaaataagttgtaaaacacagtcgaaatcgacaatttatgtttagattttttaggatagtattttagtgtgcctgtccaagaactggcttggttggtatgttctgcaatgctgaataaggcttatgttgccagcagaaaggaacgtagatgctgggagccaatactaacccctccaaactcttctactttgatttcctttgtctgcaagtgaagctgggaatggggtggtgaccctacctttgccgcctgtgagcaaaactgatttgttgtaaaagaagattaaattctgaatcagctgtcagtgtcatgcaacaatgtgctagctgagttccgctgctgtggctctgcccaaagtgtttgccatccactggggaagagggtaaataaggaactttgcgtcacctcacagtgctttttcctggagaggacgttgaggttagtgtgtgtttaggggtgtggtcagggtgaggctctaaaacccctggctcctcactagcctgctctgaagtccccttcacacctggccaggcgtggcagtcatccaggtgaagtgggcttttaaaaaagagtgggccaagtgcgggggctcatgcctgtaatcccagcactttgggaagctgaggagggcagatcacttgaggtcaggagttcgagaccagcctgaccaacatggtaaaaccccgtctctactaaaaatacaaaaattagctaggcgtggtggcgcacacctgtaatcccagttactcaggaggctgaggctggagaattgcttgaatccaggaagcagaggttgcagtgagccgagactgtgccactgcactccagcctgggtgacagagtgagactctgtctcaaaaaaaaaaaaaaaaaaaaaagagctgctctgccccggaggatggctgttaggtgggtggtgcacttgatgcatttgtttctctgcatatcccagcaaggagtgatgtttaagattgtgaaataaccatttgcatagagcattgtgaagccttttcatacatgagttcatctgcttctcttcattattccatgagctgggctgatgactcatgttttatagactcagaagtaggctcggaaggataatcatcccaggtcatttgggtgagtggaggagtgagaactagaaccctgggtcactaaggttgctggccagtcatttccaaactgggttgtgggaaatcctggagccaacagcaatgcttcctggatcagcccagaaaaagaggaagtggagagaggagaatccagttccctgcaccctgaccttccatcagcacaacttaccctatacagccttatactgcaagatggctcttagaagaaaatgttttggggccgggcgcagtggctcacgcctgtaatctcagcactttgggaggccgaggtgggtggatcacagggtcaggagtttgagaccagcctgaccaacatggtgaaaccccgtctttactaaaaatacaaaaattagccgggcgtggtggtgcacgcttaatcccagctacacaggaggctgaggcaggagaatcgcttgaacctgggaggcagaggttgcagtgagccaagatcgtgccactgcattccagcctgggcgatagagtgagactccatctcaaaaaaaaaaaaaaaaaagttttggaatcagagttggaaagaaacactgatctggtccacctccattatttttcagttttgtgtatggtggatctgaaggacaaggaacttgctcactgccataagtcagtggcaggttggagacaagaagccatcttgggggatcctagtccaggctcctacgggtgtccctgttaggggaagagcactttgtccggttctatctcacagaggtcttccatcgtgctttgcagcagagctcaagacctcagtcacaagctcccacgtcgtgatgtgacgtggatatggttttttattggcttggtggacatttgggaagcccctccctgctgggcatctggtacttatttaggtgctgtgatctgtagagaagcaagacaaacaagggccctgctgtctggaacttacagccaattgaggagtcagataagcaagtgagtaaacagacatcagtgagtaaatacatttgaatctttattaaatgtgtattgtttaccaggcattgctctagcacgtgagaatcagcagtgaacaattcagctgtgatctgctcgaatgaagcttccttatgaggcgctaacaggcaaaagacacatcataaaatttccaatggtaaccatggtcggaggggctatttatttttttattattgcagtaaaatatatataacataagatttaccattgtaactatttttaagtggaccgttcagtggaattaagtacattgcagtgcaaccatcaccgccatccatctccagaactttttcatcttctcaaactgaaactctctgcccacattccacattctccctctccccaacccttgataaccttttctttccttctctccttcctttcctctttccctccttccttccttctgactgggtcttattctgtcgctgaggatggagtgcagtagtgcaatcatagttcactgcaaccttgaattcctgggctcaatcagtcctccctcctcagcctccctagtagctaggattataggcatgcgctactgcagctggctgctttgtctctgtgaattaaactactgtaggtacctcatgtaagtggaatcatacagtatttgtatgtgattattatttcacttctgtgactgggttatttcactaaagcgtaatgccctcaaggttcacccatgttgctgcatgtcagaatttcctttctctataaggccgaatgatattccattgtgtgtatagaccacattttgctaatccattctttttttttttttttgagacggagtctcgctctgtcacccaggatggagtgcagtggcgcaatctcggctcactgcaagctctgcctcctggattcacgccattctcctgcctcagcctcccgagtagctgggactacaggtgcctgccaccacgcccggctaattttttgtattttttagtagagacagagtttcaccgtgttagccaggatggtctcgatctcctgacctcgtgatccgcccaccttggcctcgcaaagtgctgggattacaggcatgcgccaccgtgcctggcaatccattctttttttttttttttttaagacagagtctcgctctgttacccaggctggagtgcagtggctgagatctcggctcattgcaacctccatctcccaagttcaagtgattctcatgcctcagcctcccgagtagctgggattacaggcgtgcaccatcacacccggctaatttttgtatttttggtagatggacagttgagttgcttccaccttttgactatagtgaataatgctgtgatgaatatgggtgtccacgtaagtatctgagcctctgctttctattcttttgggtatatacctagaagtggaattggtagatcatacaataattctatgtttaagtttttgaggaaccactaaacttttccacagcagctgcaccattttacatttccactagcaatatactaatgttccaatttctctacatcctcaccaatacttgttactttgttttttgtttgtttgtttgttttttaaattacagtcatgcttgtaggtgtgaagtagtgtcattgtggtcggggctatttttgatgaagtgcaggggacagctctctgtagagacctggtgtactaaggagacagccacataaggttctggaaaaggaacattctggaataaggtaacaggtgtgtatggtataggaatagtgtaacaggtatgggagaaatgagcttgctgtactttaagatcagcaaagaaggccggtgtggctggagaaaagtgggtgaggcaaattatggtgagctgtgcagccagggagctgggtgagggctcagttttgtaggtcccaaccagccctggtaagaagtctggctttcttctacctgtggtacaaagccatggtgataaaagagcatttcactgggatttgagcctgtatgctcactcaccatgggggtgagactccagcagtcagggctccccaaggaggaagcagagcagctgacggtgaacttgtgcccagctctgtctgggctcagcggacttgagactcagcactcagccagactgagctccccataaccggccaattggaaactgacaagcgaaggactggttaaaaccaaccaaccacatttccttgtaaaactccctggcttttgctttgttgagtccctgtggcttgttcagagagatggtctttgagcctttgcaggggctgcagtccctcatgtatacccatccgtgtgagtaaatctcctctgcttcaagctcagggtattgggttattctttgcacctcaacagtcacggcgcctgagtctttctcttgtacacaatgatcaaggggcagagccccttagcagtgtttggctcattattctggatggggctgaggtcctgggataatagagagcaagaagcctgggaggccagaggctcccaggtgaggctttttgttggtttttgtttgtttgtttgtttgtttgtttgtttttgtaggagatacctcagagaataaaaggagtgcactcagtagcactgtaaccaaaccaaagcttcagtcactcaccacttgtacagtccaattaacaagagctacaggagtttgagactagccagtgcaacatggcgagacccctgtctctactaaaaatacaaaaaattagcagggtgtggtggtgtgcacctgtggtcccagctatttgggaggctgaggtggaaggatcacttaagcccttgggggagagggggcagaggttgcagtgagccaagatggcgccactgcactccagcctgggtgacaagagtgagaccttgtctcaaaaaacaaataaacaaacacacaaaccaaaaaacgagtgagggctgacatgaaaaaagtgactttttattctaaagcttagcttagggggaaaagtacaggcttctgcttttaagggcactgctttgcttttggggcagaaagcagggacttttaaaggggggactttgcatgcacagcaggtggggagggagtgagtaggtgggggaccactggactcacttcagtgccttatccaccaggtggtccagctggcacaaaactaggttctaaggtggtcgttgtcttgagacgctctccaggtgggaaagacttccgtcgtgggcgtacttgaggttggaaattgacagttgtttcttgaggcaatctcctgctgggagagctttctggctctggagcttctaagtgagcacagagtcagataagcttgtcctatagggagtgtctggtgaagggaaggtcaaggttataaggttataattgcatttctaaagcgctaagtaggaagtgaggaacatgagaaaagaaggagagagaaaagaaaaaaaataattaaaaccattttctttctcttagaaaaatgggatactcagttacagcatcattgcattaaagggacattgagttttgcaggtgggggaagtgaaatggcttagaaagaacattggcgggggacacaaggttcctgactcatgtgttttttgctttttttctgttttgttttgagacggagtctcactctgtcagccaggctggagtgcagtggcacaatcttggctcactgtaacctctgcctcctgggttcaaatgattcccctgcctcagcctccggagtagctgggattacaggcaggtgccaccatgcctggctaagttttgtatttttagtagagatggggtttcaccatgttggccatcctggtctcgaactcctgacctgaggtgatctgttcaccttggcctcccaaagtactgggattacaggtgtgagccaccgtgctggcctcctgactctattttgaaaccatgatcttctgggcttgtggaaggaaaatcagcctccccttgagagggttggaacctggtaggttctcagagggcagctggcatgggtaaggtgggaaggttaagggtctgttccgtgatgatcctgggatatgagggttcaggctgctgatctgagtgcagaaaaaggcgtgggaattggaaggtgggggtggagacaaggtcagatgaggcagcagggtctggggcggcctgagatgtggggttgggggacaacaagtgcctgggaggactgggccttcaggcagatgagggaggcagggaggtaagcacaacaggacctctcctcggagcctctaggcagtgagccggcagtttatttcgacagtatttgcttttgacactttttgaaaacaattaattgctgcattaattacaaactgatttatcttattcaagtagtcaattttaataacatcacaacagtcttaccttcctatcctgccaaccagtcacagtgatttcttgttttgtcagcacaaatgctattgaaactctgaattttagtggtagctttgggttctgttctctgttcctgagggaagagaagccatcgacagaggaaaattcccacactcagcctgaaacctcttctatctgctaattggaggttcctcttactgagctggggccatggagcctcagcccagccccttgtgggtgccttttgcagcaagctgagtcctagttgttacccttgctccttcctttgggaatggactcacttaggcctcctgggaggctgttctcagggggctctaagcagcctcggttactaaagtacacttgcacaggtgatgtattgcaccacctgatggttggaaatgaagagaaatgtataaccacggctctaaagggtgactcgtttggggagtgggaggacacggtccaatgggaagttgggagactgtctaacacccagccaaggggggcatcacctgttcccgggagtgtcagggtcctggcttatgtgtgtccctctctgggaaagaggtggtggtgacgctgtgatgagagctgtctccactcgacagcccttccaggggtttcatgcatcctgacttgtttagaaagctctgtggtgaaataagggccatgccagcccacagccccaaatcctgaaggtgggcttcacagttgttcagttctggagagccctacaggggacatctgagctccaagctccaagcatgtggatttcagaagggaagggcaaccctaacccctccattaccactctctggagttccgcttggccatggggctgtcatgattcccatttatagctctgaccgtgtggggaggaagaaaagacattcaatcctattattataatgatctcacttaaaacatatcatcattcagtaactccattctaacacttctattgtctgggtgtttctgtaacaagtcccaaaaaacataattttcaactctagaaactgtgatcaatgctatgaagcaagaagacaggtgcacagaccccagacctagcctgggtgtcaaggaaggcgcttctggggagctgatgtttgagctcagagctgcaaatgagcaggaagtaggtgacatcagaaggacccagagccagctcagcagacacgcctcccccagcttgggcaggtccccccgggtcgggtccctgctctgcgtacaagatgtggtctgaatgaggtttgctgctgcaggagacctcagcaatgtggacatctgaggaacagaggaccaggaggacaggagaatctgtgtatgcgagccgtccccagggtctggtcatcaagaaaggctgaggttgtatgttgctcaggcgctgtgtggttgttactttgcttgacagaggaaagtgccatatatatgtgcacatcttgtttaaagctatgcttggtgctctacggttaacttgaaggtcccttctttagctcttgaggaactcagcattacagcaacactcagccagtgcaggacagggagcatttcccaatattccacaggctgcaggtgggcatctgggctgctttaatgtgtttaatgtgaaagaagttgagcaaagaacaagttaagcagcaagaattaattcaatcttcatgacagcacagagtttcctttctttttttttttttttctcgtaacgagacagagtcctgctttgtcacccaggctggaatgcaatggcgcgatctcggctcactacaatctccgcctcctgggttcaagcagttctcctgtttcagcctcctgagtagctgggattacaggtgcacaccgccatgcctggctacttttttgtattttagtggagacagggtttcaccgtgttgcccaggccaggctcgaactcctgagttcaggtaacccacccaccttggcctcccaaagtgctaggattacaggtgtagccacagcacccggccttgacagcagagagtttctttactgtcacctgtctgctcccacagcccctgctgtggggttcccccagcccggagggtcggtgctagttttcactggcacgattacgcaagtgtgtgaacaacacggctccaggttttggccagatgcatcttctgaataaatgtgtaaaatgttaactttgggaggagctgttcttttcttttttcttttcttttttgagacggagtctcgctctgtcacccaggctggagtgcagtggcgcgatctcggctcactgcaagctccacctcccaggttcacgccattcttctgcctcagcctcccgagtagctgggaccacaggcgcccgcgaccacgcccggctaactttttgtatttttagtagagacggggtttcaccgtgttagccaggatggtctcaatctcctgacctcgtgatctgcccatctcagccttccaaagtgctgggattacaggcgtaagccactgcacatggccttttcttcttctttttgagagagagtctcactctgtcgcccaggctggagttcagtggcacagtctcagctcactgcaacctctgcctcccggggtcaagcgattctcctgcctcagcctcccaagtagctgggattacaggtccctgccaccatgcccagctaatttttctatttttagtagagatggggtttcaccatgttggccaggctggtctcgaactcctgacctcaagtgatccacccgcctcagcctcccaaagttctggaattacatgcttgagccactgcacccagcctgaacttctgattaactgcttttgctctaagctgagatagccaatggggctcttcattaatgagttttgaatctgtttcttctttatacagtaacaaccagcatgtacaatgtctacgtggtctagccttgtcctttatttaaccttcagaacaaccctgcagttatgacccccattctacagatacggtactcgaggtgtagaacccagagacttacagctaaataagcagtaaagcttgggtttcagaacaattgtactcagcttcctgcctgctcattcttaaaccatgctgctgtagcatgaaaatgagtggatacagggattctagaggggcaaaagaaataaagtttatgtctgcactttaagtataatcaagtaaacatcacagcatggtacaggccatcctgacatgcccagctctttgaataaagagactctcccttttatttgtacagttgttgtttacaaggcattcctatcacccactgaggtagggaagggcagagattgtggtccccagtttattgacggagagagagaggcttggagagaggaactgatctgaccaagggcacatggatttggattttctgacctcatccaattctctttaaatcatattgtttctaaaatattaaatacatacaggtcatcaacattgggtatgtttttgaagcctttagtctgccacctacaaactacagacatcagaacatgtcacctcttacatctttgaggttcctgaatccttttagggtaatggccaccgcttgtgacccaaatgcttctgaggaagggaaggcagatatgatttactaaatatcactcattcattcactaaattcaaaattccatgagggtagtaggaaccatgtgtctctttttataattagatttctttctttctttctttctctttctttctttctttttctctttctttttctttctttctttttctctttctttttctttcttttctttctttctctctctctctgtctctctgtctctctctctctctttctttcttcctttcttcctttctttctttcttacagagtctcactctgttgccagactgaagtgcagtgcacaatcttggcttactgcaacctccacctcccaggttcaagtgattcttgtgtttcagcctcctgagtagctgggactacaggtgcccaccaccacacctggctaatttttgtacttttagtagagatgaggtttcgccatgttggccagcctgggttcgaactcctgaccgcaagtgatctgcccgcctcggcctcccaaagtgctgggattacaggcatgagccactgtgcctggccaaattttactttagagtattttcagatttatagaaaagttgcaaagattgtatggagagctcccatatagatgcttccccggcttctcctaaagttaacattttacaccatgcctgttttagtcatcagtgtctacccagaacctagacccagcccttactattcatgaggcataatcatcaaaacacacgtcaaactctattctgttattttccatcttttaaaggaagagtgaggactcaaacccagctctctcgggcttcgaagcttattcatttcttctgctctatcgtgctgtatcacatcagaaaacattccgtttgcggaaagctgaaatcccacgctggcagcctttcgcttgttggcctgacagagtgcctgctaggttaggctgaggtgtcctctgcaacctgtattcgtcaatcttttgtacccccttggaggggaagaaacatttgggatggtctagcagaactggtgtgagcatttgccttcccttgacagggaagatgggcagccggctggctctagcacagagcatgtgttcatcctccatatttggtcagcctggcagttgtttctgaaatccgattcctaatgccatggggatgacctttggtctgcttcccagcattcacctgcagtcaagctgctcccaaggagctcgttcaaagagggggcgacttaggcagacactctggtcatgatctaaccatgttaattaagcatggtttaattaactctattggcatgaccagtaagcagtggtctagagtgatggagcgtttaagaggtaagtggaattttttttttttttttatggtgaaatgctttagctctttacaaagtatattttttaggactggaaaattgctgtaactgtttaaagattgctttaaaatagactccaggctctggagtgttccagagccaacgaaagactgtttgtttactcaagcaatggcagcgagggaaagatttgaagaagcaactgggcgagtccacgtgtcctgtaaggcttgccaattgtttttccagcctgcgatttggaagtgtaaagggtaactttagaaatgcatgctgttttgcagtgacgcctgctgacacacaggtcctttggaatccagtaagcaatagagcttaagactatctctaagacggggaacaggaagggggattcaaaagcacagggaaatgtggcaaaagcgagagttcccagggctgagggtacgtctttcgatttgcagacatggccaccagactaaataagaataatctacttttcatacattcaacaaatatttatggactgcctcttctgtgccaggtgctattctgggcatcaaatctaggctcctataccacattattctcaaatgtccaattgctataattccttggagcatagcagcaaaatggcagaggccatagagcaacgaattccactgtatggcgaagcagcgtaaggcagggacaagagcacagactctggagccaaaccatcctggtccaaatcctggctccaccacttccaagctgtgtgatcttgggcaagtggcttaacctctctgtgcccagtattcttagctataacatcgggctctaaggattgaatgagtttaaatatgtaaagcacttaaaagagcagtactagacacacagaaagtgttcctaataattaggttgctgctgtcgtagcagaaagagagctatgtaaatgctgggtgtcagtattcttgtggaaagagcactggacttcaaggtgggagacttgcagagggcagaaggcaagcctctctgtttcttatctggaaaatggaaaacatgattttacctgcctggtatagctcacggggattttataagaatcaaatggatgtcaaagagctttgaaaagtgcaatgtgccattcatacagatagttttgttgcttttaactccatccagatatgtttgtgttggggagaactagtatcattcttgcagattagctttctattagaaaaagaagtgggccgggtgccatggctcatgcctgtaatcccggcactttgggaggccaaggcgcatggatcacgagtcaggagatcgagaccagcctgccaacatggtgagacccccatctctactaaaaaaaaatacaaaattagctgggtgtggtggtgcatgcctgtagtcccagctgttcgggaggctgaggcaggagaattgcttgaacccgggaagcggaggttgcagtgagctgagatcacgccattgcactccagcctgggcaacaagagcaaaactccatctcaaaaatcataataatagggctgggtgtggtggctcacgcctgtaatcccagcactttgggaggccgaggcgggtggatctcgaggccaggagattgagaccatcctggctaacacggtgaaaccccgtctctactaaaaatacaaaaaattagccgggcgtggtggtgggcgcctgtagtcccagctgctcgggaggctgaggccggataatcacttgaacccaggaggcggagcttacagtgagccaagatctcgccactgcactccagcctgggtgacagagtgagactctgtctcaaaatataataataaaaataaataataattaaaaaaagaaaaaaagaaagagaagtggagctgaaaagggagagacgcctgccttttgtttttttcttcaaagacaaatccaagcccttgttatagtccatctgcctgaggaaatatagcccgtggtccctttcttctcctggacttggagcaaagatctgtctccttattccatctgttgtttgcatctgtctgggctattatttgtcttctttccagaattaaaagaaatcttgctcatggaatactgggcatgagatttatctgttaaattatttgcagaatattttactgcaggtcatcttgtgattgaaaggggggcctggcctcaggtgttagttgctgaggtttgcatggcggtcagacaagtaggaattgggttaaaatttcaaaaatgcaggaccctgatataaaaatgccactcactcagtattgttaatcttgagttattatagtaaaatgtgagaatcatgcttccaaagatttataatttatagataaagaatcttggccgggtgtggtggcacctgtaattccagcactttgggaggctgaggcgggcagatcacaaggtcaggagttcgagactagcctggccaatatggtgaaaccccgtctctactaaaaatacaaaaattagccgggtgtggtggtgggcacctgtagtcccagctacttaggaggctgaggcaggagaatcgcttgaatccgggaagcacaggttgcagcgatccgagatggtgccaccaaactccagcctgggcaacagagcgagactccgtctcaaaaaaaaaaaaaaaaaaaaaaaaaaagaatctttctttgaaaatgaagattatagagtgtgaacttaaggtgatttaaagtttccatggtcttgataatgtcctatggggatgattgtcttcttggatgcacagatgaagaggctgagacccctcaggggggggcaggggcactcgttaagggaatggctcagcctgcagggaggtcaagccaaccccaggtcagcagccccctctcgtgtgaggaaccatccccagctctttctgcctccttcaacactgccccgtggaagggatcaaacagagacgccctgtcctggctctgggatcagagataatcggttatgtctagattccactgctgtgtggtcttggcccagttactaaacctctcagagcctcagctctaaaacaggaacacaaatatccatctttcccttaagacagttgtgcaaattcaatgacatagttcatggaaagatactggcccagtgcctggcattagtaagtgctcaataacaggagcatttattgctgttgttctctttcccccacattctatccttcagctaaaatgaaggaaaatttttgcattgtagtgttcatgttggcactagactgtatgggtacctgagagatgaagcatcttttatgttttacctttggacacaatgggatgaacacagatagccaaccactcagggaaatgcaccaggtaggggaaccttagccaaagctagcttgctcttcgggctggtgtctgaaggtcaaggactacagcccatccaacaagtctgacggtctcaagaagtccccaggtgcagactaggcagatgatttgctttcacatgtcctgcagaaacgtcaagattaatttacaaaatccataggctagaggttggtagagtttgatgagtggggaccctcccttcctgggggaccttgggggctgtctgcttcacctccaggcaggagccatacctactatcttcctggggtgccctctgtgtgcacacccctgcagccatgggactggggtctgtctccctagactgtgagcaacgtgagaggaggaatggagccttattttttttttctcctccctttccttccttcctccctccctcccttccttccctccttgcttcctccctccctccctccctcccttctttccctcctaccctctctccttccctctctccctcttcctttcttttcctttcccctatttgtttctgtttctgttttgtagagatgggtttctccatgttgcccaggctggtctcgaactcctgggctcaagcagtcttcccacctcgccttcccaaagtgctgggattgcaggcatgagccaccgcacccggctggggaggcagtttctaattcacacaatggcattgtctgctcccaggccatgcatttggcccagaagagtgccaccttctgattttcacaaaggtgcccatgggctagggaatgtctgtcgtacagatttgcaccatctgctagatttaagcaaggtagaaagaaatgagctcttgtgctgtcttcaaatgtgtgttccatgtaacgcgagttctataagatgttaaactgtggtacataaacaaagagtcctgtggtcaagaaattctggcaaactctgagttaaaattcagtaagttattctgctgtagaactcagaatttttactatgctaatgtgcattgtgaatttctaaaggaggcctatattatgtagcacttgtcaaaggtgtttgaccagggagtactttgttttcctccaagctgatctggtgcagctcatctggatgagaggtggaccggggaatgcactctcagttgctagtgacagaaattcagcttgtacccacctgctaaggtgaaaagggcaatgcatgcggcctcatcatagagctcccagatggctagggcagaatgaggccttggccccagcagggctgctccctctgcctggcatctcggcttttctctgcctgcgagctctgccatctctttctgtggcggtttcgtccaccacagctggaaacaaggctgcaggtgacttcccgactcaccttctatagaaccccccaccagaactgccctggttcttcagggaatcccgtagaaggtcctggcttgaccggagtctcatgtacactccagtgggcagggacatggggcactatgactggcattttccatgagaacctcagggatggagggtatgggtggaactgttcttgaaagaaggcagaccccatcccagaacaaggggtgcatgttgtttggggtgggggcacagggtcgccgctggggaaacaaaatgaaagacaaccactgctttgggaaatacagcttggagcttacaaaagccctttcccttcttctgatttttatattatactaaaatagcatcatttaaatgaggttctgttttttttttttaattttaaatctcatctctgtcctgtgatttaaagttttgactgagccttatatttttgcatcctggttttaaaaatcaactagtctgtaggaatatggtttataaaaacaacaacaacaaatcaactaaccggtggacaagcttatcctggagtgaaagaaaaggtgaccaactctcagagtggttaggatcccaagtggttgggtccagatttctaagcgttcatggttttcttcttccggttagtttttttccctaggtttccagctgaattctggtatgtgaagccatcggtggtggcgggaggaaaatgtgttttcatctcaggagtgccacaaacaaattggacactttcaagtcttagtttaaatgctccacttctcctagggagcaagtgaccccaaagtgtggtaggtgtccccagttttggtttttctactaaagcattcagttggaactgcttgtttgactttgtttcttccccactggatgagagcagcagccacctttgcttcgctgccatatatcctcaaggcctagctcagtgccgcacatagtaggtgtttcgttggacggcagagcaagtgaacaaccttaccttgaatgctgtggtgggtgccctgttgataaatgtttttgtgttttcagagactcctatctgatttcctttccaatttctttttctcctggctcagaggactttatcagctcagactccaaggtccgcgcagccacccgggaacagtcagaatataaaaaggaagcagcaggacacgcccggaagccctgaccacagagacgcgtccaggtaggaggccagctctggaggactgatgcagcccaaggactgccccgctcattgcctgctccagcattagctttgccccatttgctttggaaactggacccttagacacatggtatcgtcctcagtggtgagatgttccaagcagtggttcacagacctctctgtgactggctaggcctgcatgattgaaaaattcatcctgattgcctgcccaaagatgaaattagtaattatagacttccattccagccacactccagagtatcttcattgtcagaacttaaaatggaaaacatcaagggttcccaggggtttatcagtgtctaatccgtggctaagtggagtctgtaactcagtgtggtggccattgcgggcactggaccatgaaacagaggactgagaacacaattaccaaagccacccaagccctttgtcccagggaggctggtggatgaatcccagaaaccaactgtggcagtgggatgtggccagtgcgggggtggcccatcagtcacttccttttttttgagatggagtctcatccaggctggagtgcagtggcacggtctcggctcattgcaacctctacctcgtgggttcaagcgattctcctgcttcagctttccgaatagctgggattacaggagcccgccaccatgcccagccattttttgtatttttagtagagacgggatttcaccatattggccaggctggtctctaactcctgacctcaggtgatccacccgcctcagcttcccaaagtgctggattataggtgtgagccaccatgcctggctggtcactggctcttgttatgagccacagccaggccctagggctccctgccggggctctctcctgggcctctccccatgttggccccacactcatagttttaggggatacaagcagtagtccagcagactcgagcacctggtgtccagcatggacacaggccaggcacgctgggggcacttaataactgctcgtgggttcaactcgcaaacaggccatggatttggtcagaaaaaccctgcaaaattggagcccagctctcaggagtgtatcatgacaggccttaagggaagcaaatgagcaggaactctgtggaacaaaaatgcaaaatggaatgataggcccctgtcatagacaatgcaactttgactcacatgctacttcatagctttgcaaaaccttgagactcaaagtgactttttttttttttttttttttttttttgctttgggtaagtcagagcaacccctggtggcaggaattttcatgcctggggcatggaagtgggtggcttgggctatgtggctttccagaggaagtacttggggcatcttggcaggagctttggatttctttagggaaatggcaatcagatggggcagagtgttttttgctgagggaatcagaatgatccctcaaacagcacctttgatctctattctctgctaaagatggtgcttcctctacttccccagacccccgtgtctgttccatttccatgaatttttcatcagggtcacaggacaaaggttttagtctttggttctaatgagacctctgacttggctctggatgactatgaaactagtgaatgcatttgtcttttctggaatcccacacaagggaagccactgtggctgctgaggcccagggtccagctcttctctttccctcttggtgaggtcctgggatctcctgaggcctgggaattgctcgaggcctgtgtcacagctggactgaagagtagcagcagctcaaatgtcttttgttgcttgttccccagctttagtcaattattatttttcccttgaagaattgcctctcgttggcatgcaaattgagcataaaagaggtgcccgtaatcccagcactttgggaggccgaggtgggtggatcacgaggtcaggagatccagaccaccctggccaacatggtgaagccccgtctctactaaaaatacaaaaattagccaggcgtggtggcgtgtgcctgtagtcccagctacccaggaggctgaggcaggagaatcgcttgaactcaggaggtggaggttgcagtgagccgagatcgtaccactgcgctccagcctgggcgacagagtgagactacgcctcaaaaaaaaaaaaaaaacaaacaggtgccttccaagaacacactcaaaaaagcagcttcctgttcacaattaaaaacatgattctcctctataaatgtgtgtgtgtctatagtgcagggccctgtactaactcagaaaccatctatcgagaaggaacaggccctcctactctgcaagggctgacagtgagtccatcgctcctgacggagcagggctcctgtgtgcggtttcagtgagtcacctgtccttggcgtcaccaacaaggataaagagcatttatcattcattttgcatatgggttccagacactatgccaaatgctctgtgtgtgcaatagatcattgcattttttttaaaacctattcggttctgatcctgagtccttacctgccaggctggtgggtatgccaagtgtattagtccgttttcacactgctgataaagatatacccaagactgggcaatttacaaagaaaagaggcttaatgaagaacttacagttccacgtggctggggaagcctcacaatcacggtggaaggcaaggaggagcaagtcacatcttatgtggatagcagcaggtaaagagaagagagcttgtgcagggaaactcccgtttttaaaaccatcagatctcgtgagacccactccctatcatgagaacagcttgggaaagaccagcccccatgattcagtcacccccccaggtccctcccgcaacacgtgggaattcaagatgagatttgggtggggacacagccaaaccattatcacccagggcagccatccttgggacttctctctccagagcctggtgcattgagaccatcatccattccctccccaaccccagcaccttccctgtgatgccagtgaccacactgcccctcaggctgagggactgtgctgcttctccacaaccgtaggcaggaggaaatctttggcgaggctttgggagcccatgaccgcttcctcgagcaccctccctgctcattcccctctgaaccagaggacacggtctggaagtagagagggactctcagaggttccccactgttcagggccctttctctccactctcaggcgcattggccttgaggcatctgtcccttggcctcattggacaaccagcattttctcttcaaaggatgtaagtttttacaaaaggtgggaagacgcattgacctgcaactctttctgttttctacttggaaaaatccagaggcaaaaaacacagaagggcctgcagtggccacctgctgggcatggagcgagggaagaatataggcagaatgcgtgtgtgaatattcccaaagatggtccctctgctcaggcatcatctccactctacagatgaggaaactgaggcttgcagcatgatgtaatctaccttagaggtagaaagtccattgtttctcctcgaggctcttccctccctctgaattatgctagaacatggggtttactcatccccaaagttcttcaataggaagagtggggtcccatcaattcgactgtcttgcttttctggttgccacgtggtggcgctgttgtaacttagcccagcgtagttcaaccatccagagtctgggacatgcctccctgatgaccatccctgcacaggcccctgggttcttgagggagaatgatcctagcctcctagggtgaagcttaaccccagtagcatctctttctgctcagcagtgtccatgccagtacagctgatgtagcagtacagctgattagcagtctggactggtccctggtccgcccttcttggatatcatcaaccagggactgagcagctttttccttttagatccttaagacacaactgattttatcttacaaccttttgccagataatggagctattaatattaggttgtaccagaggaaattaccatttagttaggtcaaaaattgttggtcattggccatttcctgtgcttccatttcctgtgctccttcttctgaaaaaggtcaagggcagtgtttcgagatgaccggcttttctcagggagtgagaatcaggcagggagtgaccttgagtgatttctagctgaattcccggcgcctttggtttctgaccacagtgcttaggctcccaggcaatggtaattgacacaagaccaaacagatctcccaaacaaggctttgtgaggggcttatgtttgaacacaagggagagagcgctggagcaaagttctccggctggctccccgaggacaggtctttttggtgttttaagaagggtgggcagggcatggtggctcacgtctgtaatcccagcactgtgggaggccgatgtgggtggattgcctgagctcagaagttagggaccagcccgggcaacacagtgaaacctcatctctactaaaatgcaaaaatttagctgggtgtagcggcatgcatctgtagtcccagctactctggaggctgaggcaggagaattgcttgaacccaggaggtggaggttgcagtgagctgagattgcaccactgcactccagcctgggtgacagagcaagacgccgtctcccaaaaaaaaataaaaaaaaagtgaagaagggtgacgtgaacaagcatgaggtatgggagcgtcgttacacgtgtggggtagagcacagagtgcacaggcacagtgaaaaacatgttagggcatatattgcatgatcaaaaaatggcagatatgcagccataaaaaagaacgagatcatgtcctttgcagggacatggatggagctggaggtcattatccttggtaaactaacacaggaacagaaaagcaaacactgcatgttctcacttataaggggagctaactgatgagaacacatggacacatagaggagaacaacacatactggggcctattggagggaggaggctgggaggaggcacaggatcaggaatgataactaatgggtactaggcttaatacctgggtgatgaaataatctgtacaacacacccccatgacacgagttcacctgtgtaacaaacctgcacttgtgcccttgaacgcaaaataaaagtttatgaaacaaaacaaaacccaaaaaatggcagataagccccacctgggtgggaattttggtattacgatgagccagtgggtgaagatgggtcattctggacttgtgcgtatgcgggcaatagggttaacttccttgaataagatgatggtggaatgctgctaaccttagcttcttcaaggtctcttggtcagcggggatggcactggatggggtatgcaaggtctagtagaatcctggtgggggccaagtcccatccataccctgtctcactttgtcactgaatgaaggagagtggaaactcaacagcctggagtcttagctgttatctgatggttctcaaacttgagtgggcaccaagatcacctgcaaggcagattaagacagatttctaggcttcgcctctggggagtctgatgcagcaggtttgtggtgaggcctgtgaaggggcatttctttttctttttctgtttttgagacagagttttactcttgtcgcccaggctggagtgtaatggtgcgatctcagctcactgcaacctccgcctcccgggttctagcgtttctcctgcctcagcctcccaagtagctgggattacaggtgcctgccaccatgcccggctaatttttgtatttttagtagagatggggtttcaccatgttggccaggctggtctcgaactcttgacctcaggtgatctgcccacctcagcctcccaaagtgctgggattacaggcgtgagccactgcgcccagccaggaaggagcatttctaacaggttcccaggtattagtactgctggtccagagaccacacaatgaagactgctgcattctgccacgcggctgtgtgaccacctcagcccagtgctgttggggctcagaagaagccttccctgagagctggagtggacaaggagggtctcctggcaggggtggagggagcttgagtgaaaggggcagactctagaggccattccaggcaggggcagaattcctgaactggacctctctagggctgagtaggaagtgagtgcagacccaggtggtgacgttcactgaaaacaaggtatgaggagtggcgccatgttgaggagaatctgtcagtcaggtgaggggttgagattttttcctgaaggtaactggaagctagggaagtgctttgtggtttgtttgcttttaaacaagggctgggctgggcacagtgactcatgcctataatcccagcactttgggaggccaaggccggtggatcatgtgaggtcaagagtttgagaccagcctagtcaacctggtgaaactccatctctactaaaaatacaaaaattagcctggcatggtggcgcacacctgtagtttcagctaccagagaggctaaggcaggagaatcccttgaacccaggaggcagatgttgcagtgaggtgagatcatgccactgcacttcagctgggcaacaagagtgagactccgtctcaaacataaaataaaaataaaataaaataaacaagggcttatgcatgccaggaaagtgttctgaagataagggtgaggcactgactggtgcactggaggggtggagggtgccggctggaaggggcactaggggatgttgttgtagtagaggaatggtggccagaaggaatcccaagggagaacccacagaacccggtgactgcctgggtgtgggcggaagaggtggagtcaaagaatgagaaataaaagtaaaatcctaagccccccatccagctgaacagactccctcttggccaaagggaccctaaagaagccttaaaaactaagtttggccgggcacggtggctcacgcctctaatcccagcactttgggaggccgaggcgggcagatcacctgaggtcgggagttcgagaccagcctgaccaacatggagaaaccctgtctctactaaaaataaaaaattaaaaaattaaaaaaaattagccaggcatggtggtgggcacctgtaatcccagctacttgggaggctgaggcagggttcaatctgaggcttgaacccaggaggtggaggttggggtgagccaagatcgagccattgcactccagcctggacagcaagagtgaaactccgtctcaaaaaaacaaaaacaaaaactgagtttggagccctgagaggatggaggtcagacaaccttcccgtacctgctccctcgctagatgatgttagacttctttcctaagggttcaacagaaacaagcaaaccagccctttcgaaagacttgctccaccactggtttcagctagatccccttcccttttgtggtttccacacaacaactgaccagcattccttccacacaagagaccacccaccatggagtggttcagcaccctgagtgccttcgcaccctctgcgtcaccttttaatgtataaagcctaattttagcgcatttaaatgttgtctacaccacaaagtgagcatggggtgtaacatgtccatttgcttactatgcatgcacgcccctcttcatgaatactcatagctcttcctataatctgttgaatgtgtctacttcgcctgttcagcataaattccagtctcaaacttccctacctcaagtgcctgcttccggcttccgctgcaaagcgcggaagcgcttctgtcacttcccagcctgcgggatggatggccagcctgcaggctgcaaccctttattatatatttatttatttagagacggagtctcactctgtcgccagacaggagtgcagtggcgcgatcttggctcactgcaacctccacctcccgggttcaagtgattctcctgcctcagcctcccaagtacctgggactacaggtgcgaagcaccatgcccaactaatttttgtatttttagtagagacggggtttcaccatgttggccagaatggtctctatctcttgaccttgtgattcacctgcctcggcctcccaaagtgctgggatttgcaggcatgagccaccgtgcctggccactgcaactctttataagaaataagctttcctccccaaatttatgaacctcatgattcttcagttgacaagaagatgctaaggttctggatcaagaacccaaaagaaagatccaacattaaacactgggacatctaaagtgagagctaggccatgcgtgagccactgagcccagccccctctgtgtgtttttttttttttttgagacacggtttcgtttttggtgtccatgatggagtgcagtggcgcaatctcggctcactgcaacctccacctcccgggttcaagccattctcctgcctcagcctcctgagtagctgggattacaggcgcctgccactacgcctggctaatttgttgttgttgttgttgttgttgttgttgtatttttagtagagacggggtttcaccatgttggtcaggctggtctcgaactcctgaccttgtgatccgcccgcctcagcctcccaaagtgctgggattataggcgtgagccaccacacccgggctccatctgtgtttttaataagcaccccaggtgattcttctgaggagggaaatttaaggaatggtgagctattgccaggaccagtttatcagaattgactgggatatcagttaaagtacccgtttcctgaacacccccctccccccttgaagagtctgagccagtagatttgggatgagacccctaaatctgtgtttgtaataagaatcccatgagattctcatgagaaagcaagtttgggagacactgaccagggtttacccccaggccaataaggatagctaacttttgtttgcgctttggataattcgcatacagactcatgccccctctcctgttctctcctcttttttttttccaacatatatttactgggcagccattctgtgcctgctcctgcactaggtggtgaggatgcagctggcagcacgcaccatgggagctctgctccggtgggtaaatacactgtagttaaggagttagacattgagcaaggaaacaaatagaacagagacacttttgggtggtgtggaggctctgaaaggtacccagcagggtgtcaagctagagagtaacagggaaagtggctactttagattagacctgccattctcaaagtggggttctggcccagtggtctcagcatcacctgggaatttgttaaaaatgcaaagctttgaccccactcccactcactgaactagaaactcagggtggggcctagtgatgtgtgttttaacaagcccagggatctggcactcctaaggtttgagaaccactggattagatggccagagaaggaggtgatacaggaactgcgtctggaatgacaaaaaggcagacatggaagacctaggggaccaggcattccaggtggagggacaggccttgcaaagggcttaaggaggaagaattccctgctttagaggaatgggtgaccattgaggcagtgagagatggcgaggtgggcaggggcctgatcagccaagcctggaccctgaaggccatggtgaggaacttggatttccttctggtgctggggatgcaagcaagactggggccaggcggtcaaagaaggggcccaggtagagccccaggcagagccccaggcaaatccccaagcaagatgtggtacctggaactagggcagggtttctcaagctcgtttttattgccactcactcctggctgcctgcaaggaagttagagacatttattcctcattgcctttccctctccaagaaagttcaataccacaggaatgctgtatatgtttctgtgctatggcctttgaggccacagactattgtactatctaaggctcttttcacctctcaagaaccaattttcaccccacctagggatggtcttggcccattgagagtgcatggactgagataccagtgaaggtggagaaaatgtgagcagctttccatattttggatatagtggagctagagatgccaggacttgctgatagactggctttagaaggaaaaagaaaaagaggccaggtgcggtggctcatgtctgtaatcccagcactttgggaggccaaggtgggcggatcacctgaggtcaggagtttgagaccagcctggccaacatggcgaaactctgtctctactaaaaacacagaaattagccgggcgtggtggcgcatgcctgtaatcccagctactcgggaggctgaggcaggagaatcacttgaaccctgcaggtggaggttgcagtgagcgaagatcatgtcactgcactccagcctgggcaacagagactccatctcaaaaaaaaaaaaaaaaaaaggggggggggccaggcacggtggctcacacctgtaatcccagcactctgggaggccgaggcgggcagatcacgaggtcaggaaatcgagaccatcctggctaacacggtgaaaccccatctctactaaaaatgcaaaaaaaattagccgggcgtggtggcaggtgcctgtagtcccagctgcttgggaggctgaggcagcagaatggcgtgaacccgggaggcggagcttgcagtgagccgagatggcgccactgcactccgtctcaaaaaaaaaaaaaaaaaaaaaggagggagaaaagaatcgaggaagattcctgaagctttggcttgagtgactgggcaggtgggaccatatgctgagatgtgaaaagcactaaggtcaggtgtgtctgccgagttccacggccacagacctgggctccaggaggaaatcctacgggtgccaggtgaagctgtcaggacaaagtgccgactatcacagacccgggcttgtgctgggggaatcccaggaaggcctggcatctttgagagaaaagcagagttctcctttctgcttcagggacagctcatttcctgctccatgcccagctccttagcaccccagcctttttagggggtcggtgtcttagtccatttaatcaacacgggcccactacacactacaggtcaagctctgggctggaccagaggcacgaagatgagcaagatgtccagtccagtctagagaaacgcatgcaaatgaataattctagaacaagctaaatgccctaggtggggtctctgggagcacaggggcggggagagaggggctggctctgctggggagaaccaggagaggtctccaggggaggtttcttggggctaggtcttcaaaactgagtagaagtagagggttatggggaaaagacagtcccaggcagagaacagctgtccctatcgtagatccacaggaaacagaattttagaaggactagacacataaactttaggacatgtcagagcggctttttttttttttttttttttttttgagacggagtctcgctctgtcacccaggctggagtgcagtggcaccatctccgctcactgcaagctccgcctccctgggttcactccattctctgcctcagcctcctgagtagctgggactacaggtgcccgccaccacgcctggctaattttttgtattttttagtagagacggggttttactgtgttagccaggatggtctcaatctcctgaccttgtgatctgcccgcctcggcctcccaaagtgctgggattacaggcgtgagccaccacgcctggagtttcactcttgttgcccagtctggagtacaatgacgccatcttggctaaccacaacctccacctcccgggttcaagtgattctgcctcggcctccggagtagctgggattacaggcatgcgccaccacgtccggctaattttgaattttttttttttttttagtagagacagggtttctccatattggtcaggctggtctcgaactcccgaccttaggtgatccacctgcctcggcctcccaaagtgctgggattacaagcatgagctactgtgccaggcccagagcttctttacatctgggagataggaggtgtagcataatattaagctcaacctcttggctttttcagaagacaaactcctagttagaacaaaaacatctttggtgtggatagcagcaactatggggaagggtttagaaagatggtttgaaaaaatgaactaaatgggctttaaatggaaggccaggatgtttcttactcctccgtttcactgtcatttgtggaatcggtctgctgcaggctgggcattgggcctagggctacacacatcacctcacccggcagctctgtgtggatggctgtagatgacccaagggggccttatgaggaaatcagggctcagagaggttaaggaacttgttctaggtcacacagacagaatgtggcagggcggggactagaaccgaggctggtttgatccacctgaaacccagactcgtaactgactctcacaggtgtctgaagtgtttgtgttctggtctccatattagaaagtgaaccttggtcaatccttaacatttagttttcctataaacagggtcagttcttagcagaaaaaagaaaaatcagaaagatctaagctgtgttttgcacatcggcccgggccagctcttacagacagagccctgtatttcccaggcggcctgctctgttccttccaaacttgggaggactctaagatcaattcccaggctcctgcccagccagggtgtgtcgggcagagcgcagagcagcctccgcccctccttgtcctgcttctgactcattatttatctttggcaggaagtaaacacagaaaggagagtgggagggagaggaggagtgagctcctgacttttgacgctggctgaaaaggaagatcatgtgctgaattaggtgtgtgtctgttttctgctcctctggtttcaacagagcatttgaggctttaaacaacaggggaagaggagtatttttccattaggagataatacccatttattgtagcaacttggaacatagcgaagagtgcagagtggagaggaaaaaatcaccaatgctcctaccatatgcagacaatggctttcaaaatattagtgttttcctcacactcttcttttttctagttcttttctttattgattgtgagatagctatattttgttaggtggtatattaagtgtgcatatatattataaaaacatattcaaattatatattatacatatatattatataatacacacacacacacacacacacacacccttaaagaaatgtgtgtgtgtggtcaggcgtggtggctcactcttgtaaccccagcactttgggaggccgaggcaggtggatcacttgaggtcaggagtttgagaccagcctggccaacatggtgaaaccccgtctctactaaaaatacaaaaattagccgggcgcggtggtgtatgcctgtggtcccagctacttgggaggctgaggcagaagaatcgcttgaacccaggaggcagaggttggagtgagccaagatcatgccactgcactccagcttgggtgacagagcgagactctgtctcaaacaacaacaaaaagtgtgtgtgtgtgtatataatttttatatatgtatatgcactttaaaaataattaataggctattttcagaacagttttaggttaccgaaaaatcgtgtagctattacaaaagagttcccatgcacacttccctcctccatacagtttcccctattattaacacctcacattaatgtggtatatttgtttcaactaatgggccaatattgatacattattattaactaaagtctatacagtaagttctccctcagtgtcattaatatgttcttagaaactgcaattttaagtgaaatgatgtataatgagaccagtctttttgtcatcattttactgaaactacattgaacaaaaccacattattggagagcctactctataactatttgctcaaagttgcagtttccaagaaccactggacaacattgaggacttactatcgtttacattaaagttcagtttgtgttgtacattctgatgaatttgacaaatgcataaggtcatgtatccgtcattatgatattagtttcactgccttaaaaaccccttaggctccacccattcccctccctccatcctcccacattcttgggaatcactctctttttagtgtctctatagttttgttctaattccttttttattggtatcagatacatactgtgagttgtctgaatttgagagcttgatgaatgcttatagtcctgtatagatctaggtcattttcatcataccagattgttctctcttgttccttcccagtcaatacccctgcccaagagtaacaactattctgacttctatcaccattgattggttttgacagatcttgaactctatataaatggaagcaaatagtatgtatgctttgctctctggcttattttatacacggatacttgttgatttaaaaaaatttttttattgtggtaaagggcagaacataaaatttaccatcttaaccgtttctaagtgtacagttcagtagtattaggtataatcacattgttgtttgaccagtgtctctgtagtttcttagctgagaagctggcatcattgatttgagaccttattaaaatataggcattttagtgctataaatgtcactctgagacctgttttaactgcgtcccacaaattttgatatttctgttttcattttcattctgttcaaatactttacaatttccttctttctttcttcttttactcatggactattcagaaatgtgttattgtttccaaatagttggggattttccagatatctttctgttattgatttctaatttaatttcattgtagccagataagatactttgtataatttgaatcatctcaaatttatgcacagaatatggtctcccttgtacgtgttccatctgtacttgaaaaaaatgttattttgctattattggatggtgttaaaaaagtgttaattaagtcaagttggtcatagtgttgttcacgtcatctgtatccacactgattttctatccacttgttcaattattgagagaggggtttggaaataccagactataattgtggatttgtccattactcctttcagttctagcagtttttgcttcttgtgttttgaagctctgttatttgataaaaatttttagaatttttaatgtttattttagaatgtataaaattttagaatttatatggataaattgaatcctctatcattataacattatgttctttatgcctgtaatattttttgctgcaaaatctactgtcttaaataatatagacacaacagcctgattagtgtttgcatagtacatcttccccttcttccattgttttacatttagcctatttgtgctttaaaaaaatttaagtacctatattgtaggcagcatagagttggatcttgttttattaatgcactctgaaaatctatacttttttttttttttgagacagggtctcactctatcacccaggctgctctatcacaccagtgcaatggtgtgatcttggctcactgcagcctccacctcccaggttcaagtgattctcctgcctcagccccccaagtagctgggactacaggggcctgccaccatgcccagctatttttttttttttttttgagacagagtctctgtcgcacaggctggagtacagtggcacagtctcagcttactgcaacctccacctcccaggtgcaagtgattctcctgcctcagcctcctgagtagctgggattacaggtgtgcaccaccacacccagctaatttttgtatttttagtagaaaacgggttttaccatgttggtcagggtggtctcgaacccctaaccttgtgatccgcctgccttggcctcccgaagtgctgggattagaggcgtgagccaccgcgcccagcttaatttttgtattttcagtagagatggggtttcaccatgttggctagactggtctcaaactcctgacctcaagtgaactgcctgcctcggcctcccaaagtgttgggattataggcaaaagccaccgtgcctggcctaaaaatctgtagcttttaactggagtgtttataacattcacatttattgtgattattaatatggttggtttaaatctatagtcttattccatttttcctccttttttgccttcttttggattattttattagctacaactatttgtgttattttagtggttgctttaagaagtacaatatacatctttaatatctcacaatctactttcacaatgattatatcattttacatttattagaagaggcttacaacaatatgcttccatttcttctgtttcagactttgttctatttggtctttatatataagctacacatcccataatacatattatttgtgctttaatcagccaattatcttttaaaagagatttaagtaacaaggaaaaagagactgtatttacttgcatagttaccattttctgggtgttctttattctgttgtgtagatcctgattaccattttgtattcttttctttttgcttgaaggtcttcctttaacatttcctgaaatgtaggtctgctaggggttattcttttagcttttgtatgtctggaaaaatctttatttcacctggtttagaaaaatattttgtctgggcaaagatttctaggtaggcagtttttttctttcaacactttaaagatattatttctgtattctggctttcattatttccaacaaaattcttacctttgttctttttttctctggctacttttaatatgtttcactttttcactggtttgaagcagtttggttacgatatgccttggtggtgtaggtttttcactgtttctggttttttttttttttttttagacacagtcttactctgtcacccaggctggagtgcagtggcctgatcttggctcactgcaacctccgcctcccaggttcaagcaattctcctgcctcagccccccaagtagctggaattataggcgtatgccaccacacctggctaatttttgtatgttagtagagatggggtttcaccatgttggccaggctggtctcgaactcctgacctcaagtgatccacccgccttggcctcccaaaatgctgggattataggcgtgagccactgccctgaacaccggccctcgctgtttcttatgcttggcattagttgagattgttggatatgttggttaatagtttacatcatatttggagatttttcagtcatcagttcttcaaatattttgtatctcccctcctcctgtggggactctacacatatatttggttacttgaatttgtctcacagctcactgatgcttttttgttgttgttgttatttctttcagtcttaattctctctgtgtttcattttagaacatttttatcgctatatcttgaagttcactaatctttttctctgcagtggctaacctgtcattaatttcacccagtgggttttttattttagacattgcagttttcatctctagaagtttgatttgggtcttttttacatcttccctctgtgcttgacatactcggtcttccctctagcctcctgaacatatggaatacagttataattctggaaaaaaagtctttttatagtaattctattatctgtgtaatttcttggttcaagacaaattatgttattttttttctttgttatgggtcacatttccctgctcacaggctggacactgtggactttaagctttttgggttctggatattttcgtattcctataaatgctattgaactttgctctgggatgcagttaagttatttggaacaacttaatcctctgcatctcgcttcattagatggaacgagagcagtgtttaggtgaggattaatcttccccaatactgagacaaaacctgcctttgtgctcagcagatgccttatgagtgatgaggtactccactctggccggtgggaacaggaattattcccagctctgtgtgagctgtgaggattgctcctccgaaaccttttttttttgagatggagtctcacggtgtcgcccaggctggagtgcagtggtgcgatctcgggccactgcaacctccgctttccgggttcaagtgattctcctgtctcagcctcctgagtagctaggactacagacgcgctccaccacacctggcatttttctgtctgtgtgacctagaagttttttttttttttttttgtatttttagtagagacgaggtttcaccatattggcttggctggtctcgaactcctgacctcgtgatccacccgcctcagcctcccaaagtgctggcattacaggcgtgaggcaccgcgcgggcccaacctttcaggtgttctgtaccttaccttagggggtttctacacctgcacatgccgatcagtcctcccctctctagtattctactctgggaactgcagctgcctcggtctccccagatacacagcttcatctcaagtcagggcgactgttgggctccacctggaacccccttctctgtgccgctttctccagaccttcagtgggggcaacagcaaggcttacctcacctcattgtttattttatttatttttttttttttttgagacggagtctcgctctgtcgcccagcctggagtgcagtggcgccatctcggctcactacaatcttcacctcccagattcacaccattctcctgcctcagcctcccaagtagctgggactacaggtgcccaccactacgcccggctaattttttatattttttagtagagatggggtttcaccgtgttagccaggatggtcttgatctcctgacctcatgatccacctgccttggcctcccaaagtgctgggattacaggtgtgagccactgcgcctggcccccattgttttcttctatctccaggattcctgctcctcctttcctctgtcttccttagcagctaatcctccattagcccaacccttcttgtagttaataattcctcatatgacgttttccaacctaggctctctgaaaacattgaaaagccaccgtatcaagttgctttcttgggttttaaataggaatgcagcaaaacacctggcatttattttggaagaggtggggagacccttctagaaaaaaagaataagagacaagatgccgcgggcaaagttgtttctcttctcccttcaagagctccttgtatcaccgacacttgcagtctcccctctgtcttgctgtgacctcaaatgccaactttgacagtggttaatcttcccaaacttgtctctgcagctgtgttaatgctgggaaggaagctggatgatctttatgtctttgacattgagccagcttggcgcccagtaatgttgactcatccacttttttccccagtttagattaatgggattacagagagacgatctcaacaaaatagactggcaatgaggatttattctaaaaagaaacccttcatcacatttttgagctcaggacataagagctcagtctgagacaggtaacaccggtaacatcttatgcgtcagagaatgccccaaattctctgaaagactttcagtcatcaagagacatttccactatgttccctgttttgtacaatgtttactgtggcaggaaaatgattttaattaatgctaggagtcttatcaagaagggatatagactgggcatggtggctcatgcctataatcctagcagtttgggagactgaggtgggctaattgcttgagctcaggagtttgagaccagcctgggaaacatggcaaaatcctgtctctacaaagcataagaaaattagccaggtttgggtcaggcgcggtggctgatgcctgtaatcccagcattttggaggctaaggcgggcggatcacctgaggtcgggagttggagaccagcctgaccaacatggagaaaccccgtttctactaaaaatacaaaattagctgggcgtgttggcacatgcctgtaatcccagctacttgggaggctgaggcaggagaatcacttgaacccgggaggtagaggttgcagtgagctgagatctcgccattgcactccagcctgggcaagaagagcaaaattccgtctcaaaaaaaaaaaaaaaaaagaaattagctaggtgtggtaatgcatgcctgtagccccagctactcgggaggctgaggtgggagaatcacttgagcctggaggcagaggtggcaatgagctgagattgcacccctgtattccagcctgggtagcagaggaagaccctgtctggaaaaaaaaaaagggatataacaaaaatacgtttaccactctttgttgttcaaaatatcctcatggtgtcaaaataacataaaaacaccaccagaatctagctatacaagcaaaactctcatttgcatttttccatgaagcactagcaagggcttaacttaaaattaagaaatgtttatactcaggtaaatattctaccaaatcccttgatttgggcttattcaagttttaaagatctttattgtgattaaaaacaggtattttctctaatgggatagtagttttatttttggtatttgatcattaagaaaagtctgaatgatcagaaattattatatcagaatgttattggcatgactttatctagacacgtttgaaggacaacagacagatgtgaaagccaagttcattctggctatggggagtactggtgtgcaacaacccagcagtagccccttccagcagccagtctgggaatcacaaaatggggtcattctgttgacttttaggaccccaggagagggttgctgaaaaaaattggttaaaagatagttttcgaattttctttgaaattcagttgcctgtccccatccccacactatgctggataatggattctcaggaatggagtggcacctgaccttgaagtcatatagaagctcgtatgaggccaggcacagtggctcactcctgtaatcccagcactttgggaggccgaggcaggtggatcatctgaggtcaagagttcgagaccaggctggccaacatgggaaaaccctgtctctactaaaaatacaaaaaaaaaaaaaaaaagtgatctgggcgtggtgacgggcacctgtaatcccagctactcaggaggctgaggcacgagaaatgcttgaacccagaaggtggaggttgcagtaagccgagattgcgccactgcactccagcctgggcaacagagtgagactctgtctcaaaaaaaaaaaaaaaaagttcatatgacttgtgtaggatactttggggtttaatccacatccgcatacacatgttgatctccccaataactcttttttttttttttttttgagatggagtctcactctgttgctcaggttggagtgcagtggcgcgatctcagctcactgcaagctcctcctctcgggttcacaccattctcctgcctcaacctcccgagtagctgggactacaggcgcctgccactatgcccggctaatttttgtattttagttaaccaggatggtctcaatctcctgaccttgtgatccgcttgccttggtctcccaaagtgctgggattacaggcgtgagccaccgtgcccagctccccagtaactctttagaatctacacatatttttcagtcatctattgcctggattgctcaagcatcacgtacttgttttgtttgtttgtttgttttctattgaagaatgagcacagcgaagataaaactgggttaaaaatacaaagccaagtctggctgtcctgccaaggtcagtgggctcccaggcttctgtggggagggttgtttggacaagttaggaccatgtgtgtggagtggacacagtgtgctagggttgcaaagaagtttctgaggaggtgtctttctctgtgaattactatgttatcactgttaagacatggcagtttttctctcctattaacattagaattctttcttcagcatggatcagttagaatataaattccttttccaaagtctctggaataggtgatgcctcccacggtgcaggtgtcaacctacgtgagcagttgtcgtgccagtacaactgtcagtttaaaaatatgtatttcttcacttatttatgtatgccatcattcagtcactcattcaacagagcgtagacccagtgctagactaagacataaaaatataaatgagggccgggcgtggcggctcacgcgtaatcccagcactttgggaggccaaggagggcagatcatgaggtcaggagatggagaccatcctagccaacatgatgaaaccctgactctactaaaaatacaaaaaattagccaggcgtggtggcgcgggcctgtagtcccagctgctagggaggctgaggcaggagaatcgcttgaacccaggaggcggagcttgcagtgagccaagatcacgccattggactccagcctgggtgacagactctgtctcaaaaaaaaaaaaaaaaaaaaatatatatatatatatatatatatatacacacacacacacgcatacatgagatgagctcactttaaccttggggggatccaaatcaagaggccatggcaggtactgagagagtgtctgtacacagggcctggggagtggcatgcagccccgggaaggggagcagggggtctcaccatggagacggggaaggagacatcctaccttgggaaggtttgagaactccatgtgttcagagacctgatttggcttttgctctgagacacaaaagagcagttcacatcttcctggttgacaagcagatcccacctgggagaggtgagaggtgagaggtgaacagtgtgttttggaaactatccatgtcgtcctctcaagggcatctgaaatgtccttaccaattcttcttttaatgtaaggctgtgctttccacagtgtgttctgtggcccatcatcctactaaaagctctactgagaaaaaggcaacggaaggtttccaagaaacaaatttgggaaacagtgtatatgtatcttcttgttgactcacgaggcacagtggtttctcaaaggctctgagaaatcctgcggtagaaaagcttgtttaaccgcacttcacctagtgcttcccacattccttggacagaggaagcttcattcttttttttttatgttttttgagatagggtcttgctttgtcagccaggctggactgcagtggcgcaatctcggcttactgcaaactccgcctcctgggttcacaccattctcctgcctcagcctcccaagtagctgggactacaggcacccgccaccatgcccggctaatttttttgtatgttttatagagacagggtttcaccatgttagccaggatggtctggatctcctgaccttgtgatctgcccacctcggcctcccaaagtgctgggattacaggcgtaagtcacagcacccggcatctttttttttttttttttgagacggagtatcgctctgttgcacaggctggaatgcagtggcgtgatcttggctcacagcaacctctgcctcccaagttcaagcgattctcctgcctcagcctcctgagtagctgggactacaggtgcctgccaacttgcccagctaatttttgtatttttagtagagacggagttttaccatgttaaccaggctgtcttgaactcctgacctcaggtgatccacctgcctcggcctcccaaagtgctgggattataggtatgacccactgtgcccagcctaggaagcttcattcttacacacctagcagtcatatattagaagcactgagtttggtttttaaaagcccttcatagagttgtaaactatggagggcatttcctatgtaacttttgttagccattaataattgatgcagaatgacctatcagagttggctcagtcactgaagttcttgaggggactgtttcttaagcagtcttttcagcttgggatggaaaagggaaaaaagagagagttgggagtgggtcaaatacagggattagagtgctggagagaattctgaccattcacaaccacacagcaccttgcctaccagacttatgattgatggagagaaaaatatgcaaagccgaggacaggaataaagacagtgaattgactaggtgactgcagaagcttatctgtgtcactgtgaagatctacgtggtccccgaattaactggttttattctgatttcatgtcaggtaggactgaaaaccttctggagtttcatttcctttctttgggcacggtctcagccttccttctcctgaagaagtcattcgcacaacatatcccatgggccaattcagatcttgacaagccctcagaatgtgtgaggaaatagagcactttggacatcctaaatgttggtggggtttggggagctaattaatcgcaaccctttccaccagactctaaattatgaaatagatgccacagtcagagaaagataagaaagtcaacagtatagggcaacccgctcgggtccctttccacgctgtggaagcttttttctttcgctcttcacaataaatcttgctgccaaaaaaaaaaaaaaagaaagaaagaaagaaagtcagcagtatcatggcaaggttaggctgcaggatgccaaaaccggaatcctcctacctacccccgaaccatccttccccaccaagtcccaagctgcatcagtgcaggtgccatgaaggatggggaaggctggcccagggagctcgtcacgtggcaaatagctgcgagaggagaaggggctgcattgtggtagttcatctcaaggacctcgaacaccttaaccccacccatggggaaactggactcacgggggctggctctccccatatcaccactcggagaaatctcctccaatggacgtgaccataagggggcaaagaatatggcagaagcatcatacttcactgagaactcagaagtgttgggaaagtctctaatttgagggcccaggcaggaatgtggggagctggggatcacctttcagtcctcgaatcctctcatctccaccacagctgctgcctctgttaacatttatttgagttggcagttctcagaggctagtcagtcttacttagtctgtgttctgttgcttatcgcagaatacatgaaactggagcatttataaagaaaaataattgatttcttttttttattgttgagacagggtcttgctctgttgcccaaggctggagtgcagtggcatgatgtcagctcatggcagcctccgcctcctggattcaagcaatcctcctgcttcagcctcccaagtagctgggattacaggtgcctgccaccacaatttttgtatttttttatttttagtagagacagggtttcaccatgttggccaggctggtcttgaactcctgatctcaggtggtccgcccacctcggcctcccaaagtggtgggattacaggcgtgagccactgcacctagcattgatttcttacggttatggaggctgagaagtccaagggcaaggggctgctcctggtgagggcattcttgctggtggggcttctgtagagttatgaggtggcgcaggacatcactggtaaaagaaatgagcatactagctcaagtctcccttcctctttgcataaagccaccatgataacccagtaatccatgaatggattaacctattcctgagggcagggccttcacaacccaatcaccttcacctcttaaaggcccccacctttcaacatgattaagtttggggattaagtttcagcgggagtttgaaggggaaaacattcattcaatccattgcactaacccactggctttcattctaccccggctttccttttccagaaggcacaccggaatgcaacgagtagcagtgatgatgttatgttaggaaatcttctaatcttttgaattatagtaatttatgaaaataacaaatcattcacaggctttagtactttataattagtcacaaattacttgcagtgcatgccctgacacattagacctaccagtgagtgtagaggtgtgtgattgagaagtgctgccttaactttgtttcacagaagtattaaaaaaaaaaaaagtactttgccttttctgggcctcagtttcctcatttgtaaaatgagaggtttggactaatgaattactggaatgctatgcttgatggaagaaaagaatgttcatgatctgggccgggtgcggtggctcatgtctataatccgagcactttaggaggctaaggcggacggatcacttgagctcaggagttcgagaccagcctggccaacataacaaaaccctatctctactaaaaatatgaaaattagctgggcatggtggcaaaggcctgtaatcccagccactcgggaggctgagacacgagaattgcctgaacccaggaggcggaggttgcagtgagcagagattgcgccactgcactccagcctgggtgacagagtgagactctgtctcaaaaaaaaaaaaaaaaaaaagaatgttcataatcttctagtgaaacaaccacgatttgggtgcatctctgtatatttagtatccttgatttgggttcagttgtttctgtccatccttctagccatccatcctggcactcactcgtacattcatatatcaacaacattttattgtttgttatatgccaggcaccagggatatgatattgaaaggagactaggacctggcctccattacactccaatagggaaaacagtcaccaaccatagtgatgggaaccatgactagcgctaggtgggcctgtgaaagaaactgatctgggagcccaggccagggaggctaccctgagaagcgaagagtggagctgcaacctggtggggagcagagggctgcaggctccaggcagatgcatggctggggagcttcatgcggaatgaggcaggagagggaggttggggccacaactgagagcaaagcgaagccacagtggggtgacaggagcagactttgatttctaagctgttggtctggccacagctggcagaacagaatgaagggggccagagaggatgggagaagggaatgctgcacttgttcggtgagaggctggtgcaggcagccagtacaaggcaacgggaggcagcgccacagggctcaatcttgctttgcgttaccggctctttgaccctgggtcctgtcttgaacttcttcgggaaaatgtccttgtgtgtacaatggggccacccttctaccaggctgttgtgtggattaagcgcaatcgtaactgaaaagtgcccaggccaggctcagtggctcactcctgtaatcccaacactttgggaggccgaggcgggcagatcacctgaagtcaggagttagagaccagcctggccaatatggtgaaatcccatctctactaaaaatacaaaaattagccgggcatggtggtgcacgcctgtagtccaggccactcgggagactgaggcaggagaattgcttgaactcaggaggtggaggttgcagtaagctgagattgtgccactgcactccagcctgggcgacagagcgagactccatctccaaaaaaaaaaaaaaaaaaaaaaaaaaaaagtgcccagagggtctggcctgagtcagtgtttagtacatggcaactctctatctttacggctttgctttatggttttgccgactcctgaaaacctggtcgtgcaggggccatgtttgtgttttctgtagctggcctccttcctccctttaagcattgcatgtgtgtgtgtttccagaactatgcatttaagaacccatctgcatccccatcatctgctcagaccttggttgtggcagatgaccccctgccagcccctgcccatgcttctcccttcactgtgctgtgtacatctggtctgtgatggaggctctagtccctgggccctccctgacctccacacagaggcagtgcccccagagggtgaaaggcttccattcggggtgctggcctgcggattctgagcagaggctctatcccacacatttcaactcaatctcgaagcataaaaggatattatgtaagcttcaactaatgcacagccctcaacagatcagttcttagaatttttcctgcccttaggcagatctgctcctggtgagcagctttaatctggctttaaaaattacttctgatggataatcaaagagattgctggtacccagcttatgctaaataaaccaatgtctgggttcttatttgggaggagttgttgtgtgtcccatactccatggaaaatttgttcctggttgctttctgataagaccgcacaagtttacaagatgccaaaatataatttatcatcttgttccagatggtaacgacttcagccagcctgaagggaagccacatcctttcctaagttggcagttcctgtcagaggcgtggacaagaaagtggcttcgtttctttccagcttgataaagccgacataaataggagcacttcatttctgaattacacaccattactcttatcacatactaaactgtttgacttcagttaatgggtgggacataatgaaatgtaaagtgcttgttacaaggaaaattgccaggtccagatgctgagcagcgaagggtgggggaggaggcatcgggtttcgttctggacctggtgctttccagaaagccaggccaagacactttatccaaaccccaagtagttttccagatgtcagcccactcgggccagggctctccatgggcccatctgtcttccgtgaccatttgtgaatcggagggttttatataatttaccctctgagttttctcttttttggcctactcagctctgcttttgggtcagaaaatgcaaatctggttgagacagtagccagctctcttttgggtcctcaggcaccattcccatgtcctatgtgcaggaacaggcattagataaagatgagtgcaggggtggttctgtgtacatgcctccttcagggatgtcaaatgacgccgcgtgtacttcagaggtgaggagcaggacagagaggctggaatggggctgggggaagaggctcttgccttccttggaagtttttattctgcatagcagagtgaataagaagattgtgtccagtggaatcagatgtccatgttgagatccatgcttagcctctgttctccagggttctcatctgcaaatggcatgggtggtacccaccttgcacagctgttggcagggctaaatgagataatccacacaaagcactgaggcctagtgaatttcatctgttattattttcccaactttttgttttggaaaaactgaaacctcaaaaatgttgaaaggatgggacagtaaatacccacctgtctatggtattagtctgctcgggctgccataagaaaacaccacaacttgagtgacttaaaatacagaaatgtattttctcctggttctggaggctggaagtcctggtcagggtgctggtggagttggtttctggtgaggcctttcttcccagcttgcagaagacacctgcttttgatgttctcacatagcttttcctttgtgtatctgcattcctggtgtctcttcctttcctttttttttttttgttttttttttgtgtttttttgttttgagacagagtctcactctgttgcccaggctggagtgcagtgacatgttctcagctcactgcagcctcaacctccagcactcaagtgatcctcccacgtcagcctcctgagtagctgggactacaggtgtgcaccaccatgcccagttgattttcatatttctttttagagatggagtttcgccatgttgcccaggctggtcttgaactcctgagctcaagtgatctgcctgcctcagcctcccaaaatgttgggattacaggtgtgagccatgcacccggcctcttcctcttcttataaagaacaccagtcctatcagattagggcctcactactataacttcacttaatcccaactgcctccttaaagtgcctgcctccaaatacagtcacattggggattagggcttcaacatatggatttgaggggggcacagttcagttcatagcacatattttaaaaatttaacaataatgcacttcaccatctcactgtatgcatccctcatgtatgaatgcatgtgcactgcctggtgtggaaaactggaattttggtagcggacattgagaggagaatctttccactagccccctccagaacgctgtgggcttatgtgtgtgtgaatatgtgtgcatgtaacaaacagttacaaaaagattccataaattttcctttgatatttcccctataataactttaaagaaaatggtaaaagctttagaaaaaccatacttatgttaactttgtcttgaggaatttctcttgttaatagaatatatatgatcataacaagtatatagaatcacaattatgtaaaaataacaagaattgtacccccaaacaattgtgtaggaaaaatcaggaaattcactagaactctgaaagtggcaagcatgtagcagtattttttctgatttttttttcctacattttccacactttgtgttggccacatattatttttaaaattaaaaattgcacagcattgactaggcgtggtggctcacgcctgtaatcccagcactttgggaggctgaggcgggcagatcacgaggttaggagatcgagaccatcctggctaacatggtgagaccccatctctactaaaactacaaaaaaaaaaaaaaattagctgggcgtggtggcgggcttctgcagtcccagctacccgggaggctgaggcaggagaatggcgtgaacccaggaggcagagcttgcagtgagccgagatcgcaccactgcactccagcctgggtgacagagtgagactccgtctcaaaaaaaaaaaaaaaaaggcacagcattaaaactgtgtagaattgagcaacatagtccaaatacatcatgtaataagccattttataataactggatagttagttatctgtagtaagttcaaaattcagagccaagttcccccaagttccctgagtgtttcactttttttcgccacacattacccagataagtgttcaagttaagacaaatatgggtatgaaggtgattcagctcccaagatttatacataggtcacgtgcggaaattccatagccaaatataaatgattttggggttatgcctgtccctgtctcacctgttaaatgtgaagaatcaagttaactattaccaggaatggctctttatttcaaagcctggctttgccaacttgtgctttttcctgaacatctaaggatccccaggggtgctggagacctgcctgtaatcttcacaggactggttcaaatcccctgttatgatttactcttattaacaactttctgagttgtcagcacggtggctcacgcctataattccagcactttgggaggctgaggtgggaagattgcttgagtttgagaccagcctgagcaacatggcaagaccccatctctacaaaaaatttaaaaattagctgggtgtggtggtgcaaacctgtggtcccagctacttgggaggttgaggtgggagcactgcttgagccgaggaggcctaagctgcagtaagctatcattgtgccactgcacctcagcctgggtgacagggcaagaccctgtctcaaacaaacaaacaaacaaaacctttttgggtttcccacattttatactactataaatgagttgccacatttctctattcactgctgatcagcatggaaggcccacactgagtgtttgagataccctgcagtggtttttgggggaaacgagggcatgcataatggttatgggaggggtgcagggggctctcacagagaggaatgagctgcatgaggatgctgtgtctgtggttagggcacttgatgcccttttgtgggggtgggttggggggtgacctgcctgcagtgtggctctgtccttggcatccatgataaccaatgaaacattaaatattttcagcattggcagcgttgggcttggaggcttctgcaccgcttctgagagttctgccagcctggatccatgccttgtgtccccagaggtgactgagccaaggaaggacccacagggagccagggggccagaaggttctttgctgcccagcccaccaccgtcccaggagcgagagcacccctcgtcctccatgccctttgccgagtgtcccccggaaggttgcttggcaagtccagcagcggcacctgaagatggtcctcagactcagtctcccaggagggaacctgccccaaatgccccaggagacatcgcggcggcatttcccgctgagagggacagctctactccataccaagagattgctgccgtccccagtgctggaagagagagacagccgaaggaagaaggacagaagtcctccttctccttctccagtggcatcgaccagtcacctggaatgtcgccagtacccctcagagagccaatgaaggcaccgctgtgtggagagggggaccagcctggtggttttgagtcccaagagaaagaggctgcaggtggctttccccctgcagagtccaggcagggggtggcttctgtgcaagtgacccctgaggcccctgctgcagcccagcagggcacagaaagctcagcggtcttggagaagtcccccctaaaacccatggccccgatcccacaagatccagccccaagagcctcagacagagaaagaggccaaggggaggcgccgcctcagtatttaacagatgacttggaattcctcagggcctgccatctccctaggagcaattcaggggctgccccagaagcagaagtgaatgccgcttcccaggagagctgccagcagccagtgggagcatatctgccgcacgcagagctgccctggggcttgccaagtcctgccctggtgccagaggctgggggctctgggaaggaggctctggacaccattgatgttcagggtcacccacagacagggatgcgaggaaccaagcccaatcaagttgtctgtgtggcagcaggcggccagcccgaagggggtttgcctgtgagccctgaaccttccctgctcactccgactgaggaagcacatccagcttcaagcctcgcttcattcccagctgctcagattcctattgctgtagaagaacctggatcatcatccagggaatcagtttccaaggctgggatgccagtttctgcagatgcagccaaagaggtggtggatgcagggttggtgggactggagaggcaggtgtcagatcttggaagcaagggagagcatccagaaggggaccctggagaggttcctgccccatcaccccaggagaggggagagcacttgaacacggagcaaagccatgaggtccaaccaggagtaccaccccctcctcttcccaaggagcaaagccatgaggtccaaccaggagcaccaccccctcctcttcccaaggcaccaagtgaaagtgccagagggccaccggggccaacggatggagccaaggtccatgaagattccacaagcccagccgtggctaaagaaggaagcagatcacctggtgacagccctggaggaaaggaggaagccccagagccacctgatggtggagacccagggaacctgcaaggagaggactctcaggctttcagcagcaagcgtgatccagaagtaggcaaagatgagctttcaaagccaagcagtgatgcagagagcagagaccatcccagctcacactcagcacagccacccagaaaggggggtgctgggcacacggacgggccccactctcagacagcagaggctgatgcatctggcctaccacacaagctgggtgaggaggaccccgtcctgccccctgtgccagatggagctggtgagcccactgttcccgaaggagccatctgggaggggtcaggattgcagcccaaatgtcctgacacccttcagagcagggaaggattgggaagaatggagtctttcctgactttagaatcagagaaatcagattttccaccaactcctgttgcagaggttgcacccaaagcccaggaaggtgagagcacattggaaataaggaagatgggcagctgtgatggggagggcttgctgacgtccccagatcaaccccgcgggccggcgtgtgatgcgtcgagacaggaatttcatgctggggtgccacatcccccccagggggagaacttggcagcagacctggggctcacggcactcatcctggaccaagatcagcagggaatcccatcctgcccaggggaaggctggataagaggagctgcatccgagtggcccctactatcttctgagaagcatctccagccatcccaggcacaaccagagacatccatctttgacgtgctcaaggagcaggcccagccacctgaaaatgggaaagagacttctccaagccatccaggttttaaggaccagggagcagattcttcccaaatccatgtacctgtggaacctcaggaagataacaacttgcccactcatggaggacaggagcaggctttgggatcagaacttcaaagtcagctccccaaaggcaccctgtctgatactccaacttcatctcccactgacatggtttgggagagttctctgacagaagagtcagaattgtcagcaccaacgagacagaagttgcctgcactaggggagaagcggccagagggagcatgcggtgatggtcagtcctcgagggtctcgcctccagcagcagatgtcttaaaagacttttctcttgcagggaacttcagcagaaaggaaacttgctgcactgggcaggggccaaacaagtctcaacaggcattggctgatgccttggaagaaggcagccagcatgaagaagcatgtcaaaggcatccaggagcttctgaagcagctgatggttgttccccactctggggcttgagtaagagggagatggcaagtggaaacacaggggaggccccaccttgtcagcctgactcagtagctctcctggatgcagttccctgcctgccagccctggcgcccgccagccccggagtcacacccacccaggatgccccagagacagaggcatgtgatgaaacccaggaaggcaggcagcaaccagtgccggccccgcagcagaaaatggagtgctgggccacttcggatgcagagtccccaaagcttcttgcaagtttcccatcagctggggagcaaggtggtgaagccggggctgctgagactggtggcagcgctggtgcaggagacccaggaaagcagcaggctccggagaaacctggagaagctactttgagttgtggcctccttcagactgagcactgccttacctccggggaggaagcttctacctctgccctacgtgagtcctgccaagctgagcaccccatggccagctgccaggatgccttgctgccagccagagagctgggtgggattcccaggagcaccatggatttttctacacaccaggctgtcccagacccaaaggagctcctgctgtctgggccaccagaagtggctgctcctgacaccccttacctgcatgtcgacagtgctgcccagagaggagcagaagacagtggagtgaaagctgtttcctctgcagaccccagagctcctggcgaaagcccctgtcctgtaggggagcccccacttgccttggaaaatgctgcctccttgaagctgtttgctggctccctcgcccccctgttgcaaccaggagctgcaggtggggaaatccctgcagtgcaagccagcagtggtagtcccaaagccagaaccactgagggaccagtggactccatgccatgcctggaccggatgccacttctggccaagggcaagcaggcaacaggggaagagaaagcagcaacagctccaggtgcaggtgccaaggccagtggggagggcatggcaggtgatgcagcaggagagacagagggcagcatggagaggatgggagagccttcccaggacccaaagcagggcacatcaggtggtgtggacacaagctctgagcaaatcgccaccctcactggcttcccagacttcagggagcacatcgccaagatcttcgagaagcctgtgctcggagccctggccacacctggagaaaaggcaggagctgggaggagtgcagtgggtaaagacctcaccaggccattgggcccagagaagcttctagatgggcctccaggagtggatgtcacccttctccctgcacctcctgctcgactccaggtggagaagaagcaacagttggctggagaggctgagatttcccatctggctctgcaagatccagcttcagacaagcttctgggtccagcagggctgacctgggagcggaacttgccaggtgccggtgtggggaaggagatggcaggtgtcccacccacactgagggaagacgagaggccagaggggcctggggcagcctggccaggcctggaaggccaggcttactcacagctggagaggagcaggcaggaattagcttcaggtcttccttcaccagcagctactcaggagctccctgtggagagagctgctgccttccaggtggctccccatagccatggagaagaggccgtggcccaagacagaattccttctggaaagcagcaccaggaaacatctgcctgcgacagtccacatggagaagatggtcccggggactttgctcacacaggggttccaggacatgtgccaaggtccacgtgtgccccttctcctcagagggaggttttgactgtgcctgaggccaacagtgagccctggacccttgacacgcttgggggtgaaaggagacccggagtcactgctggcatcttggaaatgcgaaatgccctgggcaaccagagcacccctgcaccaccaactggagaagtggcagacactcccctggagcctggcaaggtggcaggcgctgctggggaagcagagggtgacatcaccctgagcacagctgagacacaggcatgtgcgtccggtgatctgcctgaagcaggtactacgaggacattctccgttgtggcaggtgacttggtgctgccaggaagctgtcaggacccagcctgctctgacaaggctccggggatggagggtacagctgcccttcatggggacagcccagccaggccccagcaggctaaggagcagccagggcctgagcgccccattccagctggggatgggaaggtgtgcgtctcctcacctccagagcctgacgaaactcacgacccgaagctgcaacatttggctccagaagagctccacactgacaggtacttaaatgaaaaaattcccacgggaatgtgtggtcagtttcaaaggtgattcccagcctgatttttagaagtcagtcgcataggtgagtggttttctaaaagctgagttttccatatctaattgctaaatgaacctgcttaccccctctggatgtcctgaggctctgaaaaatgtgagaaccatggttggaggctgggagctgttgactatgttctttttcttgtgttccttaattcatctaacttaaaccactggaaaagtatcaactgtttactggctggctgtgtactattaagtgataggttatagtcagtcatatatttttctggagtccagatacatctgcttttgaatctggatttatttagtcagggggccctttttcctagggatttttttttttgtagtagccacttaaaactttaattgagaaatctgctttttcaataggacatgaggagaaatgccttactatctacattatcctattaattgctttcttttattatcccagagagagccccaggcctggcccatccatgttaccttcggttcctaagaaggatgctccaagagtcatggataaagtcacttcagatgagaccagaggtgcggaaggaacagaaaggtcagcgaaagatattggtctttggaaggccatgatgccttccttagatacagacacactggatgttttggaaaggagagtagtccttatacagcatgagttcctacataagaaagaagcaaatggccattcccgttttatgtacaggtacagcagtacctgggatgactaaaagctccattgttggaaaagggattgaatgagttgctttcatacttgagtttattaccttaaatttaaaaagtcagtctgggtgcggtggctcatgcctgtaatcccaacactttgggaggtcgaggcaggaagatcacttgagcccaggagtttgagaccagccacatggtgaaaccccatctttagaaaaaatacaaagattagccgggcacagtggcacgtgtctgtagtcccagttacttggaagtctgagttgggaggatcgatcgtttgagcccaggaggtgaaggttgcagtgagccgtgtttgtgccactgcactccaccctgggtgacagagaccctgtctcaaaaaaagaaaagaatctttattgagatgcaattcatataccacataattcactcatacaattcagtggcttgtagtatattcacagtgtgtaaccatggctacaatcaatttcaggttattttcatccccacagaaagaaaccctacagcccctagatatcataccccagcccccacacccgccgcatcatctctaggcacccattcatctagttcattacatcttgatgcaaatgggttcaatgctgatttagtctccgaagcaggaatggctcaccaacagcggtcacactccaggagatctcgagattcaaggagggtaaatgtaaccacgaacagtgaccttcacacttgcagtgtgcctgcctgttcttttctacatgaaatgccacctagtgttatgcagaagctgctgctcaaggtttcatccttttggggaaatggtgatattgtgcacgtacacagacacacagtgaacaagctttccgcctccctaggcctttggctgttctggtgctgtgtgtgcacacatatacatgcatacaacacttgtgtgtatgagtagggtggaatcagactttaaattagtacctgtgtaccctaccaaacagctgcaggcattttataaatgatctgattcatattttgcacattcagaaagaatgcacgatcacctgtttttcgagtctgaacacttccactgacacccagctgcctctgccgcctggcagtagtgactcccatagctctgagccaatgtggatgtgggcatgtgctggccaaacagatgcaagtttaatctgcattggacacccttttttgctactgacttaggatacaatttcctgcagcctttgctgttatgtattttttatattcccagttaaggggcaggagaaatatctgtctagcttggaaaagtcttccccaccccaaaaatgaccatatcagtgccttctttttcagagtccttaaacatgttagcaccttcttggagaaggcagggccagatgtatagtagtacaataaatatttcatgacttgttgttttaatcactttaaattgtaaaattaaaatttataaattagtattataaattatagttttttccagaatacttgtgaggtatggaaaagtagatacagaaggggcaggtgtggtggctcacacctgtaatcccagcactttgggagaccgaggcaggcagatcacaaggtcaggagatcgagaccatcctggctaacacggtgaaaccccgtctgtactaaaaaatacaaaaaattagctgggtgtggtggcgggcgcctgtagtcccagctactcgggaggctgaggcaggagaatggcgtgaacccgggaggtggagcttgcagtgagccgagattgcgccactgcactccagcctgggtgacagagtgagactctatctcaaaaaaaaaaaaaaaagaaaaaaaaaaaagaaagaaaagtagacagagaaaaattcacaaccacaatacctaccaattattattgcgtattttagtatattttcattttagcagatttttagtgccatcaaagcactctttagtgtttttagtgctgtcaaaactctttaaaaacaaatccttaaaaaattatttatttattcatgtatttatttatttttagacagggtctcactctgtcacccaggctggactgcagtggcacaatctctgctcaatgcagcctcgaccaccccaggatcctcccacttcagcctccctagtagctgggactacaggtgtgcaccaccatgctcagcttatttttaattttttgtagagatggggtttcaccatggtgctcagcctagtcttgaactctgggctcaagcaatcttcctgcttctgcctcccaaagtgctgtgattacaggcatgagccaccatactcagcctacaaacagatcttcatggctgaaattgcatgactgattatggttttaacagcaatggaaatttaggttctgatggtgttcctattcactttgctcctgctgagacttttgtactctctagagctgctcggtctagcatagcagcccctggctacgtgtggatggagatgtgctgtaagtgtaaaatacacacccaatgttgaaaatttagtatgaaaaaaaaagaaaatacatcactagtcattttgaatataatgttaattatatgcaaaataataatattttggatctattgggttaaaatgtattactaaaatcaacttcacttatttcttttttctgttttttcaatgtggctccctaaatttaaaaaatgacatatgtggcttttgaatacctgggtcacattctatttggatcacttgcccctagaagctgcttttccctggtctttgaaggaaatggggtcataaagagttggccttccctgtgctttaggctcttggggaaaaggcttcctaacattggttgagggtttctggaaaaaattcggattggactctctcatccagcctggcaggttgggaatgcttctttctcttgaggcagaggctctgaacttcttgcttgtgaacccatccaccatgaggaagccgtgcacgtggacctgggctggtctcggaggaagtcctgccaggccaggggctgtacttcctaggaggggcaggtgttgcctttgaaggtgaaaatcagcagcggtcttggggaggctgggtgaccagacttcggtgaacactgccaggagctgtggtggcgatgaatttcagggacaggtctctgaattcacaccccagctctgctccttactaattacatacctaacctcagtttgttcatctgtagaatggggatgacaccaattgtacctgcctcaaagaattgccatgagggttaaatgagatccttgattcaagcgctggagcgtgcccattctggtgcccagtgggtgttagattccctgttgttttgtgatgggcatttctggtgcagtgacctgcacgattatatctctcttcagggtggagatggttttgggatctcagtctgttctcctgaggttgaaacttcaacctggctgtctttcttttccagcgttgaattctttctctgctaaaatatttcaatggctgaggagagtgaattcttttttaccccctactgcacagcccagagtgatctgctacaagttaaaaattttgagattgtgtttcactgtaacactttgagtatctttgtgtaccatattatattgtatttcaccatcaaaacactgtttcaagttacctccagaagagcaaagcaaagcaaaaccaagttttctattatcttgctagttatcaggtgacatgcttctgtggattgaattttgaagattctgccaatttgaatagggctgatatcacatataagattcaatatctaagaaatgtgtctttttctattttgatgacaggatagtttgataacccatctcatacacatgtacatgaaggtagcataaatttgtttactgctttattgtccatcttatgaagtcaaattggcattgctaatggatgtggcatggatatcctgtggctttgcctacctccagccacacctcacacccatgggggtctgtgtgtcccccactctgagaaacaggcactcttctcactctgagaagcaggaactcacaatgcatagaaatgtatagaatgaaatgtacagagagtggctgtgcatttctgtacattgtatgatcctccctgtggaagagcctgggactcagagacagcctcatgttagtttcaggttgttctgcagaaggtgcttgaatcaatttcacctacgtacatatacaactatcttccctgttagtggaaggtctagaatttggcattttggttacatagcactaatgttcagatgtgtcgttctggattaatcttggatatcaccaagcttgtcgttgctgaatatgtgtttaaaaggagtcgttctctctttgtctctctcttttttttttttttccatttagggaaatggttggaaaggtattttcaagtattagtggattttaagaggatcaaattgttcccagatgcttagggtctttgtgtaaacctaggctgaatggggaagggcaattggattgaaaagtggagggagggaggacagagaggacagctggcctcccattaaggaagccctggctggacctgaaagcctcactggagccgcttctctcttgtcctcccatgcctccttcccatttggtctctgtttcttccttttccctccactccgttctaaaattaccagctgtgacaccatgttttcaagtttaagaataagcttttagaggatggctacaactgtataaattaaggaaaagagaaaacaacattgaagcatggttctcttagcagataaagccaggacaacagacctcacccccgattttatatgacataggaaatcgacacttggtaatgtcacttacagcaatactcttctcagatgggaggcagttaagttagacagatgcattcacatctcattggcctcttattggcttcgttaccttggataagctgcttaacttttccatcctcagtttctctctctataaaatgggaagataacatctctcttttaggattggggttaggataaaattggaatgtttccaaagctcctgggataatgcctggtatatggtaaatgtatgattacaatggtaactactcttgtaatttgaaatgtatttcttcgaaaccatcctggaaattaagcaaaaggaggcaatgcccaagatctccaaatgaaatggtaacagaccctgcaggaatctgtagacgcagaaactggatgagcgtctgtctccagcccttccacgtctctgagcctgtttctgtctgtcaagctgggggctccacgaaccctgcttggcccacaaggagctccttatgtgaaatgagatcacagaatcaaaagtacttaggaaactaaagcctttacaaattgtgttcttatcaatagcttcagtcactataaacaatcatataccaaagtcaaggagcctttggaaatgcagcctttatgtgtttcataagtaaaatgaagcatctgtgtttcataagtaaaatgaatttcctgagaggtgaatctgtcatttggaaaagcttcaagtatctttatttatttattttagagataaggtcttgttttgtctcttaggatggagtgacttggtgagattatagctcactctaacctccaattcctggggtcaagcaactctccagcctccgtgcctcccaagtagctgagactgcaggtgcgcgccactacacctagctaattttcaacttttttgtagagatggcgtctcactatgttgtccaggctggtctcgaactcccagcctcaaacaatcctcccaccttggcctcctaaagcactgggattattataggcatgagccaccatgcccgaccctctaaatccctttgaaagtgggttcatgaagcatctgcacaaagggcggctgcctccttggtggcaggggctggattcactgtcttcaggtggctgggacaggcatgccaccaccttggcttctggctctccagagcttgggagcctctctgccgcttgtcccctgttcatgctgcacttgaacccacagcatggaagagccgctcactgccacttcaaagtcaagggccagtttcattcagatcaaggtgatgatttcccaaattgaatgtctccaagctgacttgctcctctctgagaacttctcattatggccaccggtagaagccactgtgtttgacctgggtttgggttttgtttcagcagcaatgtttgagagatgaatattttacactctagctggtgagagctgcaaggaaatgtgggggcattcttattgagctcccccccaccactttatggaggaggaaactgagtctcagaatggggacaggactagggggctaactagctgcagagacagacctgggttttggcccctgatggcaagtttccccccagatgcctgtgctgaactggggaccctccttaggagggggatggggatcttcctttcaccaatgccagccaccccaattctgcttctaggcttttgagaaaagaccatatgattctgaggtctagggtgtgacaagcacaggcctcaagagttgacagggctcaggttctagctctgtgatcctggggccatcgccttgcggggcatttgactcacccgtaaaatggagcaaatagtactcccttacagcgctgttaaaattaaatgagccactttattgagagcacctgccacaagtgctctgtataagttcctttcatttattccccactctgggccaatgtacttccacactgcagcatcgtggttctttctcacctcaacctgtaggtgggtgctgtttgtgtaccccttttccagatgaggaaatggaggctcccaatggtgacatggcttggtcaaggtcaaaaagctaataagagttggaactagaactagaacctcaaggcttttcagacatcagatctacgttcagaacgctgatcattctcttactagccaggtggagtcctggggaggcgccctgttccctacagcaacgctgtccaccgacggttcttcagtggtgggaatgtcctgtgtctccactctccaatacagtcgctgctggccacaggctgctagcgagcacttgaaatgaggctggtgccactaaggaaccaaattgttaattttgtttaatttcaactaattgaaatttatagtgaaatacccacatggggctgtggcttccacacaggacaacccaactggaagccactgtgtctttgcattacgtcagaggctaatccttgccatcagagccagtgggtgtggtgaggctctgtgtgtgaggccctggacatttctcaagcacctgctggtgctcggtgagtattaggcgccccttcctcccgctggctggctctgtaagtggggagaccaagtggttgtgtctctagaatggaggctgaggtgtgttcgtggcacatctgcccagtaatgcggatcagcaggaggtgtctttcctgcacccaaggaggcctcccattgcacctgggggcttggcttcacctatgtgacctcacatccaggcctgcgcacccgtatctgagctggcattgtaagaagccctggatggccccatgaactggctcctgacagcagcgcttgtggcaaaccctccctgcccacaaaccccccggtggccacacctacaagagtgccccttaccggccaggcgcggtggctcacgcctataatcccagcactttgggaggccgaggctggtggatcatctgaggtcaggagctcaagaccagcctgaccaacatggtaaaaccctgtctctactaaaaatacaaaattcgctgggcagggtggtgcatgcctataatcccagctacacaggaggctgaggtgggagaatcacctgaacccaggaggcagaggttgcagtgaactgagatcgcgccattgcactccagcctgggcgacagagcaaaactccgtctcaaaaaaaaaaaaaaaaagactgcccctcaccagactgggagggagcccaaatgggcagacatgtggtttttccactgatgtctctgcactgttcttgtcccgaaaacctggcaggatgaggaacaggccccagcttacagcatctcagccccttctttcttctctgctttcttaatgcctgttagtccagtgttaaatattttagcagcctgatgactcagatgtagactgtgaaagtgtttctttttccagggaaggcactggaacaggtctagttactgatgctcttaatgccctttccttttgcaagcctggccgagggtgtttaggaataaaaacttgcctggttgctgggcacggtggctcatgcctataatctcagcactttgagaggctgaggtgggaggattgcttgagcccaggagttagagaccagcttgggcaacatagtgagactccatctctacaaaaagaaaaagaaaaattagcgtggtgtggtggtacatgcctgtggtcccagctattcaggaggctgaggtgggaggatcgcttgagcccaggaggtcgaggctgcagtgagccaaggtcataccactgtactcctgggtacagcctgggtgacagagtgaggtactgtctcaaagaaaaggaggaagaagaaaaagaagaagagttggaggaggagaaggaggagaaaagaagaaagaagaagaaactcaggggaagggagtctatgtcccgagagagggcagggtgcgcctagcaaggaccccaatgcacagtggatttgggtcagcactcagttttcaggccaggagtacactcggtgggagaagagcggggctctgaagtggccccaggggacggggagggccctgggagtaggagggaggagaaatgaggctgaggatgagatcaagctggaggctagggttggtaggcggccggagtttaaatcctggctcccactggaggggtgatgctgggtgctattaggactgccccaagcctcagcttctttgcaggtaaatggggctgacaatgtctcctgggggtaaaggagggttacagtggggagaagatgagatgagacacggcacacccgacacaaagtcagcttgcagtggagacttcgtggacaaggtccctgagctgcaggggggcttctgggcaactccatccccacagccagctcagcagccacccagcaaatgtgcacccaagccaggcacttggaaggagaagccgagggctctctcaccggggaagagctgagatgggctttcaggacacgctgggtacacgctcctctgctagaaagaggtttggggtaaatggttaggtgggtaggtaggtaggttgatgtggggcaggtgagtgacagatgtggtttgttgactcccagcccagggcccagcacacacgtgaggagtcagctgttcacgggctcctgtctgctcgctatgtaccctgtaggatcaggaagttggacatcatgatcctaggttgtctttctagaaatgtttgcatggatatgtttgtggccattttgatagagagctggtcttggcctctggctaagagaataagctatgatcttgtttcttggagaatgttagatttgcagggcatggctcttggttacccagcacctgataccttgcatgaggcaccttaggcgctgcatacgtgtttgctacataattcaacacaactagctatcaggtgagtctgagggttcctgtcctgaaaaacgaggtcagacagcactttggaggcaggtggctgcgtctaactcacggctctgctattagactctttaccctcgagcaagttccttagccaccctaagtttcttgcctgaaagatgtgtataatgctagggtccaccacagagagttatgtaaaaaataacgtgtgaaaagcttagcaaagtgcccacctggcatgcagtaagcactgaggtaccagaggttactgtttttattgctactatcattaatattaccatcatcacttaaatgatgataagactattcttaaggtagattaatggtaggtacctgtgtttttacacacgggctcatagagttcacgtacatctggcctggatttgttggaatgtgccactaccctctaatgcttcttctcgtcctgtagcctcagcctcccaatgggggtggctctccgtgttgcaatattgtataggatgcgaagtggagccatctggcacccgtggggaatgcattcccttccttgtggaatctagggctttggggttaacctcttgccaggagcggctgcagagaggctgcaagctaacattagtgggtgggagtacgcctgtgtggtgagcctggctgtgctgagcacatctcatgggacaaaccgcctcgacaattttggcatgatattttgagctgtgagcccattccaaacccctagaggaaagggcagggtgaaaagtcatctggccctgcctgccagacgccataacataatagctggaggagtagactgttcctggcaagtgacgaagcagctggtattgaaacatacacatggccagagttggcagactgagaatttggagcagagtgtgagtgccgagcctgggcttaagtctcaaccccagaccagactgcctttccaggccacctatgaaggatggctgggcagatgctcctctggcacctgaggctgggtagcagcgaagctcacctttgagatgaggtaccacctcatgcctggcttgggcattcatagtcattcatagtctccttctgacacactcagctggaaggagataaaactccagtttcagcagaacgttctcctgttgaactctaatctgagtctgtcctccccagcagcatccacatacttcccaaattgtggtgaattaaagaagctgcaagcactggcccaactggcttttgctggtggtttttcggcaaccctcctgcaaatgctgtcagccaagcaaaggaaagccagggccacaaagcacagaggctacagcttaactcagcttaactctgtttctttacaagtgggctataaatttgtgggagataaaacgacttaatgatcactgcagggtttagttttgttttttcaagaagatgggaagcttatgtgttaggaactaccaggcttctgttgaagtgttgtgtatacctctcatttagttcatattttatcttcaatggagaggattctgtaaaaatggaatgtagaaaattgcctctcctggggtgacacttttgctttcagaaactctttggggctgggcacagtggctgacgcctgtaatcccagcactttgggaggccaaggcaggaggatcacctgaggtcaggagtttgagaccagcctggccaacaaggcgaaactccgtctctactaaaaatacaaaattagccaagcgtggtggcgtgcgcctgtagtccctgctgctcgggaggctgagacaggagaatcgtttgaacttgggaggcggagcttgcagtgagccgagatcgtgccattgcactccagcctgggcaacagagcgagactctgtctcaaaaaaaaaaaaaaagaaactctctttgcattctgcatttggggactgtgactgagtctaagaggaaagctgtaactcttccctgctcctttctgagaaggaaaggtcctgaaaagccactggctctaaggtctaacaaaggccattttgtgtcttctcttcctttttttttttttttgagatggagtcttgctgtgttggccaggctggagtgcagtggcccgatcttagctcactgcaacctccacctcctgggttcaagcagctctcctgcctcatcctcccaagtgtctgggattacaggcacgcaccaccacacctgactaactgttttgtattgttagtacagacggggtttcaccatgtgggccaggctggtttcgaactcctgacctcaagtgatctgcccgcctcagcctcccaaagtgctgggattacaggcatgagctatagcgcccgactgttgtcttctcttcttaaccccttttcctttggtataaaaatgtggagaaaggtgtaagtgcagaagcaggcccagactgtaaagacataagaggcaggaactccagtgtggctgagagatgttggccagacccatgtgcccatgtctctgggtgacccctctgcctgccttgcccctccctctacttgtagcctgtgatgggaccacattctggttcaagaggctcagacaaacgttgttctgtgaagccttcccgacccttccactccccaggagtacccctacctcccaccagagtagcgaggttcctttctgtagcctgacaataattttaagacaggggcaagtgtattacagtttggtgaatcagattttctcatttgcagaagagattgggtgttttgagctggacagatctgggttcaaatctgctgcttattcattgtaggacatttgtcatattagtctcatgaggtctcagtttcctcacctgcaaaatgagtataaaattaatacttacctcatgaggattcagtgaaatagtgcactggaaatgcttgaccagagctggcacatgtatcacccaaggaacatctatcactattggaaggagtcccctgcaatggcagggactgtgcctggtccccagtccttagcacagtgggctgcacatagtagcccctcaacaaatgtttgtagaatgattgtgtttagctgggcagggtggctcacacctataatccagcactttgggaggccaaggctggaggatcacttgagttcaggagttcgagaccagcctgggcaacatggcaaaaccccatcttttttttttttttttttttttttttgagacagaatcttgctctgtcgcccaggctggagtgcagtggtgtgatctcggctcactgcaagctccgcctcctgggttcatgccattctcctgcctcaggctcccaagtagctgggactacaggtgcctgccaccatgcccagcttttttttttttttttttttttgtatttttagtagagatggagtttcaccgtgttagccaggatggtctcgatctcctgaccttgtgatctgcctgccttggcctcccgaagtgctgggattacaggcgtgagctaccacacccagccaaccccatcctttttttaaaaaaaagaaaaaagaaaaaggcagagtctcaggtgcttacccgaggcctgctgagttggaatctttacagtcatgcattgcttaatgatggggagctgctctgtgaaatgcattgttgggcgatttcatcattgtgcaaacatcataaagtgtgcttacgcagacctagacggtattgcctactacaaggtactgtgtgacgcttcacccgtcggtttgggcagtttatgggccaccctttaagtagcaaggggtctggggcactcttctcaacattggctgcacactgaaaactcccacagagcttaaaaaaaatattgatgcctagatgccacccccagagcttccggtttaatggatatgcgggtgtagcctgggggtagtacattttcaaagttcgccaggtatttctacacaacacggaacagctggcctaaggcctgcagaagcagatcaaaccaactcggctctcagatgcttctttgttgcagcataagacatctacatcatcaagcccactgcataggctgaactgaaccccgtaaccgcgcctcactcctggccctgccaaaccctcacactactgcggctgatccatcaaatagtttatttttcacctttgccctgatgtcacttggacatctgactgtctcctagagaaagttgtttttctgccagagaaggtacagcaggcagggcattgcttcctatttagtcgaaggcttattttaaattgggactaggccaagttcaagtgcaggagcacactggcccctgggagagcctggccaggtacatttggcttgtgagaccagccgtcagcactttggctcatggaacacacgtctgtccgagcagtgcagacctggcttgtgtgaactgggctctgtgtgccctcagggaaaatgccgaggccacatctagaaattctggctgaggctgagagccgtgtgcagagctgcccccacacatttccttgtgtatattttgggttcaggctgacatttcctcttagcatgggtggaggtaatggctgaatttttaggaggcttgaatcccttctacaaatatgcctcctcgccctgtaaccaagttttgctgggttgcagttcaggaatgtatcttgctgcttgtacagcccatcatggaatgtgaggacttagctcagaagactaaagcactattccttctaggaaaaagaaaaaaaaagaaagaaagaaggaaagttcctcagagttcaccagtgaaatggatcttatgagtgtgagggctgaattcctatgatatggctgggttcctcatgtcatattcccctcctgacatgtctagagtatataagaaataacccacagtttagctgtggtcactgtagactggttaggagtttgagttctgcacacacagagcctatgtatgaaccgtggcactgctcagtgtggcctccgggtgagttcaccactcaaagcctgcttcctccattgccagctaaggacaacagcagtacctgctgcataggctcattaagagaattaaggcagagaagagatgggagccacttagcagagggccatctttgtgaccagtgctcacaaatggtgcataatattattgtggttattttagaaaagcttttaaattacctttttggtgttcttttaccagttattaagtgggggaggcacactgcaagttggcatgtggatggcattttgccactcttcaaagctggcagatgatggggtcatcttctaggccccacataccctttcagtttgaattcttggtgtttgagtgaatccctgagatactgtcctgtgggagaagaagagcgtcatggggcaaggtggtcctgagctgtagagctgagggaggctggcctggaggcgggggtcttgtcttgcaggagagaggaaggatggaggacgatgagcactggactggggtcaacctagtggaggcccagccgaccagctgcctggtgagcactgcaggaaggcttggtttcctgacctcatggagaccatgctctgtttcaagagacagtacacaggcattataagactaaaacagctcatggccctaagtgactttgcctctatttggtatttaatgaatatggccttttgtccttatctagaaggcattgtctatgaaggcaaggatgttgtcttttcactgctgtttctgcagctcctagaagtacctaacaaaatgtaggtcttaataaatacttgatgaatgacttaatcatatacttccttattagaaggcattggagagtcaattcttactgcctagaatattctctctctcttctggtccatgtcctcttcttttttcagctcaatgtttcaccagtgtcaatcattcatgggccacattcatgacatttaccatctctgtacactacttgtgttattatctacttactatctttctatctacttacttattaaaaatggcttcatttttattttatgattttttttttcttttgagacgaagtcttgctctgtcacccaggctggagtgcagtggtgcgatcttgtctcattgcaacctccgcctcccaggttcaagtgattctcctgcctcaacctcctgagtagctgtgattacaggcgcttgccaccacgcccagctaatttttttgtatctttagtagagacagggtttcaccatattggcccagctgggctcgaactcctgactccaactgatcctcctgccttggcctcccaaagtgccgggattacaggagtgagccaccaggctcagctttcattttttatttcgttgtgttactagtcaatgtctgtgaagttatgagttggtgtgctcatggcatctttttcctaatatgtaaatgcataactattgaaatactctaatctgagaaatcctaacgtggtaacactgacttatcctctaaaactcagcttaactattccctcttctggaacatctccccttacctcttccaacgctggttaaaatattcctttcccatccctgtcatgtggtagccatcgttatctgatgatagacgtaagcataagaaccatgttgcatctcactttttaaccctagtgctttgcacagggccaggatgtagcagcacttgataagtgactttgaataactagatgaaactcctttagtctagggaagttcatgctgtctggcatgcatgggtgcccctaacaggacgctccgtgattctgtgaagatagtgtgctgtcactcagggcgccagcattccgaagcttctctttggatgcccatcaacaaatcagatgtatgaactttgatttagactcccagctcccagcaaggaaccagtatgctctgtgtctggggagtgtttggcctctgaccttccgcatcacatattgcctgtcagttacccagccagccttggatgcttccagtctctggcctcatttcccaggattgataagggatgaaattgggcattggcagtctgggatggagggggaagtgatcaggggagaggcccttgatccagtggggcagaagtgagccattcgatggaatggaggtttccttcagcctcctgaagttactttccctaatatacatcataacctcaggttcttcctgctctgaactctgactgtacctggtgtctgctggtgttttggttccgtattcctgcttcttgcctctccagcatgtgcctgtctttccacgtagcgtcctgtcttaaacactttttttttttttgagatggagtcttgctcttctcacccaggctggagtgcaatggcacaatctcagctcactgcaacctctgcttcccgggttcgagcgattttcctgccccagcctcccaagtagctgggattacaggtgcccaccaccacacctggctaatttttttttatttttagtagagatggggtttcaccacgttggccaggttggtctcgaactcctcacctcaggtgatctgcccgccgcagcctcccaaagtgctgggattacaggcgtgagccactgcgcctggcctgtcataaacattttctctctctgtgtgtgtgtgtgtgtgtgtgtgtgtatgtatatacatatacattttttttttttttttgagatggggtctcgctcttgttgcccaggctggagtacagtggtgtgatttcggctcactgcagcctccgcctcctgggttcaagcgattctcctgcctcagcctccccagtggctgggtttacaggcgtccaccaccatgcctggctaatttttgtatttttagtagagacggggttttgccatgttcgccaggttggtctccaactcctgacctcaggtgatctgcctacctcagcctcccaaagtgctgggattacaggtgtgagccaccgcgcccggcccctgtcttaaacatttttatccacttactgattgatgagcatttgggctaatttcacattttttcagttccatatgggcactcagagggtgattgcagatgctggtgggtatttgaaccattaatggttatttctgtgtcaggcaaattgagcacaggtttctagcctggcttctcatttctatgtggctttccacttctcagcaaaagcaaagtattgttgctacaacataattttaaaggaagctgcaaatgcatagcaaagcattatttggtggacagggccacagttacttcctaggcactgatttgccttttgtattctgcaggactcctttggcaaatgatgatgtgctttgtggtctttcattcctttctgaagccttaggtttagtatctaccatatgagtgcttctcagcaccacagttgacagccctttgaagatgcttttggctacaagtaacagaccacccaatacaagaaagcttcaacaatcataggtttatcattgcaccagcaggaagtccaaggttgtgtaattcattagttcagcgacatcattgaggaaagacccaggcccttttcattttcctctctacccacattcagtgtgtggccagatgctcccctcatcgtttcaagctggctgcagcagctccaggcactgcgccctcgcatgacaatgtcaagaggcaggaagacccctgatggtcaggagccatgctgtcttgtgtctcttccaaagagtgagaaaactatctccagaaggcctgctgattttctcttctgtttcattggccaagggtgtgtaacaggaccatgcctaacccaattatttaaacaaaagtaaggaaacaaggaggaagaacagcagttttgaaagcaaccaataatgctggccataaaacttcgattcaatttctccaagtgtgctctgaaaagcatctccatcagaattatctacaggctgggtgcggtggctcatgcttctaatcccagcactttgggaggccgaggcgcgtggatcacttgaggtcacacgtctaatcccagcactttgggaggccgaggcaggtggatcacttgaggtcaggagttcgagaccagcctggccaacatggtgaaaccccgtctctactaaaaatacaaaaattagccaggtgtggtgtcaggtgcctgtaatcccagctacttgggaggctgagaaaggagaatcgcttgaacctgggaggcggaggttgcagtgagcccagatcacactgttgcactccaccctgggtgagaaaatgagaagattctgtctcaaacaaacaaaataataataataattttttaaaaaagaattatttaaaatatgcttgctagaatgcacatttcttttttaaaacatatatatatatatatttcaataggtttttggggagcaggtggtgtttggttacatgcataagttctttagtggtgatttctgagattttggtgcccctgccacctaagcagtgtacaccgtacccagtgtgtagtctatatccctcacccccctcccaccctttcccccaagaccccaaagtccattatatatatatatatatattttttttttcttttttctttttttttttttgagacggagtctcactgttgcccagactggagtgcagtggtgcgatcttggctcactgcaagctccgcctcctgggttcacgccattctccctcctcagcctcccgagtagctgggactacaggcacccaccaccacgcccggctaattttttgtatttttagtagagatggggtttcaccatgttagccaggatggtctcgatctcctgacctcgtgatccacccgcctcagcctcccaaagtgctgagattacaggcgtgagccactgtgcccggccaattatataattcttatgcctttgtgtccacatagcttagctcccacttatgaatgagaacatacaatgttttgtttttcatttctgagttacttcacttagaataatggtctccaattccatccatgttgctgcaaatgccattattttattcctttttatggctgagtagtattccatgcgcgcgcgctctctctttctctctctctctatgtgtgtgtgtgtatatatatatgtgtatgtcatattttcttttttttttttttttttttgagatggagttctagtcttgtcacccagggtggagtgcaatggtgcgatcttggctcactgcaacctctgcctcccaggttcaagtgattctcctacctcagcctcctgagtagctgggattacaggcacgtgccaccatgcccagctaatttttgtatgtttagtagagacgaggtttcaccatgttggccaggatgttctcaatctcttgactcatgatccacctgcttcggcctcccaaagtgctgggattacaggtgtgagccatcgcccggtcttctttttttcttttcttgagtctcgctgcgtcaccaggctggagtgcaatggtgcgatcccggctcactgcagcctctgcctcccgggttcaagtgattctcctacctcagcctcccgagtagctgcgattataggcacgcgccaccacgcctggctaattttttgtatttttagtagagatggggtttcaccacgttggccaggttggtctcaaactcctgacctcgtgatccgcccacctcggcctcccagagtgctgggattacaggcatgagccatggcgcctggcctacattttctttatccacttgttaattgatgggcatttgagctggtttcatattttttcagttgcaaattgtgctgctgtaaacatgcatgtacaagtatcttttttcatgtaatgacttcttttcctctgggtagatagccaggagtgggattgctggatcgaatggtagatcttctttaaggagtctctacactgttttgtatagtggttgtactggtttacattcaaagtgttcccttttcatcttatccacacaagcatctattattttttaattttttgagagtacattcttgcaggaatgaggtggttttgatttgcatttccctgataaaatgcacatttctgaacccctttcctgacgtactgaatcagaatgcccgggagccaggcccaggaatttgcattttaacattaacccggtgagtcttattggcactgagtttcagtcccacagcctggggttcgtggttgtctcctattgatattttcatgtcatagatgtcccttcagcaatgctagtcctgttgagcagaggctgggggcccaagaagaatgaagactttgacttcagaaattccctttccagctcttgcctttagagattcagacagaaatattaactgatgcagtgatgctatctggcatttgcttcaaaacaatctgggtagcagagggaaagtgggattgtggataaaatggaattagccataatttgatcatgttggatctgggtgttatacatagggtgccttatccggttctctccacttaagttttttaaagtctgcattccaggggcttgctctgtcgctatgccgcctttgaccctgggtaagtccatctccttctttgggtttcagcataagttctctataaaattagtgtgttttcacattttctttttttccccttccctccgaatgaacctcttctccaaacaaaatcttatgtagaacttaaagatatgacaaaagtcaaacagctctctttgcaggtgctatggatgcctttaagataactccagaaaccctaggactctgcagaagatagtttagcagctactgtactagggccttgctgtaaacacatatatagaccaccctgatgcagaaccatagcctggtactcaggcaaaaagaatccttgggaagtaaagattcagccatggatgcaatttctaaggcacgtgttgctgcctgcaagtcagtcttcagtagattccaggtatcccaagaccgcacaagcctgcatctttcctcctctgtaccattactgcattgttaccctgacttggagcaggaggggatggcagtgcacatttactgtagctctaggttcactatccaggcaagatttctggtcgtggctaggatcagagatgtgtgggttggccgagagtttctgatatcgacgtatttctgtcgtgtggcaggatttgaggctcagtactgtatgatattaggagcccctgacttcatcttctaatgagttggtcctacatgggactatggctgtgtccgaatgctggctgcccaagaccactgcactgcctgagttcagtcattcctcacagaggtgccgaggtcagccttcctcgaccagagtggttctcctgcagtgaatgaccttagactctggagatgtgaatgaaatcctagctatcttcttaaaatccttcaaagaagggattaagtcacagtaataaccaggtacctactgcattagtttcctgtgattgccataataaattaccacaaaactagtaattttggcttaagacaacacaaatttattttactaggagctgtgtaggtgaaatgtctaacatgggtctcactgaggtaaaatcaaggtttcggtagtgttgtgttcctttctggaagccctcgaggaaaaatccacattcgtgctttttccagcttctagaagccactcacattccctggctcgtggtcccttccttcatcttcaaagtcagcatcttctaatctctcgctcactgtgcttccatagccacatctctttctctgactctcttcttcctcctccttccaattaaaggaccttcatgatgacattgggtccacctggatactccaggatagcctccctactttaaagtcaggtgattagcaactttaattccatctacaaccttcattccccttgtcatgtaacttaacatattcacaactccagggatgaagatgtggccatcttgccggggccttccttttgccaaccatacagacctaccagtagatttcgaaacagagtggcaccttcctctgtcttgaaggatgtgcatctgtcaactgggaggggctgtttcacatgaacgggatggcacctcaagttcatcttagctcgttgcccagttgaggtgctggagcttacatggtggtgagtggtgtatgtttttaccacaaatggatatgacccacagggcacaagaaccttttgtttttgtttgagacggagtctcgctctgtcgccaggctggagtgcggtggtgcaacctcggctcactgcaacctccgactccctggtttaagctattctcctgcctcagcctcccgagtagctgggattacaggcacacaccatcatgcccagctatttttttttttgtatttttagtagagacggggtttcaccatgttggccaggatggtctcaatctcctgacctcgtgatctgtccacctcggcctcccaaagtgctgggattatagggcacaagaaccttgaagactgggcatttccattctctcttcaccgacagcagatggtatacatttaaactagcctatttgggtctcagttatcatacttgtaaaatggacacattaatacgatacgaggaaacctgtgataagcatgtgaacaaggaatctatttaagtttccataaaaaatgtgactcttagaagcactgcgttatttaaaaaacaatattttcgcagaaggcagtaacagtctatttctttattctacagagaatcctcattaggggctcgtaagatctgtttctttaagaggaggaaaggaagtgctgagtaatttctgagtctcatgccctttggtccctgagtatataatctatagcagtgctttctgtgacactaaaaatgggaagcctgctgtctatatatagtcacgggctcttcatgattggggcctagctgcagaaatttctagagaaaaggtgatatgccatggtgttggcaggtaagcaccacttctgggtgtgaggtccatgtcagtgaaggagttagttaggcccttaaaggaaaacagacctcacatgccaatagatacataactcctagaaatatggcagctggaattggtttggatttagcctctgccgacttcagagtgtgcaacagccaaatagaacgcacgtcaagttttgcaaactgtccagcacagcccgcgctgtttctgtggttaagcgccattaataccacacaggtgaagaaaaaagggccggaatttggctccaggaacaagcgaggcaccatttcacccccagcttctttctgaggctcctgggtagcctcaggcgggcaacggccccgcagaggaagcgcgggccgcctggccggtacttgaccttcccagtccgttctcacgccacagccttcccggcgttgccatgcgtagtgggaaggccgtggacaaactaagaacagtaacaagttgtcatgactcagagactcctggaagtctgcagcgcctccaggagcagcggccgggctgtgcgtccatcggtccgtgcgtctctcgcctgccgctctgcggccgcgggcccctcggtgcgtctgggcgcgcccggccccgcgcattcctggccggggaggagagcgcggcgggcgccctgcgcgagcagctggccgagcgctgccccgggtcggagagcccagagctgggggaggagcctggcccggcagccgccgctcgcccagtcattggccttttgtgctgcaacttttcccgagcctttcggggagccacgccggccctgcgccgttgtcccgggaaactttgcgtcccagggccgcaccggaccgtggtgaccccacgcgccgcgccgccaccgggctcggaaaacccagcgcccccgggctctttggcagttgcgactccgaacgaaggcggctccgtgcgggccatcccctatctccccgggcgggtaagtgccggggccacgggcgggcggccggggtcagaagatgggcgcccgaaggaccttggcccccagacaaaggcgtactggaagtggccaaagctcatttcggctttccccggcagggactggccgagggtggaaaagtggctaactgcacattcggtcccctgctggcagaggagtgtggctgcggggaaaccgcgggccccagagtgtctgcccaggagcctggttcccttgagtgggagcgcgggggtcaaagcccgtggttcggggcgcgcgccagtggctgggattcccgctcgcggttggggtccccgcgcgtggttgtggttggcgcccgtgaccaggctccctgccagggttggggtcccgcccttgggggcctccgcgccttcccaccgggctctttcccagctcgtgtggtcctactgggtcgcgtgggggcatccccggcgggccacgacggcgcgtggactagccataaaactctgcgctggatttcctccgagtttgggacttttaaattctcgaatagttacgtcagcagggccgagcgcacttcggggatccggcgcaacacgtgacccgcccgagcgtcccctccgcgtccttggctcccgccgcagagtgcgcctctgcctcggggtgtcctcgaaatccagtgtcggggcgctgggatttgctgcccaggctccgagcgccgaatacaccacgctgtggccaggtgtcctcttcaatcctggtcttttcttaaaatggcttcatcatcatcactgttactgttgttgctatcttcaggctctgtcaaatgctgggacaggagaatgtgatagcgggttgaaatacagctgaaatagacattgtggaggggaaatggaagcggggcctaaggaggggcggctggagaggatggggggccctcgtgtcacaggacgtgggacattgaggatcctagggcagtttcctgtgctatgccagaggaaggtgcggctctgttaccggagagaactctccccattcttacttctctgattccttattgaggccacattttaaaagccgtttccatgatatctggaaatgactttttttccgggactgtgacgtgaggcagtgtttggtctgtgagatgcacgtgcagattaacagttgaatcttaagcagtgtttttagggttgacagttgatggaacttagaggaagggttttgttgaaaattgcacagtgagttccctcccggagcagctggctttcccttctcaggccaggcgggagggcctcctgagaatgggaccagttgagccaggcgggtgagtggattcccacggggctctttctcacaggctctgcctgggactaattctccgggaaggaaatcggagcagcaaataggccagcagccaccctccttgtgcaaatgccacagcaactcagctacccagagtcactagtctctcatcaaaagttacatcccaagcctcagaagtgtgatcatggaatatgacctgcttgtattatagttattcatataccggtgttatggaactgccttatggaaatcttcaggtcaaatgctgccgcctctgtggaacctagacaggattagccccttgtctctccgttccagccgtcctcttttctctcttaaaaaaataatgttcaagaaacgtgcttgaacatttaaaatattttagcaagaaggaaagttaaagatcaaggtttcgttttacagatacgaaaagagagactcaaagaagtccagggtcttggccagggccacacatcaaggtaggactccaaccccagaccgcagacacttgccctggtgttctctgcgccaagtcctgcggcctcgttggttttattcggctttgtatcctggttatttgtgtttgatgcttttatggagacagacactgcttgaggaaggatatgtctggttcacaatgccacgccacaagagtaacacagagcctgggaggtagatggtggttgaattgaatgacacagcccccaccttcaaggaggtaggtaggtgagtgtgtgtgtgtgtgtgtgtgtgtgtgtgtgtgtgtgtgtgtgtgtgtgagatacctgagcatgcacatatggggcaggctttgtggtgaaggataatgccccaggaggggatgtctggaaatgtgggaggatatttttggttgttccagtgactagggagggaactgctattaggaggatatttttggttgtcccagtgactggggaggatgctattggcgtctagtgggggagggctagggtcactctcatgtgagagtcctgcacagcagagaattgcctcaccccaatgccaatagcatctcaatagaggatgctgccaggctttgaggaatcatgagagacagttctaattgggaggatgaaagaaagggtctctgggcttgcccagctctgggctgtaagcgtagatgagactggaagagaatgagggcttgatggggagcacctgtgtgtgtgtatgtgcatatgtgtacatgcatgtgtgggtgtatttttttttttcaggacttggttccatagccaaaagcgaagcgttcttggatttactgtagctggggtttagcaggtccttgcaacttttgcacagatgatcaggaggtggtttaggaagctggcaataaaatcagtaactagtgctggctagaggagcatagagatggctgcagggctgggtgccctcatttatccccttgtgaccaaggtctgtgaaatccattttggtggctagctgtgttttttttctgcctctcccctattgaggtcgcagtccttggttcataaccccagtaatcatgttcacatcaactccctgcgatgacagaacatgttgaggattatgaaatcattcaggagaaacgagaggcctgagaaggaagacccagggaaaccaaagtttgcagagcaatgcatctgaaaaacagaggagcaagtgaaattctccagggaatgtagagcagccgaccctttgtaatggaggtgtcatttcagatgtgttgagtgtcagctctgtccccatccctctgtccgctatccacagtgttatagagtttcagtctgtcactttgcaagtgtattcatggctgctaattgagataaagcaaagtccccaagacttattttccttaggttggggaagggcagtattgagaaagcccagaatttatagacaaagatcctatattggagttcttgccctaccccttaccagctgtgtgaccttgagcaagtcgtgacgttgtgaactgtctgagtcaccttccttctcgtggatggtggggccgcttatccctgcccacctggctctcgaagctggggaggccagtgaagtcatgcacatgaatatacttgataaacaaactgtaaagggctgtgcaaatggaaagtcagtggtgttcatatttttcatctggttatgattaaaagtactgatttaggggagctcaatttcctaacacctgctgtagcctgtgtgcattagtgttgtttttaaatgcaaaccaggagacatactatgaaacgcagttcttccttatttagaagctgtgtattgactctgccgtccatgagctggttgtctcggcttcctttttgttcatcctaccttgctttgccactctcctttctttcttttttttttttgagaccgtcttgctgcatgagtgagtgagtgcaaagcccttcacacaacacctggcaaacagaagtgctcacaatgtgagtggcccttatgactgctattatcattaatacttttattgtaatgatttaaatttgttacagtatttcatatatattcaaattttgccaccagcagcaaaatcagcatgctcacaacattaaatcaagtccctcaaatctcagggccgcagtttctcctctgctcctgggagaggtcaacctctctggtcttagaaatcttttttttttttttttttctttgagacagagtctcgctctgtcaccaggctggagtgcagtggcgtgatctcggcccactgcaacctctgcctcctgggttcaagtgattctcctgcctcagctccacagcagctgggactacaggtgtgcaccaccatgcccggctaattttttgtatttttagtagagacggggatttgccatgtttcccaggctggtctcgaactcctgctgtcaagttatctgcccagctcggcctcccaaaatgctgggattacaggtgtgagccaccgcacccagctgccaccctctcttttaattgttcatttatattttgcctagaaaataagtacaaacacacgaatatggggctcttgttaggtctgctgacctggggagaaataaatggaaagagaaagcagctgccccattggctcatctcaggttatttacagtcccgctaattcttgtcattctgtggttgtgtccacgcttggtcctctgaggtccaggagctattctagtgtctgcatcatttagaatagaaggctcctggctagcattcttgcactgaagctccttgagggcatggggggttggtttcatatcatgactgttcccccagtggggcacattctaaattgacaagagacagtaagcagctaggccatatggccatcaataggatcttttttcttcctccttttatacccaggacacccctccctccatcccttgggcttgctgtggctcctactttctggctccctgcttcacacagaacaggaaaagattgaacattacctttgtttttctctttttcttttttttttttttttgagatggagtcttactctgttgtccgggctggagtgcagtggtgccatctcagctcacggcaacccctgcttccccgggttcaaactgttctcctgcttcagcctcccaagtagctgggactacaggcatgtgccaccatgcccggctaatttttgtatttttagtagagttggagtttcaccatgttggctgggctggtcttgaactcctgacctcaggccatccggccgcctcggcctcccaaagtgctgggattacaggtgtgagccaccgcgcccagcctggacgttacctttcttaccttgactgaaactggttcatcccagcaacttagctggcccaggactctgcattctggaactcccaggttgtcttgtggtcagccgtgtgccaaggtctctctctgacggctaacaacccctgcgtcattgctctctgcatcctcagtaccttgtattgtgtttggcagaacagattttcgtcagttcttgttgaatcagttaatgaatcgtctcctctcttgaactataggctctaaggctttgctttttgttcagggtctagacctggttgcattgcagggagaggaaatggaggtaattttgctgcttgtgtggttttggaatcagggaaaatctgtaactctgctaagatgctgaggactgagtgacatttttttaaacaccaactaaaattttgcctcatctatataagaatactggtggcatttgttgagacttcagtttgttgtttgtgggctgagtggcctgttctcagcctgaaaaagttagagaggaagctgattgtggcctgaattaagtgttagctagacagatctggtggcagaggctattaatatcattctgttagtgctattttccatgaacccatactgtgtattgaggacctgtagtgagatgatgctatgctttacatgttttttaaattgtgattaaacaaaccacataagatgtaccatcataaccatttttaagtgtacagtttggtggtaagtatattcatattattgtgaaacatctccagaacttactcatcttgccaatctgaacgactgtatccattaaacaacaatttcccttcttcccttctctccccagaccctggtaacactattagactttctatttctacatatattttttcctcttatttcttttaacagtctttcaagtaatgcatttatctccattttacaggttcagaaactgaagctcaaagaggttaatgaacttgcctagggcttataaatggcgagtaagtggcagagctggattcaggctcagatctatgtccagagtctgtgctctttgtactatacttgctgcccctgcccacctaagcccctggaccctccatgtgatttctgtgcccagtgttctggtgagtcagcgcacctgtggatttggtgcactggctttgggcatcctcagctgagatcttgatcccagaggggctggtccgttcagctggctttgtgctgttttgatcaggaggacagctacactttcactcacctgactgtatagcttctcccagcatctggctgagtttatttgtcatcttttgagaagaacatcaggctgggtatcgtggctcactcctgtaatcccagcatgttgggaggccaagacgggtggatcaccaaaggtcaggagttcaagaccagcctggccaacatggcaaaaccctgttcctactgaaaatataaatgttagctggactgggtgtggtggtatgcacccgtcatctcagctactcgggaggctgacgcaggagaattgcttaaacccgggaggcagaggttgcagtgagtcaagatcgcgctgctgtactctggcctgggcaacagagtgagactccttctcaaaagaaaaaaaaaaaaaagaaaaagaaaaaaaggaagaacattggctgccggctccctgccttgtcctcccggagtaatttcctctcctttgagcttgccgtaaaattcggtccttgggctcattaatcccaaaggatgcggaaacaacagtagtccaattttaagaggtgattaaattgtgtatgaggagaaggttccccctccgtcctgcaactcgcccgtcctcacagtaaggtctcctggggagctggagctgtgagtcagcaggtcaccccctgcctcccgtccttaactcccaaccagaagctgccctgctcccccgcctggcctaggggttgggccaacgtgggcactgctcacagcctcctccaagctgacctttctcagccaggagaccctgggtttcagatcagaaaattgtttgggctggagggtaccctagagagaatagtcgaaaccctcattaggtggaagaggcacccgcagccctgggaggggaagggtcttatgcccccaccccctggtggttagagccaccgcgggtgccctggctggttgcgcacaccctcttcctagggaggcagcacccacttggctctcagcacgccactccctctttgtcgcacatcatgagtcgacgctgctctgaggctgtagggtccttcgctgagagagtcagagcagctgggatggagctcagcctcgtgcggccttggggagagggactttctgctgtcacattgctcacagtgatgaagggcctgcatagagcctggcgcatgctaggtgctcataaacattgattcccttcacttgttgccacctgtattcattctttctttctttctttttttttttgagacggagtcctgctctgtcgtccaggctggagtgcagtggcgcgatctcagctcagctcactgcaacctccgcttcccgggttcaagtgattctcctgcctcagcctcccgagtagctggattatagatgcgtgccaccatgcccagctaatttttgcattttttggtacagagggggtttcgccttgttggccaggccaaaatcctgacctcaggtgatttgccctccttgggctcccaaagtgctgggattacaggcgtgaaccaccacacctggccctgtattcattcttaatccacaccccagttgatattcacatagagcctggggtgcctgaaggagcagcctgtgcacctgagactcacacctggatgtgcaggagaggcgggagggagggtcatgtgtactttgaaacagtacattctgtattttgtgtttgggaaacagtacatcctgtagtgtttgtcttaatgacgccagcatttgtggagcactttgcgtgtgctgggcaccttgctacagaaacattcgcatgactggtcacaaggcatcctctccactccctctccaggaaggactgtcattgccatctttgacagatgaggatactgaggctccgagaggatctttttcaaggttgtacagctctttattgctggagtggggtcaggcttgggcagtctggccccgggctctggcctcctatcacctgccctatcctacctctccagggggaggaggaatggcattttatttcttcatctgtgaaggctcccaggcatcacaggagtatctaaaaaatgtctgggactttaaaaaatttggcttcaaaatgtgacaagcgctgcttataattgaaacgggcaaatgtgcactttgacgtggctgcaaagcatcacattgtatcagcctcattggcttctgggcctgggcctcttccttggttcattcattccagtaaatgcattgctggctgtgggctaagaattcagcagggaaggtagaggtccctgccctgttgttggtggtcacgattcccctgctggctctgccatctcttcctgccctgccagaggcctctgctgcctcccatgcctcccctggggctgtgccgctgaactctggacaggagctatggcatgcccactagaggaaagacctggcggggagggggatggcagcatgggtttccaggcgaggacaggtccagggttctcgccatgggtctctttgccaagtcgcttaattccttgagtctcgatctcctctcctcttctataaaataacttgttagccaggcgcggtggctcacgcctgtaatcccagcactctgggaggccgaggcgggtggatcacgaggtcaggagatcgagaccatcctggctaacacggtgaaactccgtctctactaaaaatacaaaaaattagccgggtgtggtggtgggcacctatagtcccagctactcaggaggctgaggcaggagaatggcgtgaacccgggaggcggagcttgcactgagccgagatcgtgccactgtactccagccggggcgacaagaatgaaactccgtctcaaaaaataaataaataaataaataacttgtctgccttcttcatagcagtgatgaggaatcataaaagtggcatttaacaaagctctaagataccatacacatataagtaactaagtatttttttaaaaataattcctttttttttttttaatagctgaaggctaaatctttaaattgctaggctttctcatccgagagtggaaaatctctgttctccctgcgtgggctccagggtccgtttgataagctgctttccccggggtcctgtgggagacagcttcttgttccttagcttgagtcaggcccagagcatgctgtgggatttcctggctcctgtgctcttggacgcgggtcccagtcctgactctgttcttcgccctcttaaggggaggggctgcatgagtgagtgtgtgcagagcccttcgcacaacacctggcaaacagaaagaagtgcttacaatgtgagctgcccttatgactgctgttatcattaattcttttattgtaattatttaaatgtgctataatatttcatatatattcaaattttatcaccaaaaataaaatcagcatgcttgcaacatagatgaagtccctcaaatctcagggccatagtttctcctctgctgctgagagaggttggcctctctggttttggagatcatttttttgagagagtttcactcacccaggctggagtgcagtggcacaatctcagctcactgcaacccctacttcccaggttcaagtgattctcatgcctcagcttccagagtagctgggaccacaggtgcacgccaacacacccggctaatttttttgtatttttagtacagacagggttttgtgatattggccaggctggtctcgaactcctgggctgaagtgattcacccacctcggcctcccaaagtgctgggattacagctgtgagccaccgcgcctggcctggtcttagaaatcttgttactcacctggccccactccatgcctggcctgcagggatgccacaggccacacttgtccacccattttccagatccagaagagatgagttgtttttcatcatcactaaaaagcacaatgtgcttaccccgagggacctggggaacccacctttcaaagcgcagctggggtctgtgggcccctcacccagaggaatgccaagggtggctctgaaaaggatgccctgtgtgttccgcatgtcgtggtgcctgtgctgtggcttctaactggtcagttcggtcatgcccagcctagaactggccatgaaaatgcagatcttggaagattccattttgctgacttatgacagcctttgcttctcttttcaaaactgatgtgagcccctggggctcagctttcactctgttggtgagaactatgccggtgttctgaagtggggtgcacagtttccagggagtctgttcttgagttgggttgctgtagagtcatttttttttttttttttttttgaggcggagtttcactcttcttgcccaggctggagtgcagtggcacaatctcggctcactgcaacctccgcctcccagggttaagcaattctcttgcctcagcctccagagtagctgggattacaggcacgcgccaccatgcctggctaatttttgtatttttagtagagatggggtttcaccatgttggccaggctggtctcgaactcctggcctcgtgatctgcccgccacggcctcccaaagtgctgcgattatagtcatgagccactgcacctggcctctttaatctttattaaacataaatcagtaataataccggaggtctaaggttttatgtgcaaggcatgcagttaataacatagccttccaaccattagatgttcaaaacccaaatcatctttgttcttcatgtcccttccctctgcacctagtgtcaggtagatgtcatgaagcctctggaacaactaactccacctcctctgcagtggtcccagtgtgtcctgcatcacctggcacctgaactgttccaaagctctcacttcggctccactgcctgcatttcttgccccctccaattagtctccactgtggcacaggcattatcttctgaatattctgtcactggcctgcgtttaaatctctcatgttccccatcgccccaggacaacaggctcatggtctgagcgtctgaggttccggggcccctgtcacactggccccagccccaagtgtccagctaggtgtccccccagctgcctgatgctgccgaagtggctggcatatcacgctgtgtcctccagacccaaacggagctccatgtgtgctggggagtggctgtttgcctgcacgcctttgcccaagaagttcttatttgtttgtcctgagtacaattcctgatttacagaaaagttgtaagaatactacaaaaaacttccatgttccctttccccgattccgcagtcattgacattttatcacatgtgctgtgacgttcatcctctctctatatgagtaatataaatgtatatgtacctatatatccatcattgctactttttctgaatcatttgagagcaagtttcagacatgaagtcgccaccctccagcaaaacaaaaacaacccccgccccctcccagccccccagtgtgcctttcttgcaaacactctccagcacgaagccagcgcagccctgcagctgggaaatcgccatccagtcttcagaacctgctcaaattcaccagcagtgtacctttttccgtctgaaccagaatccagtcaaaaagcatgtgccatgctctatgtcatgcccccagactctccttccatctggagtaattcctcagtctctccctgtcttttatgactttttgagtttttttgagacagggtctcacttttgttgctcaggctggagtgcagtggctcagtcacagctcactgcagccttgaactcctgggctcaggtgatcctcccacctcagcctcccaagtagctgagacttcaggtgtgtgccaccatgcccagataatttcttgtatttttttttagtagagattgggttttgctatgttgctcaggctggtctcgaactcctggacccaagggatcctcctgcttcagcctcccaaatgccaggattacaggcatgagccaccatgcccgtcccatgacctttatgagtacagctccttcacgctggaagaagtccctcaatctgtgtcacctagtttcttcatggctagaccctgggtgtctgctttgggcagggattccacagaagtgaagctctgccaccccagggcacagagcatggaatgttttgccacagaggatggccagattggtgcctgccaggtttattggctgtaaagtcatcattttcacctttgtaatcagtcagcatttggtgggaagatactcaaaggctacacaatatccttccttttttttttttttttttgagagggagtctggctctgttgtccaggctggagtgcagtggtgcaatctcagttcactgcaacttctgcctcccaggttcaagcgattctcctgcctcagcctcccgagtagctgggactacaggtgcgcgccaccgcacccaactaatttttttgtatttttagtagagatggggtttcaccatgttggccaggatgatctcgatctcctgacctcgtgatccacccacctcagcctcccaaagtactgggattacaggcgtgagccaccatgcctggcctagcctttccttcttcacactccccaccgcctgccttggcatcctttgatggctcttccttgaattgagtgccaccattaaggtttcttccatggcagttttctgtcctacatggactaactagctggcattgtactgtaagggggggctttcccttcttccccatttgttcatgactttatttaggtctaaatggattcatagattattacttttattccatgggttataatccagaactgtgtgtgtgtgtgtgtgtgtgtgtgtgtgtttgatgttcaaatagtcccagatttgacagtggcagccccttttaggtggttcttatgtcctttgacgcgactcccccagctgggaagtaggtacgtgtatgtacacatgcatgtgtgcacacagccctccacaactagttctggatttgtctgattcctctgattgcagccctgccctgagggatctctggagtccaaccaccttctgtatatgcaagctcctctctgattgtgagaacctggctcctattatccttgatactggatactattctttgtaataaataacaaggggaagggaacagaagcctttctgacagaaccatcctggagagagggagggagaagctttttttttttcatctggaaagccctttgcacacatcggcctattgaagcactttgcttgattcagctattctcctctcaggacctgcctggatcatcccagcctgtagaatcctgggtttctgtggcagtttgttcttctggtatcacctgctatgctctgaatgtttgtatccctctcagccccgaaattcctgtgttgaaatcctaacccctaaggtgatggtatgaggaggtggggccttcgggaggtgattaggccataagggtggagcctttgtgaatgggattagtgcccttataaaaagaggccccacagcactgccttgcctcttctgccacgtgaagatgcagtgagaaggagctgtctgtgaactaggaaggggtcctcatgagacactgaacctgctggtgccttgatcttggacttcccagcctccagaactgtgagcaatacatctctgttgttcataagccaccccatctatgagattctgttgtagcagcctgagccaatgaagacaccacccttcacagttctcctttctttggactttcagctcctcgggcttgatgagcctgtcacccctggagtgtgtgatccccatggaatccatcccagtgcccgccttggggctcttcctgtggcatggatcctatgtacagaactgaagatgtgggcttttaaggctggaacctgaacgtcttcctttttggacagagtccattccaccagtctctgaaaggggtgactcatggccctttgcagaagcacttgttgatagtacaggcttccctccctgacattccagtggcaaatcaaccctttgctggcctgactaaatttatagtgggctggccccagcagctggtggcagcagctggtggttgaaatctgacagattttttttttcctctgaaaaatatttcagtcactctagtcccagaaccaccaccagcagaacttagaagccatttatagcctcttacagttgttctgagaagagctgttttagaaaaatccccccatttccccagaaattagctctctcccatccttagccacctggaaaatattcagatcgttacaaagtcagaaagggcccggagctgacagcacaaagtcaatttgacagtttatttctttgtagcagtttcatatggttgagcctaatatatatgcgtctatacacatatgtgtttatttttaaattataagataatgatttggtacggaaggtttgtagatctttattcagagcctgttgactcctgatttatgcacgttctgacactctcagccatgtttcttagcctgtagcctgttagaagcagagaactgcaaggcagaaggtggcagggggaggcaggtgagtgggtaagtagaagtgacagctgacggcctgagagcgagggacaaggctgagtcagagttctcggtgatcaagtagtctggcgctttcacttttacagacagaaaggctaaagctcagagaagtcccctggcttagatcccatggtgggcctggactggaatccagtcccctcaacttcacatacggtggttacatttggtgccacagcactaatgtcactcacttatgtcatagttgccgaggacggctgagtgtcattgagcaagtatttaattatgttcaagatcctctgtctcaaaaaagtcagggaagtgtttatgatttgaaaaataattccattccaaagagtttaggtgaaaatgccatcacgtagaatatgtgggcagatatcttttattccagatcttctttgctgggacctcattttccagtggtgcctaatggacgaagcctggccgcgttcccgccctggaatgaggctgacaagcctaggtcctcccagtggaaaatatgagtacagaagtggggaaaagacagtggctttctgattgtctccatctctgaaagctttcactgagttatacatggaagttgttccctggcacttaaaataacttcttacatatggtttctaatttattttacttacaaaagtagtatgtgttcagcatagaactagaaagtagatataaatttcattaagaaaaaacacaaatgatttcaccaccgaaagagaattaccgttaacaccttggcaatacttgtccaaattgcttcattgttcaggctattatgcttgcgctgtctctctctctctctgtcacgtgctcgtgtgtgtatgtctatacatagactgtatagacacacatacccatgtatatcattgatacacataaaatgtggatcatgctgctaagttttttcaacctatgttcaattaataatggacatgtttgcatctagatacatgaagatctatcttattttaattattattattattattattattattattattatttgagatggagttttgctcttgtcacccaggctggagtgcaatggcacgatctctgctcactgcaatctccaactcctgggttcaagcgattctcctgcctcaggtgcccactaccacacctggctaattttttgcatttttagtagagacggggtttcaccatgttggccaggctcgtctcgaactcttgacctcaggtgatccacctgcctcggcctcccaaggtgctgggattacaggcatgagctactgcgcccggcctaccttattttttgaacagccgcaaacgagtccatcctgtggttgcgccttaatttgatgaactgtcctctactgttgggcattttggttgtttccagattttttgctatcgtgattccagttgtgatcagcatatttgcccatgcccttaattatctccttaaaatgaattcttggaagaaccatggctgtgtcaaaggaaacgaagtcttttatggttttcaatgtgtgttgccagaactttggagctctgtttttccactcagattttatgattttggaaagtgcccctgtagtttgcctgtagtttaggattctagacattgtgattcaccaagacacccagccggagctcctgccatcctccctcttctgggctcactgcttcttccatttctctttgcagtgatctctttctctgactccttggatgtggtcacagggcttcaggatcttgttctgggggaactggaatggtgggtgggaacatggagaatggagaataagcagtagtgtgggtgcacacatgtgctagtccaatcgtattgagaggatagttttgggaaattcaccctggacctccgcactgtcaatgccaaaggcactttatggctgaacattgggttgaagcttcaggctgattcttctgcctaggatcaatacggagtctccctctgtcacccaggctggagtgcagtggcgcaatctcagctcactgcaatctctgcctcccaggttcaagtgattcttgtgcctcagcctcgtgtggctgggattacaggcacacactaccatgcacagctaatttttgtatttttagtagagacaggttttcaccatgttggccaggctggtcttgaactcctgacctcaagtgatctgcccacctcggcctcccaaagtgctgagattacaggtgtgagccactgtgcccagccagactcccccttcttcatctgtactctagttgcagtgacattttgcaggtcctctagaataccaagctccttcctgattcagggtttttaaatacgtggctccctgaatggggggtagggctgagggtcagggtatactcttccttttttaagctttaacattttttctagagacagggtcaccctatgcttcccaggctggtcttcaactcctggcttcaactgatcctccagcctcagcctccccaaagtgttgggattacaggcataagccaccgtgcccagcccctcttccttcctcttccacctgtgggacaaagccaagtgtggagattaagagcatgactcctggggtcaggcttgggtttgtatcctggttctgccacttagctgctgttcaaccttcgacaagctgctcagcctctctgtgccttagtttttacatctgtaaagtgtgtttaataatcgtatccccctcataaaggtcgttgtgaggatcaaatacagtgccatctatacgcacttagaacagttcctggcacgtatacgtagtaaccattaggaaacacttgttactgagctggcctcagcatgctcaccacaccacagagttttccacaacccccattgtgggccaagagttctcagtttgtgttctcatgaccatctgcaccttccttcttagcagttactacagttgttactaaataaataaacatttaaaaaaaatgtctgggctgggcaaggtggcccacgcctataatcccagcatttggggaggctgaagtgggaggattgcttgagcctgggaagttgaggttacagtgagccgtcatggagccactgcatttcagtctgggcagcagagggagacgctttctcaaaaaaaaaaaaaaaaaaaaaaaatctgactcttgcctgaagctgtcccatgagacgtcccatgaaggcagggaccgctgctctcttgttcacagcagagaattggttttcaataaggatctgatcaaggagtggaaagaatggtcctgctacttatggctacagagcggagttcatcagaaagtcactcagggacctccccgatgaaataatagggtaactgactacaagacgatgggtgtccaaggactgagcctcttctagcttcctgagccaccctgtgcttggaggttgcagactctttcagtccataaaggaccagggttgtttttaaatttctaactcatcatagatctaaactttaaaaaatataattaaatgaattactagaaaaatgaaataaaactcaaggctggggtttctcaaccttggcactattgatgttctggaccacatagtcctttgtcttggggactgtcctgtgtgtggtaggatgttgaacctgtccttttattattagatttaacagacatgaacgtagtctatcaaattgctacagaggggccaggcgtggtggctcatgcctgtaatcccggcactttgggaggccaaggcgggcagaccacttgaacctaggagtttgagaccagcctggccaacatgatgaaaccccaactctactagaaatgcaaaaattagccaggcgtggtggtgggtgcctataattccagccactcgggtggctgaggtacgagtattgcttgaacccgtgaggcggcggttgcaatgagccgagatcacgtcattgcacttcagcctgggtgacagagcgagacagtctcaaaaaagaaagaaaaagaaagaaagaaagaaagaaagaaagaaagaaaaagaaagaaagaaagagaaagatctacaaaggtttctaaacacttacttgaggtttctgtactactcttggcatagactggtgacagaccctgctttgagcagcaccaaactcatccctcacagaaagggaaactgaggccctgctcaggatccagatagaaatgtgctgttaaaacacattgaaaacttgtaggaggccaggcacggcggctcacgcctgtaatccccacactttgggaggccgaggcatgcagatcacctgaagtcaggagtttgcgacctgcctggccaacatggtgaaacccgatctctactaaaaatacaaaaaaattagctggctgtggtggcggggcgcctgtaatcgcagctactcaggaggccaagggaggagaattgcctgtaccctggagacagagtttgcagtgagcggagatcgcgccattgccctccagcctggataagaaaagcgaaactccgtctcaaaacaaaaacttgtaggaatgtttctgagtttaggttctttcccttttctctccccagttcacctgtggcagatgatatcatccagcccgctgcccccgcagacctggaaagcccaaccttagctgcctcttcctaccacggtgatgttgttggccaggtctctacggatctgatagcccagaggtacggtgggggccctggagctggtgatgagacctcagggcccaatccttgaggctgccttcccccgctcccctcccttcccctcccctcctctcttttctcctgcagtttcaccccctctgcacacacacacagggtgtgcacacctgtcctgaacaggtgtgtgccagagttggggcctcttcttgtgaccttaggaatgatctgagataccaggaagaccgtttcccctgtcccggcccccaagacatacaaggggcattttacagacttttttcctatgtggccttcaggggtccctatttgaaacagaaaccctccagtagagagaacgtgctacttctcctttttcagggaacggttgagttagctgccttctgatctcctgggacagagctggattcactgctcattttctttcattttttgatggtggtcagagaagaggagggtcagcagcacatggcaggggagccaggggcctggggtccccgcccctgcccttctgccatgtcacctcccaccagcctcccttcgttttgctcttcacaccccagcaaccccacactgatcacggttctccgtctacactgtgcttggcctggattcaggcttcactgctccttctgcctgcaaacttggcatttaacccgggctttcccagaatcagctcagagtcagctcagatgcccatatatgcatatataggcacacatggacatgtatgcctccacatgtctctccatacacacatgtacacgtgtatgtctacatgtctatacacacacatgtctgtgtgtgtgtctatgaatacacgcgtgcacacattttaatttctgtttatatcagtgaagcatctgctttttgcccaatattgcacagtgctggggaagccatggtgaataggcagatgctgtcccttccctcctggaactcatggcccagtgacccttcctcccagaagccttctccccacgctgagagaagcctgcatctgaattcctgcagtcacccgttgtgcccctatgtcactgccctccacagatccttgtaaatgacccgtatctaattccgtctccttcactagactgggaactccttgagggaggaactggtcacctgtaatctctggaaccgcagtacccaagatggcattgggcaggccctggaggaatggtggcgacttgaaccagatgagggggggacagggacctgggggctggcccgtgctgaccctcttccttggggtgcaggcaggcggccgacagcaccaagacacctcttcaaaactaggaggaggtacctggtgggggagaaagcagaggacgggatagatagggcaggaagctgcaggctggaagcagatattccagggcagccatgcaatgatgtggaaatttagacgttccttttataggtgggagtcagccatagttctttttttttttttttcctgagacggagtctcactctgtcaccaaggctggagtacagtggcacaatctctgctcactgcaacctccgcttcctgggttcaagcgattctcctgcctcagcctcccgagaagctggaattacaggcgtgcgccaccatgcccacctaattttcttgtatttttttttagtagagatgggattttgccatgttggccaggctgttctcaaactcctgacccccaggtaatctgcctgcctcggcctcccaaagtgctgggattacaggcgtgagccacctcgcctggccgagtcagccatagtttttacttttgtgtgactttaacttcttaaaggaaaaaccctagctgcgaacgaaggcccccaaccctcaagaagtgtacagaagtttccagtgagacgtggggcacccccttcctgtctgtcctattcctccccctctttgtcccatttggctccctgaccaccaccgttttaggaagacccaggggcctctggctgtagccaatggggcacgccctcccttagcaaagcctggaagggagccgagatcactctcacccgatgctcccatcttacagtcgggggatgcgggggcacgaggaagctctgaggagaggatggcgctggacttggcgggatggctctcagagagctgcagtccagcggagggtgtaatgggtgcttctgaaggcccctcccatgcctgagactgcatgttttaagtgacttgtcccaggctccatagtaggtgagtggcacatgctcttaagtctccttttccctggacacttcccatgctccaggcaccatgctgggtgtgtttcatcgagtgtctccgtaaatcctcatgccagctgtagaaggtgggaactgctgtcatggctgccatctcacagttgagcagactggggctcagagacgttaacatgctccagtacacatagctagtaagtggcagagctgggactgcagcagctctggcccggctgcccacctgtgttctgaaacctccactggcagagctgcgggagagccaggcttcctcgagataccgtgtcctggggccccgcctgtatccatggtctctctctagtccaaggaaggtaatgcattaggtaatgcagctgtgttacctacaaccctgaccaagagtgaccacagaatgcaggaggggaccagtggctaagcagaggtgtcagtgctgagaactcggccagtttcatggccttatctccttatggaaagactcagaactctgggcagaatgcaggcatgattaaaacctgggggagtatttgactaaggaatgagcaattttggtgccttgttggtgttactgaacatttatccagagtcgtgttgtcttgttgtttttactggattggtggaaaagagatagttctgttaataccaaggattggtctgactttggtcaccagatgcctctgtaaaatacagtcgatcctcgttggcagattccatatttgtgaatttgccttctcactaaaatgtattgattaccccagagttgatacttgtggtcctttctcagtcatttgcagacatgtgcagagctgcccagcacacacgttctcagctaagattgaacgaggcaacgccctgccttcttgtcgtggctctggcactgcaaacaagtgtccttacgtggcatagttagttcaactgttgtgcttttccttggtgagcacattgtttcaaatgagccctaagcatgatgctgaagtcccctcctaagtgcaacaacaggcctcggggcgaaaagttgtgctttagagaagcttcctcccggcatgaggggtagtgctggtggctgtgaattcaatgaagcaaaattacctattaaataaggcatctttaaacagaagcacacatggaacaaggttatgttttggttgattggctgatgaaaatgctgtgcctagaaactcacaggaagctacccctatgtttcctctagaggcaataattcagtgtctcctaattcagggttcatggcgacttggtagaacattcctgtgaatagcaagaatcaacagcacttcaccttgcccatctgctggagaaactaagcgggcgtcctagtgtgcagtggcgatttaagcgcagcagtgtccccgccaccccatccacctgcaatccctctgcactttctgcttcccataaggagagaggcagagggtgggatgcggaaggaggggagggaccaacatggggcagggggcaggctggaacagtcctcgggagaggtgtgccttttcagtagtttaaatttaaaaattaaattgaaatgaatatatatatatatgtgtgtatgtatgtttgtgtgtgtgtgtatatatatatatatatatatatattagatgtagtcttgctctgtcgcccaggctggagtgcagtggcacagtctgggctcactgcaaactcggccccctggggctcaagcaattgttctgcctcagcctcctgactagctgggattacaggcgtgcaccaccatgtctggctaatttttgtatttttagtatagatggtgttttgccatgatggccagactagtctcaaactcctgacctcaggtgatctgcctgccttggcctcccaaagtgctgggattacaggcgtgagccactgaacccagcagaattttttttaattaataaaaaaaatttaaaaaaaagtagggctggagcatttgctttaagccagctgagagaaaaacagagagcaagcctcactcctccttccctgttgcctgctaattctttggtgccctgccctctagtttcaagagctctttttttttctgagtagcggaaaaagaaggcacctctatctctaaggtatttctcaaataaaatgaaagggatttcgatgcaccctttctctattgttaatgccactggagggcaccaaaatttgcttctttcctcagggaagagctgtgaagctgcttcgggggttgagctaaccctggatgacagagaaagctgggcccagatcttctggaactttgaacaaatgaccacattgcctatggccacttgtactctcatctgttcagtattttcattaaaaaaaaaaaaagcagaatgagcctgggtaaccctgcctctacaaaaatcagccggttgtggtggtgcgtgcctgtagtcccagctactcaggaggctggggtgggaggattgcttgagcccaggagatggaggttgcagtgagctgagaccaggctgagagcctggttgacacactgaggcccatctaaaaaaaaagcagaatggttttttcaatgaaaccttccagctgctgtaccactatgtattaagcagtgaaatgggacacatccaagagcctcttgtgcttttcccacagtcaagaatccatgcagagaggtcccctgagaacttcaggactcccacccacacggctgaaaaattacttactggacttgtgtctgtgggtcagacttcagtgtgcatcagaatcacctgctgacaacccagatatgctgccctcttcccagagtctgattgaggggggtgttgggaggggcccacacctgcatttccagtccttggagaaccaccaggtgaaggcagtgttgtccaggcgcttgcttttctcctcacctgtgaacaggtttgagcagctcatcacagctcctcaggaagggagacaccaggcccagcagctggcggctgaagtttctgatctctgactttggacagaaggaggtgggatagcccctgctgagtgtcatagcctcaccagcgagtttccagattcagaagcagagtttaaaatggtcagaagttgaaaggcccgggaattcatactgactacagcttttatttcttctcttgcttccaaatcatgtagtttattttttttttttctgactgcacaataagatttttttgtcttccctctatgggtatgcataagtgagttcaaccacctcacaaaggttagttgaacctttatttaagcaggtgccttattaaaaactgaatgataggttgggtgcggtggcttatgcctgtaatcccagagcttggagaggccaaggcagggatcacctgaggtcaggagtttgagaccagcctggccaacatggcaaaatcttgtctctactaaatatgtaaaaaaattagctgggcgtggtggcaggcatctgtaatcccagctacttgggaggctgaggcaggagaattgcttgaacctgggaggcggaaattgcagtgagccgagatcgtgccattgtactctagcctggacgataagagtgaaactcagtctcaaaaaataaacaaacaaacaaagactgaatgataaagtggaggaattatttttaatttagaaaatggatctcccaaaagtcttctctgaataacagaattcctttgtacctttagaaggtactttgacattcatgaatcagatttgtgaagccagcacccagcgtgctgagtgaattggggtgcacctttacatttcttcagagcctttgagtttccattgtctgtctggctgctgttggggttgaaccacatgaactgccacattggcaagtgtcagatattgagaatttcatacggttcacactcacacaagattctgttcttgttttggtttttcatgcttcttgagctgctttatctgtataggcagattttgactttctgaataaataatcttggatatccaagatcagtctccttttatcccttgtgtctccacccctgtagcctctgtaaaccaggactcatccccagagagctcaggacataaggaaatcttgcccctgggcccgcagagctgctggtgatgaccaggcgtggggattcataacttggacgatccaagccagaccaaagcctcgcctatggttttgggatggtgtttatcacttttcccttggtgaatattttccttcctgcttaagttttgcttgtgccaaatttgaaaataacatccctcctctgagcacgggctctctctgtgaaggtaaagtggatagacgtgtgccagggaagagctgaccagccagttcagggttaactgcgcaggagcccagcgcccgctggaaatctgcagatcagcttgtttggggctgctcacgctctcacgtgaactggctggtgctcgaatgctggtggatctcaccaacgaccagaaatatctggatgtgcctgcctcggagcttccagccaattcacaagcacctctcagcaccttctgattttggctttggggcttttcagtggctgcctctgagagacgcctgttctatctcccattgctgagtctcattttatcaagtcccaggcctccgtgggactggctgtccagcatttgtatcaaccaagcctggctctccaaacccacaatttcacagcactttcctttctgcactttgcatctcaccttcagcatgacctgagtcttcggccttaacgcttgccctattatgtgatcatgtgcacttgggaatttcggaagaaaaaaatcaagaggcctgggaggaagggctgttagtgctaaatgccttccagatggtgatgtgaaatgggagataagatgctgtcacccatctggccaacaggactgatgtgtttggcctgcaccttgggggctgttatcaccctcccgtgacagcctgggccactctggtgtttgtccttgcacaagggcttaatttggcagctccagccaatctctgaaatgaaatttgctatcagttcagtgagggatctgcctagcgggactcaaaagccctgaccagggaatcaaaggacaacagctgctgacggtgtctcactgcggccggatctgcagggctgtcgggctgaatgtgagccctggagctgtgtgtgtggctggagactgcagccgaatgggcagtgggaccagttgttgtttgtgaggaccttagcaaggtgctaactcagggacagcaaactcttcagatccatcgtctctgatccattggtaatggttctctagggatctgtgttgcgatggattctgaggtcttgtctagctgggcttagcaggaaagaacgccttgatcaataagtcatggctgtctgctgaaagcgtggtggtttatatgctgtcagctctgtcctaaacaaaaagaaatagcaggttgaacttaaatcaacatatccttcctcttccaaaaatataaacactctacatgaatttgaattcagcttcttcgttattccaataaggtttggaaaacactgattaactccttaaatggaaaaaggcatcccagatgtttagccccaggctagctttccgccagaggaagacagcaagataactctagcaggtggaatgagactacagaatgtgcggaccccatatcagtgccctgctctctctgggctgggtttggcagctgtctggaaggttctgcaaaggcctgggattggtcctgggcatttgttcagggcccgacttcctgagaacaatgtctttaagaggagtcactgctggtcacgggaggcttgaacgcagatgggagctgactggggttgttggtgaggagctggctgccggctgcccctacctgcttactcgctttgcttgagcaacattgccctctggcagctcagggggagttcaagggaccttgactaggctcctggaggaccagcttccgaatgccgtggaaagtcagggagggctttactcagtggaaggacctgatcagaacttgagttgggtcattctggtggctgtggggccttggatctgaggggacaaaacggaaagcaggcacagcaggatagcccaggagtcctgctcagagagggcagattccagaaggagaaggaggtgactcagcaggaaggggtgatgaggggcatgggaatgagagaactggaagtcagtgccagggcctggcgggctgatggtgccactaccttgctgggaaaattgggggaggaggaggagggtcaggagggaagaggagaagttctgttgggcccaggaggtgtctgtgggggcccatgtgttagcgcttgggcttggatggtgagtcactgagtgtttcctcgtgggagcctgacctcctcggcccctgggtatgagccaacaggcggtggaaggaggggggcgcctttcttaaatgagctgttgagtcacacttgtttgatgcctttggctaacgggacccagccagcgcaggaagggtgtggccatggcagttgggaccaacagaaggaagggaggagggagcagccaggtggcccctcaggaacaggagcagctgtgggtgttaagggcaggcgggggagcttggtgagtgagccttggttgtgctgccccagggtgttctcagagatggggcaggtgtagccttgggcatctgcatcagatcccagggctgtcagctgtcacagagctggctttgttgtgattagcagcgggccacagatctaaggtagcatctcccccccacccgccactgttttctaagacagagatccttccttgcagtttgataaacagtacccttaaatcacagaaccacaaacaataccacctttccacaatttgcattaaactaagtaaaatcttggtgggatgtgtgtggtggaggggggagcacagcagtgtaatttcttgagaaagcgaagttagactagtagtttgcgtttgtaagtggtccatttgccgattatgagtacatgtcagcctccaaagtgcaaaatagctctcttaaggagcttaaatgcctctggtagtttgcattattcattttgagtcattcttttacaaaatgattaattttagccactgcccaaattgttgcaaataatagtttgacaaaggaggccagtcactccatctgtgaatccactttgctgttttgctgggtttcctccaagcacttgtaatttttgttcccccgtggattggtctgctctgggctttcctaggtcgttatttcttgggctctgttttcctctgtggagccccgagggagcaggcagcatgggttccagccctggctctgctcccacacttggttgcagccagttggacacttggcggtatcccctctgcctgctgtgggcggcctggcccagggttgcgatcctgcggtggatgtggcagatgtggcccctgtcctcgtggagctctgaggccaggacggtgaggggctgggaagtgcctgctggacctgcagaatctgctaagctgtgaccagacttatgggcaagactgagtcctctgtccagtgtacagtgtgggtgcctatggcagctgcccttcagaccagggtgctagcctgtcaggtggacctcgaagagatggagtgagcagacatagcagcccagaggcccacgcaccctggactcctgcaatctgggagctccctggaggtgtttacccgcagagggaagcagtgatccctcactgcaagggctgtgacgccacaaaccccagctaccacctcaggctgggtttcaggccgtctgtgctgagtcttgtattccagcctggctaccccaagacaccttcagcctggccagtcccactgtggaccagagcagggatggctggagaggctgggagggtaccaccctgaaagctgttcccaggctttagtctgtggaggccgttgctagccttgctttttgccagtggggaaaatcagaacctcttctgcactgcaagcctgtgccttttggcttttgtggggagtggtctccagtgctacccccggaggccccgcacgctgtggttccctggctgtccagcagggggcactcgttccctactcgagggccacactccgtctctgaaactcattcctcccccaggacacgggtggcccaactggtcccggggcaggttcccgaatttcccatcatccttttcccctggatttttctcagccttgggatttgcgggcaaagcctggggaatttgtaaagttgtattttagttctcaccttgtagagtttcattgcctatcacaaacgaatagaaatcatcataaaaaaaatcctctcctctaaacaaaaatcaaacgagaaaactcacatagcgtgtcctggacacctgagctgcctctgttaaagaaacccggttctacagaagcttaaggagggaggagcttaagggcctggcctgggagccacttcgttgcagccacaggccctgctgtgcagaagtggaggcctggatggggaagccggggagccaagtgctggggtttaaagagtccattccatgtgtgggcgggtgggttgggtggggtgaatggggcctgatgaatgtgccattaatgagcccagcaccatgtggaataattccctcattgtgtccccagcatctccccagctgctgcccatgcgggtcttcctccctcggctgcagaacacatagtttcgccatctgccccagctggtgacagagtagaagcttccactccctcctgcccagatccggccaaggacctcagcaggtattgcgcaagtccccctccacagcacctgcccccggagagcaggggcctggtggtctctgccccctaggtcttggggtgagccgcatttaggatggtaacaaggtggtgaccatttggccccgtgagaccatgtctctgaccctttgggccatagccgatctcaggtttacccttgcccacctgctcctcatgtcacagtgggaagcatggtgtgggcgagtgcgttagggttctgcacagaaacagagccaataggatggatagatggatggatgatctatatgtgtatgtatttatatgtatatatatatgcagagagagggatttattttaagggattggctcatgtgattgtgggggctagcaagtctgaaataatgcagggcaggctggagagtagggaagagttgttgtagcagagccccaaggccatctgctggcagaattcccttttccttggggaaggtcaatccttttcctttaaggccttcaactgatgggatgaggtccacccacattataggaggtaatcagctttactcaaaatctactgatttcaatattaatctcatgtaaaaaatatctccacagtgaaattgagacaggttggatcaaatatctgggttcaatgggccagccaagttgacacataaagttaatgattagagcaagtatttggaactcctgtttccatgcaagcagttggttttgattataaatcattaaagcctcctaaagagcattcttggacagtattttgtagagagccaaatgcatctgggtgtgctgagaacggcaggcctcggtcctcagggagctcctgctggctgggaagcacacagtgctgaaagctaagccatggtagagggcaagaatataaggggtgcccaaagcgtagacaaccagctgccaaaccagagtgtcgggaagtagtagagaaatcagaggaagggaacatcaccacatgcagatgatattctagaataccgggtaacagtagggtgggcccagagctggaccagagtctgccttatctggatgatgccacctagaccattaaactcttctctgtcctgtatctcctggcatctacctgcagctctgttggtcctgagtcccagagggactttccatccttcagattgttgttggcagagcaggaacatttgttccacccctcttggatccaccgcagtgcctggtctgccataattcttggcccaaggacaaggaaatgtatgggaggtctgcttttctgctggtgagatagcacaagcagaggttggggagcaggaacatccccagctgtttggggaaacacccttggtttgccttggacatagtaggtgcacaaccaaaatgtgttggagaaagaaatacaattactcttctcaaatattctgcccttcagtttcttataaaggtaaacataaatccacaatatgacccagcaatcccatttttagatatttacctatgaacgatgaaaatatatgtctacctaaaaacttgtatgcatgtattcttcataattgccccaaatttgaaacaacccagatatctatccactggtgaaaggatcaacaaattgtggtatatctatgccaaggaatattactcacccataaaaaggaacaagctattgattcatgcaactaaattgatgaatcgcaaatgcattaggctaagtgagaaagactggactcaaaagactacattctacatgattcagtctagatgagattctgggaaaggcaaaacaataaggaatggaaaacagatcagtgggcactgggggctgggatttgtattgactacaaatgagcatgaagagatctttgtggggggtgatggaaatgttctgtaaaatttgtggaactatatacttaaaaagagtgaattttactattttttggtatgtaagttatacctcattttttttaaaagaacttatccaagggctagagtagatttttgatgaaatctaaaataaaaatttcaaccttcagaccttttgctgatgcagtgttagggtcagagagcatctctggtgcctcctggcaccagcagacacaagtggtacccatttgctctatgtctttctttcctgaggtcagatgggctcacggctctcaacctgtcatagaaggcacactgggtgatctcacctttagccctggagcccactctgtgtgggttgcttctgaatctcattcatttacacatctgagccattcagcaacatgaacttgggattactctgggccaatcactgtgctagggacaggacacagaggtctggaagacaggcaccgtcctgccctcaaggagcatccagtgctggcagatagacatggagcaatgagttactaggggagaagtgcagcaccctggatggatgcgacccacaacctcacttagtctgggtagctgaggatggcttcccagggaatcgactgagagcttaggctgagtgggtttatgtgtgggctgggccggaggttgctgaagatacagaagagaatagatattgttggggagaaacagcatgtgcatggaccctgaggtccatctcaaaaaaaaaaagttatcaatatattgatacatctttattataataactaaagtctatagttgctgtggtttgagtatttgttgcctccaaaattcatgctgaaacttaacccccaatctggcagtattgagaggtgaggcctttaagaggtgattgggttatgtggctctgcactcatgaatgggttaatccattcatgaattaatggattgctgggatatcatgggagtgggactggtggctttataagaagaggaagaaagacccgagctagcttactcagccccctcgttataggataccctgaaccacctctgtactctgcagagtccccaccagcaagaaggccctcaccagatgctgccccttgacctttgacttctcagactccataactgtaagaaaacaactacttttctttataagttatctagtttcaggtattctgctataagcaacagaaaatgaactaatacaatagttgattcacgttttcttagtttttccctaatgtcctttttctgttccaggatcccatccaggaaaccacatttccattttgtttctgtaggtgcctcttggctgtggctgtttcttcttagacttgtcttgtttctgatgaccttgacagttctaaggagttctggttgggtatttagtaggatgccccactattggaatttgtctgatgcttttctcatgattggactgggcctgtgggttctgggaggaagaacagagatcaagtgtcattttcatcacatcctatcaagggtacataccatcgacatgacatatcactgctgacattgacctcagttgcttggctgaggtcatgtttgttgactgtctccactgtaaagttactttttttttttgagacagagtctcactctgtcacccaggctggagtgcagtggtgccatctccactcactgcaacctccaccccagaagctcaagcgattctcctgcctcaacctcctgagtagctgggattacaggctcccgccactacgcctggctaatttttgtatttttagtggagtcaaggtttcaccatgttggccaggctggtctcaaactcctgacctcaagtgacccgtccgccttgacctctcacagtgctgggattacaggcatgagccactgcgccccgccaagttcctttttttcccccatttcagtactgtcgtctgtggaaggaagtcactgtgtgcacatttaaggggtggagagttgtgctcctcctctgttagggtggaacatctacagaaattatttagagtttttctgcacaggagatttttctgttctccttcatttattaattgattcaatcatgtatttatatctgcatggactcctggatattcattttattctttgggttataacccaatactacgttatttcattgctccaattgtagcagctttggtcatgggctccttgggctttcttttaagagtgtccagaagcccccaggcagtacagtgatacgatcggatctgcattgttaaagacctggccagctgcctgccaagacaggagtggttttaggattgaggcccccatttcctggggctccctgacagctgtggttccatcaccttcagtgcactctccacctcgactctctccacagctgctttcaaccatgcggccatggcctggatccagggatccaatcaaccgtgttttttccctttggatgagttcctggaggttttcaaagcaagtttcgaaaatgtaaggttgaacatttgatttcactgaaatggaagtcgttattcacccaggctgagccagaattttttttttttttttttttttttaggcagagtttcgctctcatagcccaggctggagtgcaatggcgtgatctcttctcactgcaacttccgcctcccgggtttaagcagttctcctgcctcagcctccctagtagctgggattataggcacccgccaccatgcctggctaatttttgtatttttagtagagatggggtttcaccatgtcgaccaggctggtctcgaactcctgacctcaggtgatccgaccgcctcagcctcccaaagtgctgggattacaggcgtgagccaccatgcccagccctgggccagaatttgaggtcctggatggactcttgattttggaaatacgtcttccatgggttcctgccaccagccaggcatcgcctgttggagccagcgtgccttctgggtgttatgcgcaggcagctgcagtgcccgccatatctgtggctttgtcttctctctttgggtttggaggggagcagcgaggcagtgagacctggtgtattgacaaagaaagcccagggcacatcttattacagaattgacagatgctctgttcttgcaaacatgctgggtgacttcctgctgcctcttcctgcttcttgcggctgctgtggaaacgatgacacaatcccacgtttccagtgcaaatggcttttctccaggagttttcacactcccctccccccactctcattggtaatcattaggccgtaggccttggggagaacagatgtgactttgagagggagaaaagtgaggttctgggaaggagagagagcttcaagtctctgcctcctatccctgcctgggagggagaccattgctgcagtcaccacgcttctgatgggccttcctttcccctccatcgtagccctcctgaggctttgtggggtcagcaggtcaccctgacttttccagagctgtcagctctttggagagctgtacgaggctgaagccaggcgaggggtctgataataagaatttccaggaatacaagctgaaagccctcacctcaccaaggcagccacagctgacctctgagagcttgtggcaaagagcctggtgtgttggacatgagctgagtgggtgtgggtgtgagcccacgcaagcatcatctctgttcagagttggcctctcactccctgctgcggacagctgtcccctaggaattggtgacttggaaacctggccaagggctgtctggatagacgcgggagaaacgggatgggagaagcagctgagcttcttgcagggaggaggaagccggatccccggtgctgggcaggaggcccaggagacaccccttgagaaatgctaccctgagctgcagactgtggcggctgtggcgttggctcttcaggctttcctgtgaggtgcccccacactcccggccccacccgccctgggcagctgccccaaattgctcccttccctctgtcaacacttctccaagactccagagtttttcctgcgcaggaggggaagggcagaaacctccccattccctccacccgagttagagaagtcagccctttggaaaacatgatgcatcttcgctctggagccagttcgccagtccgctccccagcgcggcactttgccttgtaggcggggtgcagatgagcctctctgcctcactagggaaaggggctgggttgttgggctgagggtctccggggattagactctgcgctgaccaaactgggctctcgtggcatcattccttggttacgcaggtcaagtttccattgttctcttgcctctgaggcccactgggtccggggcagactgagcataactacgctgagccacgtcaccggccggtgagacgcgcggaggcattgatgggtcccctggttcccgctcagtctccgaaatgtgagctgccgcggagtgggtgctgggctgtcccgctggcttcagcctgaggagcaggagcagagggcgtcagttagatggtggctccctcagttccgtgggcccaggtctgcagttcttttcctccttctgggaggggaggggaaggagagccggcagcagcggggctccctggccctactctgggggcacagctgggagaagctgcaaagcttcagcttgtgacgccatctgggcggcagtcccacggcccctagagcagctgggaaggggatcccgccctgaaatggggctcagggaggaacatatgggcaggcatctgtgagggcgtggctggacgtgctcagcacagcactggtgggtggaaggttccagggcagtgtgggggcccttcttgccctgaataggggcagctgaggccaggagcccaccctcctccccgagcacggctgcccagggacggccctcggcttccacttgatggttttaggtgcttgccctgcgggaggctgcgttccttccaagccaaatgcgtgctctccagccctcagacccagtggaggtgcagaaagaggggtggccaggagacggctggtcacagagtgccccaaaggtggtggagaaatagacccccaaaccaagggaggcagggcccagggaggtggggtaggatgggatatggtacgagcatgtgcggctcaggaccccaccatgcccgagtgcctcgccgtgttgatgagccagtttctttaatacttcgctgtcaggagaaggacctgctgagcgctggagtctaggtggagtcatgcagcgttcctgggtcctttcttctgctttgtttgcattttttgatcctgccagccagcctctcggcagatacatcccggttgattctatgccacggactattcggaaggtggcgcaggggaaggagcatgaagttggaaagacaggcctatttaccagctgtgtgacatggcatgagttacttgactactctgagccttggtttacccatctttaagatagggctagtagtacccacctcttgggggttattgtgagtagtaaatgtacatgaagaatgtagctcagtgtttgacaagtaggaggcattgaattcacattccccccactccaactcccagcagtgatggggaaaaggaggcagacagagacagctgttctggaaacagaaaaatacaacatgataaacttaacatagtacaacctgataaactctccaatagagctgagaacaaaagactcaagagaagggagcacctgactctgcctggagaagttgggaaggcttcccagaggaggcggcatcaccactgagttttgcagcatggctaggtgtttgctgagggtaaagaagggcaaaagtgcttcagggaagaggaaccaaatgtgccaaagcttggggtgtggcgaggcccagcagattcaggcagcaggtcagagaggaactggagggactagagggaggtacggcggtctcagacagagcagcagggtgagcagccaaggtggccatggtcctcagatttagaggggcctgcagccagactggggagtttgctggtgccaaagaagtgcaaagaaacatgtcttctcttttcaagcaggggagagtcaggatggaatttagtttggggaaatatctctggtggcgaggaggagggtgggtggaggagaggccagaggtcagagggccatgtggaagttgttcctgtggtccaagtgggagacagtggtggcctgaactaaagcagtggccgtggggatggaggggacctgggtctgtctttgtgccttgcattcatccattcaccaacgttgattgagcatttgctctgtgcaaggctgaaggcaggtgctgggatacagtggtgaccctgcaacgtgggccacagtatgtctgagggtgacactgcggaggtgactactcccaggctggactgtgactctgggcaggggctcgctgggagaagttgcccagggcctggggcttggcaccagcatttcctccccttactgcccaaggctggggcccagggccagaagggtataattccccatgtggctccaccaaacatggagaccttggagtgttctcctgggctaagaggcaaaggatggtggctctttgaggatgacttgcccaccttgtgccccaccttggtgtccctgctcccatctctgtctaaataccgtcttgctgagcatcatttcctggctttgcagaaagaattacagggtcctgcctgcctttcttgggtttagataatggagctgaaagccaatgaataaaatcagaatgatttcttaaagagggatggaagatccaacaacaacaacaaaaagaaataagcaaacacaaatgaaagggggaagtctcccaggtcggaggacctgcagtctggccagagcggctctgctcaaaccacagggagaagcttaacattgtggccagtacacatgtactaaccccatatgtgtccacgattggcacggaccttcccttacttggtgggctgcagtgatactctattccattccattccataaacgcgtgttgacacggctgacttgatgacatgattccctggtgcatcgtccctgcttcatttccaagaggaggcagcttgtcccgaggttggcacgtggtaccagcagtgcctctgccaacacagcctgagacatctgtccagactgacgtagttggggaaatgggccgagccatcctgcatcctcactctctgtggccagaacgctgactgttgcagcactgtttggcaggactcagggtgggaactgggaccttgtggagaaaagggtggagagcaacataataggctctgactgggattaggtttcaggttctccctggagcatcacagagtggctctagttttcttcctcttgtgataacatctggcctttactgagtactttctatgtaccaggcactgagagcaatgcttttgatatatatttctttctttcttttttttttgagacggagtctcacttgctctgtctcccaggctgcagtgcagtggtgtgatctcggctcactgcagcctccgcctcccaggttcaggcaattgtcctgcctcagcatcttgagtagatgggattacaggcataggtcaccacgcccggctaagttttgtatttttagtaaagacagagtttcaccatgttggcctggctggtctcaaactcctgacatcaggtgatcctctcgcctcccaaagtgctgggattataggcataagccatagcgcctggcccgatatgtatttcatctcacttaatgtgcataacagtcctgtcagggagatatttttgttgtgcccattttatagatgggacaactgaagcccagcaaagtcagaacactggccgaggccccaagctctgaggccaaagctgtggtgggaaccatttgggttgggtcatctcatatctgtggactcctccaggaagccttccagcttctaactctgctgcctgattgcagacctcgggtttcgagtcccagaggtgttgtgagaggcagtgaagcagggacaccaagtcctcctcaggccaaagtgatttcttgttttttcacaaaacagccacagcagcagccacagctaaacatgtattgagcacttgctgtatgccttgcactgcagtgcctcgggctttttcacatattatctcatttaaaccttgcaccctcgatgttatggaagaggaactgttattattttcattgcacagatgagaaaacggaagcacagaggactaataacttctcagggtcagcttaaggatgccagtgagtgaaaaatgtcccttgctttctattcatctttttgacttaggtgtctgaggaagagagtttaattcaaaccttactgctgagcaaccaacctgtcttcctccctccgggcccccaatcacaaaaataaacaagatctgccactagggagattgttgaggtcagggagactggggaccggctctgggctctgcatgtggtacctggggtctctttgcagccctggaagggctcgtcctagggaggacctccttgagttgccttcagccctggcctcagctggaaacagtttggatgtctgcctttctcgtctgtgtccgcaagtacagctctgtctacccatttctccattcatatgctcatagttattgagggcttccaagggcctgatgccgggccaggctccctcttggagccaaacttgctgctgctcggacaaaggagccgtcccatactggggcatgggtgtgtgtataaactggtcttaagatcgtaggcacaggtagattccgaggcaggcagtcactgcacaggggaaatgcttatgcaaagtagcaatccttcatgtcttcctggagtaatagtttaaagatacgcagaaaaatatgtaaatatgccatgcatttagtttttgccaaactgatgcctaatagcctctgcaggctgttaggaaaccttgtcatgcctgtgtccagctctctctcacaacgattccttaagctcagcaaagatgaagcaggaatttggtcagtctgttgtcacgggaagattttcttcccatgtacacatcaactgctgaagatctgagaatttaggaaaactaatctcttatcctcagacacaattgtatattaattgcagctggccacagttaggcagggtgtagagggaattatacagacagggcctctcggctggttatggaaagagggaaatatttttaggacttgcaaacacgcatgcaggcgcgcacccacccacgctgacacgctcattcacttactctgcccacggactttatgctatcaatagatgctcacggatgctatttctggcccggctttctggatttctgttccttcatggaggcttgagtcagcagttctgagcctcagcgcctggtttttgctgcctggctcacaagaagggcagccctgtgccagcttctgtctcgactgctgcgggcaggcgtgggaagaaatttaccccagatgctgcacattcaccccagggcagtcacaggtagctgctgtctctgttcaaaatgagggaaggacggagaggcagggaagttctgcatttgctttctgtgctttcgtctcggaagcatctccaccaccgggccactgaggggagcccctcccaccacagaggcgcagatccgcccttctcaacctgcctctccagtccggcctcagaaaccagctttgctgttgattttggcagctgggagacgccatctctgtttacacccaaatgttttccttaaaaggccttttattcctagtacaaagtagcctctagaaccagtgactttaaaccttagaggaactccgtggattaacacatcaacattcaaagcaaatgcgacatcaaacctctttaaacaagaaccagaacgtttttgtggtgcttactgaattttctgttcttcttggaaatagtttccggagaagaaagatggataacattggttatgtttttgatcctagacagatacagtcacctggcttaggtgagggtgttggctctttcttcccaggtttagaatggaactgggctttatttataagtaggagcctgaactttggagactgagattttatttggccacgtgtctgctgtgggccaccctctcgattttcacctatgatcttaaacacagtttataaaggtagttacaggaaggacatctgggttatccgaaggaaattgttatctgagaaaggccacttaaaatgagtccacttaataaatcaaagttttatggttaatagtgggaaaattttttttttttttttttttttgagactgagtctcactctgtcgcccaggctggagtgcagtggcgcaatcttggctcactgcaatctccgcctcccgggctcacaccattctcctgcctcagcctcgcgagtagctgggactacaggcgcccgccaccacgcccggctaattttttgtatttttagtagagacgaggtttcaccgtgttagccaggatggtcttgatctcctgaccttgtgatccgcctgcctcggcctcccaaagtcctgggattacaggtgtgagccaccgtgcctggccaatggtgcaaaaaacgtttttaagacttcactctgaaaagaaatgaaaaattatgaaaatgattttattttagatttaacaaaatgtagacttttttttttttttgagacagagtcttgctctgtcacacaggctggagtgcagtggcgtgacttcggctcactgcaagctccgcttcccgggttcacaccattctcctgtctctgcctcccgagtaactgggacaacaggcactcgccaccatgcccggctaatttttttgtatttttagtagagacgaggtttcaccgtgttagccaggatggtctcgatctcctgaccttgtgatccgcccatcttggcctcccaaagtgctgggattacaggcatgagccaccatgcctggccaacagggtcactctttcataaacagttctgagggcttctctcagttctttcatcttcacgttctctctttgaagccaccttctgtcctcatcctggctgagtttctcttcttcagttgctcacaggtctgactgtgccagctgccctttcttacagctttggggtaggttttgagcaattctctggtgtcactttaattgactccatgacatcctcctccttcttccaggtttgcagttttgctttctggtttttggcactgtatatttgctccttcaatcagcaagagactgccaaagactagacttgtgaggacatgactgggcacagtgtctcacgtctgtagtcccagcactttgggaggatcacttgagcccaggagttcgagaccagcttaggcaacatagtgagaccacatctctacaaaaaatagaaaaaattagctaggcatggtggcacacgtctgtggtcccagctaatcaggagactaaggcgggaggatcacttgagcccaggaggtcgaggctgcagtgagatgagattgtgccatcgctctccagcctgggtgacagagtgagaccctgtctcaaataaaatacagtaaaatagacttgtgaagacaggaggagcatacgagggaggatcaagtctatacatggttgctttgttgatgacattgtcctaatgctgccctttgtgttctcttatgtaaccttgttaccatggaaacttgagcggtggggacccttagtgcaggatgggggaactagaaatgcatccctgggaactttgtagttttaggattttgttgattgccaggagagctgaggagcccctgccgtgcttgctgacatagctatatggaagaatattgtattggtgggaggatattgttgaaggcatcagccaccatatacatacagtcacctggtgaagggcttgtgggagaatgcgtgttcagaaagtcacaacagaagctgctcatccatgggattttttttttttttaacctgtcggattttatgaatcatgtaactgatcatagtggttgccctttttgctttggctgttgggaaacttagagccagacttgtaccccactccagcaagggcttaggtcagcacttccacgcttacctcactccctctggcttttagccaccttttcttcctgtattttctttgttctcttgaattgtgggcttaaatcctttttgacattaggtagagtatattctctcaaaagctacctcatgagcgtctcctaccatttccgtctcaaaagagctgaaatatcaagccagcaatggtgtgtttaaaaaaaaaagaaagctgaatttatgtggtaaagaaagaaagattttgaggatcatattcagtcttttcgaacgtggtatgtgtgttactgattttttttttcatatgtgatgagaattcttaatgctaacaacttttgtatagccctgagattttggggactggccttcctccctccttccctccttccctcctataggtatcaaagattacaaatatattctgaattcttaatttgaaaataaaagtgagtctcgactggctgtgagattacaggtggctcacacttgtaattccagcactttgggaggccaaggcaggcggatcacttgaggctgggagttcaagaccagcctgggcagcatggtgaaaccccatctctactaaaaaatacaaaaattagctgggcgtggtggcgtgcacctgtggtcccagctactcgggaggctgagggaggagaattgcttgaacccaggaggcagaggttgcagtgagctgagatcgtgccactgcactccagcctgggccacagagcgagagcgagactccatctcaaaaaaaaaaacaaaaacaaaaaagaaaacccaaaaaacaaaagtcagtctcatctgtgtttactgacttcttttctaggacatttgggttacctccctgggtctaatagtaaaattcccagtcttccacctctgtcataactgaatcaacagggtttttcctgctgaagagtcacctgtagagctgtccttgcttgtgaagaactttgaaaggttccaggtgtaaatatggtgaaggtggtagaaagagatgccgtaaatagatcagccctttgcaaggagagaacaagagaaccttctggaaaagatggggcttcaccgaagcttgtacttaagcccaagaaaccacttagactcccagaggtgagcaggtgagatttaatgttggcatgtaagaggttaacagaatatctgtaccgctgcaaataaacgaacacaaccatcttctgccttttctctattcatcataagacagagttttgccaggaccttctccccatcctctgaggtctcgtgcggcatgtgtttatggggctctggctgtgcttggggcaccctgcatggctggagagtggagacaccagacacagacacacctgagactcttaacaaggcaagaaagcgccaaggcatcaatatgcaggcagccgaggggatgggaagaaagaagtctgggggctggcagggagcagacccctccagggagctgggggagctgggatgtgattttctggaggaattgagagagatgcagaagttgaggagggggcagctcctcagcagtgaggccacggtgaggacctggccgtgctccaatgctggatcaaagccaggaggtcggattgggacttttttgcaaaggcagtggacgacttttggaacaagactgagtgatgcggcagtgtgtcctttggggacacatggaaagagcatccatcctgggactgtgacacctgggtggagaaagcccggcaccgcaccattctcgcctgagcccaggttctgtccctgctcacatgtccctgctcctgttgacatgtgggtgctgcattcaggccacacagcttcccagctcttcgaattttcggcaaggcagtgagcatgcctagctcagtgcagggctcgggcgttcaggcactgctgggtgcagagttgtgtgacacggggctggatgcctggggcctcaggtggagtaacaagataacactctcagagacagcccagagctggtctcaagcttggctccctgaagagaagtcgctggggttttgtccagcctccctctgctcgccaccatggtatagtgggtggtggtgaagacccagggcttggaggagccctgttctccatctgtgtttacattcttagctcctccagatgggtttctctgtgatctgacctactttcctgagtgtatgtgctcgggctaattagcagctcggggtccattggtggtgtttggagagtcttgctgctatggcaactggagactccctgaggccagaggcaaaggtggagccactcacctttgtttttcttggggtgtcagaggggtctcaaactacttgcagtttctgaccatggctccgtccgttgaacctctgtgggactgaagaggctgcactacatagcttcagtttatcttttggctacagggatttgtcaggtttgctgatctttctggtaggtgtcacaaagtaatgtgagaataagctggtttccacttataggccaggcacataataggtgcattaataaacgttgaactgctttttagaaatgatggatgcattccttgatttatccaggtttctagggtgtctttggggacgtcagtaggaaggtttgcagtggagcctgtctaagcgggcttagcctgccttcgggcccctagaatatgtggactgtggtctaacagacaggcccccaggggctgtttgagttcagggtctcattagggtcgtgcttaggagtagtggggttccctggatggcttaaatagaaaacagtgatttcttccagttctggaggctggaagtctgagagcagggtgctagcatggttgggttcctgatgaaggctctcctcctggcttgtagatggccactttcttgcctcacacagcagagaagaagtgtgtgtgtggggggggtctcgtgtctttttctctttttatacgggtataatctcatcttgaggggacccttatgatgtaatctaattctaattacctcccaaaagccccacctccaaataccatcccactagggattagggcttcaacacatgaatttgggagggaggcgcaagcattcagtccatagcacagcccttttatcattctccctccttattttcttcagctttacattttctgtaggccgagttactagatcaccagctttgttttaaattgtttgtaaagtcagcatggaaaggtcttcaatgagggtctgagagactcttccataaataatttacacaaactaatcatacatgggttttagttgtatcgactgtaatggtgcccacattctatttgtttctctcctggttcttttttttggagacagggtctcgctctgtcacccaggctggagtgcagtggcacgatcatggctcactgcagcctcaacttgctggactcaagcacatcagcctcctgagtagctgggaccacagttatgcaccaccacacccacctaattttgtttatttttttgtagagacaaggtctcactatgttgcccaggctggtcttgaactcctgggctcaagcaatcctcccacctcggccaccccaagtgctgggattacagatgtgagccatggtgcccagcccctctcctggttcttgattgtgtttttgacagccgtgagatggtgttgtcccactaagtaatatgccctgtcactacatcataactttgcagttgttgggattctacgtaaaagcacttcactttaatgctgccttaatttcctttatggtactatacttggggggaaattttttcttataaataagaatcctggtcctgggcattcatagatggtatttaatttactttttccaatgcccttgcaaaatagatgcttttcctcttttgccagctgaggaaataaggttcagtatggttaaacagtcggctcaggccacacagctaacgagggagaagtcaggatttgaactcgagtctcatttcaaaccctatcttgttatcgcagcagaacctttacctattaaggctaaggacgtttagatggctttgtgcttttgcacctcatctgaaaaatgtttttaaaagttggcagatgagttctaattgtggttcctcatttttttcctcatgtattttctgagtacgaggcttggctgaaggccagttcctaggtgcccagggaaagggccactttcttcaaaacagtagtagcccaggttagagcttacagatgtttcagctccacgtggtaagcttctttgggccctcacctgcatatggagccgaagaggtctgttttctgacagagaaacaaacccccagggtgctgagaatggtgacaggatgaacaggttgcaggatccttgccaccaagtgacatccaatgctgacagtgagtgacggcttccccgggaggtgctttccagagcacacctcgtcacaccaccccgacagccaccttccccgcaagattgacataatcattagctattttcatataaatgcaaaagtaaaccttctcagtgtttctgggaaatttcatgctgttacatcccagaaaacgatgttgatcctctggcattctgtttgacactgatactgaataagagcagtggaaagtcagtccccgtgaagctctggaactactgtgacctcgagtgtcagtatcaaaagagcccatccaaacatccttggccacgtcgctagaaaacagtgtattggaggcaattttaaaatgctttgaacaattttgtttttattttcttttgcttttggccacagtttagatacattttaggctcactgccctgtgggtgaagacaagctgggaaatgtggaagagtcttccacttacccatcagaggttccatttgaattcagttgtgagtctgggctgggagcgcaggaagcggttgtgttgaatgtacagcatgaggggatggtggggttcccaggtgtgccccaaacctcctgtacctatacagagatgaactctttctgcagcagcctccagtgaggaggctcaggatctcaagtcttgagggtttctgagcctgccataggccagggacagggatttggctgctgatgggtgacatgctgccagctacagaatggggctgactgggcactgggagcttggtgatggggtgtcacggacattcctacaggcccagcccgtgtttagaatcacagagctgagccgatgcatgtcacggagaactgcctttgccctgtacacgcatgctgcattaggggcctgccttgggcggctcagctggccgcgcctctgcttgtttagggtgagcctttgcacagggcttggctttgtggagctcatttggtggccaaagatggtgttgcagccccagcccgctcgcaggcccagtaccttttgctccctagcttgccccaggccctcagactgtgcggtgcaaaggtccttggaggctagccccgggctggctgtgaggggagagccaggtgccgcagctctccctggtacagacttcagctgcctccaggacccggggcctgaaggaggcagaagccggcggtggaaaagggcgcacgtctctcccagcgtcgctcccgctgcccgctgcccactgcagcctatttacctgttcctccagccatccccttagtcctgggccgggagagaccatttcctccttcctggagggatgagccaacagggctgagccccctactctctcggtggtcagcccgcccgaccaccacgcccctcctttctagggccccagctcccgggccgcggctcgtttgcatttcaaagctacacaatgcgggcggtcccggcgaggcgggaggggccggggcagagggagggtcttcgcctccccacccccagccccgtttccggagcccgcgatggagctttgtgaagatgcaggcgttggggctgctcggcgatgatgacatcatcgtgtcacacacaggagccggctgccggggggtttaagagaagagcctttcggaccacaccggcgctcacgctcatacccgcacgccccgggcagagccgcgcacgccggccacactcgggcgcgcgccggccacactcgcgcgcacacatacgcggcgctcgccccccggcccccggctcgggccgcgagtcgcagctccctgccgccgctcccgccgccacggatgcccgcagctgctcccctctgcagtgcagcaaccccggccgccggccggctcgccccggctcccggctgcaggaatcgcgccaggacgctggccccgctcgcggctagcttgcacgccagggcacagcgaggatgggagggtcgcagtccctgcagccagccccagccagcgacctgaacctggaggcttccgaggcaatgtaagtgctccgcccgggccgccccgagtctcccggggaggaggagaggatgcccgggctttgttagtgtcgcctttcctaatgcctgtgcaacctggagcccaggctggcctggggttcttcgcagccttggaaagctttacctggggctgctctgggaggagcatctggtagccccaagttactgctgtgggcagaaacgattccctggaattcagttttggtcgctcagcagtgggtgcatggctggggggcttctcctgccgtcagcatctttcctctgcacccccggcacagtggtatttcctgcaagggaacagccaggcatcagcgactgcctcctcctaggaagaacccatgagcgtggcagctccgtgcccggggcgacagcccagtttccgggcagctgcgcttgtggctgggcagatggcgtggtgcgctctggtggacgttccgtctagttagcctaagcatcatccacatactctggtgaacactcgaggacaaggccgcttgctattattagtaaagggccgaaccgtcctgtcattggtggaggcagtgcttgactgtgcatcgatccaggaatccgatcttttctctcaaccacagagctaacgtgctcagaagtggcctttatcctggccgagtgtttattagaattcacgtttctgttatggtcgtctccattacctacccaggcatgtttggacgatggggcgtattgaatgggtctgccggccgggtcgcatttcagcaactcaggcttgtatccaaagtggacctcccagcctcacctgcccccacttttccagagagaagactatgtttcagagaagagtattttctggggacttgggggtaggggtagtaaagtgggttcttaagagtcatggatgtgtagattaaaagatggtggggattgatctgtgtgttgtaggagggatggggccccggggggtacttcctcactggtccctcgacccctgggcttcagtgaggagctggctcggcgtagtgatgtaatgctaggctgagcctcgtggttttctgggctccagctctttagcagggagtcattcttccgagcaggtgtgcacccatcatttgtcttcacccctgtagcttgagaaagcatcgtcttacaatggaggcacatcgcgtttgaggattttctttttaaatgttatgatccttgtgctgtgcctgccttgtttctcatgcacgtgtagtgttgctaggtgcatggaaatacaactcgagtctaggcagaaaagaaccactttaacctattttttgcaagtccctatagtggaattgagttaatcagtgacaggcactggccaactctcacggctcagacctatctagtgaagagcttaggaaacagaaaggacaatgtgactgtacgtttgggaaaatgtgctcctcagtcattggaaattcagctcgccggtccctaacgtccccgccctctttttcagctgagttaataaatgatcagtgttccgtcagctgagggccgagtttagatagcttctgttaggtagctgtgcctttttggataaggtcccttaaggttctgcccactgggatagtggtgtttaaataaaatttcaggctgaatggccacattgtgatggaagctgtttatcaaatattttcacagttgagttggtccatatgcccccgcctgaggcttctctccctagaactgctgcctctgaaatgtctctaaatatagatctttacgatagtatattcactcattcacaaaatcccaccctccatcccgtaacatttttgttctaaaaaaatggagagagaggaaatatttggggccagtgccattgctagcatctgtcctcttcaaaacccgtctctgctctctgaataactggggcttatttttctagtgcagatgtgctctttcccagtctagaggttttaaaaatatatattcggagagtgcctcttttctgcccaggcacaggtctttcttggtagtatttccatgcagctaaaaatgcatgcacgtgaataatacacaagacagcaacagagtgtggggcccatggcaggaaagaggttgcattgtaagatgatgccgtcagggctgcagggatggtgacaaacacagggtgcgcacctgccgcgggggacagctcctgacaaccggaatctagagtgaatgtttccctttttctctgctggttccctgtgaaagactggcttaaggagggccatggtgtaagagtgaaatcaaaagatagaggatttggaagtgactgaaggatttttttttaatttaaattttttagttttaagatttctttccttccaattgcaggtttggggtgcctttgggcagcttttgtagctccagctgacagcttcattctatgcaggagtgcattgggctagggagggagcgacttttgtatctccccttttgagaactcaggcatcaagattggagtagcagaagtcccatgggactggggattgaagcctgaggatgaaggtgcaaatggtgaccagtctcttgctactcccagggtcggccacacatgacagcatcagcttcccaaaggggcttgctagaaacgcagagcctcagacctcaccccagaccagctgaatcagaatctccatttcatccagggacttgtaaagatgcccaggtgatttgtaggcatctcaaaatttgagaagccatgagctggttcagtcttccctccatcctgtccatgagaaacagctggccacttctctgactgctcctttcctatctggcaaagaagttcttgtagcaatagtgaccatttgtttctaaatagaatatgagtagcaaggggagggagaattctcccacagaaaacacttatttctcagtatggatggtaggagacacaggaatggacaggaagtacttgagtaaatgtgggctgcagctattgatcagacctgctgttcatcccttgattctgtggcagccccatgtggtgtggcttctgctaagtggggcagcattaagtactttgtcctttatgtagttggagacccccgtttcaggggttccctcagcttccaccaaatccccacaccctggccactgaaaaccacccagggggccattatcagagagcaaaagcggtggttctgttggcaaagtcggcctgccccgactgttgccctactctcaaagtgagcacgtgcccttggctctaaaaaacaaatcacaaatatggaaacccatactctgtagacctgtggatcgaagtagaggggccagggtggatgggagagaagcgatggaggaggaagcaacaggctctgtgattgatgagatgggggagggaagagaagagacagtggcaagtacaaaatggaagtttcataccctggtaactaagagaaagaagtggcattggccaagacagacaagaaaactggattgggagctagttcggggaagttgatgagttggctgagatttcagaagtgggtgggatcagatgtagctggagagaggccaggcaaaagaaggatctcgggtaccaccgcagtaggtagagagattggagctctccacacatctgtggttagaagtggggttctggtcccttcccttatgtggttcctgaccttttctttgggagctgtagagaaaatccgatgactctgatcctgcccctcctgcctcgcagggtttttcagaggtgagatgccacatctgcaaagactcttgagaagacgtaagtgccagaaaactgcaaaagtggaaatgccctatgcctgaaattgccagcctctcagtcactcagaaggccagaaacggtcgctggggctctaagcaggactctttctttagctctcattagatctttttctttttctttctttttttttgagacagtgtttcactctgttgcgcaggctcatatgtaacagtgtgatcacagctcactgcagcctccaccttccggactcaagggattttcctacctcatcctctcaagtagctgggactataggtacacatcaccatgcccagcttttttttttttttttttttttaaataattttttgtagagacaggggccttgctatgtggcccaggctggtctctaactcctgggctcaagtgagccatctgcttcagcctcccgaagtgttgggatcacaggcatgagccagcgcacccagccatagatctttttcaaggctttgtttcttggggcagcccttggctaaatgctttagcttaaacgacagcattcctaatgtgagttgcagccagtttctgagttcctggacggagattttactttggatattactgttggacacaatagagttttttctcccctaaaatagaataagctgcaacattatctgtagagtgggagggggagattgattcccaaaggaagcttgggtgcatttttccctgccattattcctagatatcaccagcgtggccctgtgcctgtgttcataagggtcctgggccttcactatcttctctgggggacttgcctggaggctttctcttaggtgggctgaaggcaaatatattccgaggtcctccaggtagctaccaatcatccaaggggccatgccatgctagggccctgggacagggtaccctgtcgaggatggggtgaacagctaggacttggatactgattgagtgtggcactgcaggtgaacatcagatcaaggtcagtggattctgggttgctcttccatcgaccctcccattcccatccctgtgtttctttccactgtctacagcctgtttctgtggctagatttttggttgcctaggaaacaactttattctgaaacatgattggctgttcttgcagatggattacccaagctagggcagtgttctggggtaagcaagtgatgctgaacaattctgtttcttccctttaagattaatggtgaggacttaggcattgtaagcaattgttctgtgaaaaccaattgttcatggactgatgctttgtttcaggttggacaggggtttaggggagactggttggccacaaagaactgactgagtcagaactgctcacacacatctatcctgtgttggaagcagtagctcagatgacatttctgtttatatttacaaattcactttagcagttgtttctggagtgcaggtgtgtgctgtttaaacgccattgccaaatatggaaacagctggatgctgcagtgttgaagccaggagtgaaaagcccactgagcaggctcagattcagcagaaactcttgtgtaccatgtctgtgtgctaggtttttttcattatagaaataattatatcccttaatcctgcaaggtgggtgacttctatagataaggaaactgagtcctctggatggtttaaattaagggagcagtaaactttctgtaaaagacctcatagtacatattttaggctttctgggccattccgtctttgtgcagcatctctgctgttacagttcaaaagcagccagagacaacatgtaaatccatgttccagtagagttttagttgtaaaaacagactgcaggttgtagtttgctgattcctggttatacggatgattggtacagggctcagacttatgtcccctttggcctgggcaatctttgttttctgttctctctctctaagacatctcatttatgctcatggacttaaataatatgtgccgataatgccccaatttatagccttccctctcatctgagcactgtaattttccttttttttgagacagggtctcgctctgtcacccagactggagcacagtggcacaatcatggctcactgcagccttcatctcccaggctcaagtgatcctcctgcctcagcctcccgagtagctgggaatacgggtgcacgccaccatgcctggctaatttttaaattttttgtaaagacagggcctccctatattgcccaagctggtcttgagctcctgggctcaagtgattctcccgccttggcctcccaaaatgctaggattacaggcatgagcctctgtgcccagccttaattcaatagtttacttcatatctcctcttggatttctcctggatagctcaggctcaacatgtccaacgtagaactctgatgaccatcttcctcttaaaacaaaaacaaatgtgcattcaaacgaacccagccccacccccatcttcctcatctcaacacctgggaccttattcacccaggtgctcaaaccagaaacctgatgatcaagtcttttttttttttttttttttttttgaggtggagtctcactctgccccccaggctggagtgaagtggcatgatctgggccacattgcagcctccgtctcctgggttcaagcgattctcctgcctcagcctcccaagtagctggaaatacaggtgcacgccactgtgcccagctaatttttgtatttttagtagagacggggttttaattttgtattttcagtagagacggggtttcatcatgttggccaggctggtctcgaactcctgacctcaaatggtatgcctgcctcagcctcccgaagtgctgggatcacaggcgtgagccactgtgcctgaccatgataatcaagtcttatcttcacttttccctcacctctcttctttctagaacggtccatgtcattggacttccatggttaaaacctgtatctgcttcccattgcttttagtctaaaatccaaatcccttgctagcgcctccaggccctgccacctggctcccgccgctcctcccctcgcctgatgttcaccaggatctggtcgcctgtcagttctttgaacacacaacaccgtccagcctcagagacttagcacactccatccactcccctcagcgggcatcttctgctccgtcccttggctggtctcttttttcctgtctttatctccttccacccaaggaagttgctggctgggtagaccaggagtctgctgcaagcactgcagggcttgtgaggaggctggtgtgtggctgtgagcagtagattaggggccgtgagcaatagatttcctttgttcctgcattcttagcccttacaaaggaaagcagtgggccttttaaaaaggaaggtgggtcttttgtacagtgcaccccatggctgtgcaataaatccggtgggggtggtgggcctccccgcaggttttgtacctgtctgcctccttattcagaaggacttgtttcctctgagtttctgcttttgccttttcgtctgctttctccttaaatggaagtggatggatgcagctcttcatgcctaaaacagaagccttgggctctgggcagagcagtgggggccgaggtaggggggtggaggtagggtggggtggcccctctgctcagggtttcccggagccctactgacaggcagtcacagtggctctgtgtccttatggggccgagaactcaggccagctgctgggccaagtttaccatcaacattccagcttcacttactccaaggtgtttgtggagttccagagtctgcggatgttagaactggaaacatcaggattttagaaataacagagggtttaaatcccccagcacttcatttgtgaaatatgacttaggcctttccggctagtcattattcaaaataagtcaggtagtcattttaatcttttccctttaactttcaatgtgctaaaagaaaatgtttgtaggtggacgtatcatttggtaaactcaaatcagaggcctcttcccacgtggtgaaacagcttagattgcaaattctttgtcccatgaggaaatgcaatggatggttaatttgggaataaaaatgagcctccttgggcccttggccaggcccttccatgagtcttattagccttgtgtctttgctctgaagtatttttttcttttctgtctccatacatctccttggggatgttctagaggtcagttccaaggaaggtgggtgtttactgtgttcagcccaagtggaaaatagctgtagccatcttcagagaaagctgacccctcctgaggaccagcaagcccagaggtggttggacaaacatgtgggctctcggtacctgacacctgttgagactggcctgagttaaaaccatccaagcctaaatgtggagccctagagatgagctagattgtactcaaggctgcagggatatgacccatgactcctggggccttaattttatgttttgactcgtggttacagcaggctattggtctaggttgaagcttgacatttagaaaatacctgggctgctttccgtctactgctgggtgacagaatcaggcaggggagggcacagcctgttgttgctgcccacccaggaggagctgagtttgctgcagcagtcctgtgccagcaccacccttcctggggctcagatctgggtctctgtacttgagaagcagcccacattccaaggggctccagcctctcacggtgactcctctgtgccacttatccaggcccctggtggaagctgcacattgttcattgttctgcgttaaagggaggcgcctacagtggtctggaagtattttccctccaggaagaaggcgggagaggttggctttattaactttactttagggaaaacatctgcgcacatttagatcctgcatggaacttcccagctgagcctctttcagaagaggatcctgtgactgcccattgcctttcatgaatggccctaagacgccgtcctggggcgcagggctgctgggggagtgaggagcatccctcacagcaccaggctcttgtgggaggaggaagagccaggagtgcacagagggtgagcaagagcagacggggagggcagggggtgaggggcaggctgtccctttggcattctggcctgtgtgtgagagcgctgagtttggacccccaaacctgtgactagcggagtttgtgtgagcaggcgaaggcttgtgaccaggagcctggggcctaaagaggtgtttctgggcagagctgtacccagaacatcctcagacaggttttgcctgtggcctcagcttgggtacctttggttgcaagtagaaaaaaaccaattcaaactgacttagagaaaagagggcatatatcgcctgtgcctgacaggtgagattcctacaggggtaattgctaggatggctttagagaaatgtgccctcctcaccccagacaaccccaaaaagtccaaagcatcagagtttttgggttttagaatcacctttgatctagaacagctgacttactcctgtggcttcctggggctgcctcatcctctctgcaacctccttggcagacatactggcttccagctgctggggaagtttgtgccccagcctcagtgacccagagccaggctggggtctgaaaagagagcggggctccacgccctgggctttggcttggcccacgaatgccccttaacagctcagatcagtctcctgccctaactggggaggctgtgggaggcaacctgctcctgggcaacttccagatctggcacttgtcacgagcatctttacgtgccagggcacagcctaagagaagtgacacgagacacagaagaggcaagaggctggaggagtgtggtcatatgtggcactgtgttcccaggagccctgctgctgatggccctggggtcagtggggaagagcaccaggcaagaaaggaaaacatgtctgtggaaggtggtcctttgcctgccctgcgagatgaggggaagcaggacttcaggagccagaggtcttccttcttcatgtccttcctgcccagcctttctggtaacagataagggaagagcatggctgagcctgctatggagcacacaccatgaaagccagcccctctctgggggcacagctcttaccctccagccccatgcacgttccaggctccatgacctggggccagcagccacctgctcccatagacagggaagtgggctaggctgggctgggctgagccaagccaagcctaggctgcggccagcggagctcttctgcccgcctcctctctccctttgtgggatgggactgtcccttttgtcctggtcatgccacagggctcggtggactgtccaagggttctttgtcctgattgtagtttctccatttcctctttgtttttccactgggtgcaactatcagtccatatctgtgacctgcatattttacctggaccaacaagacaggtggcctaggggctgagggtgtgcctggtaaactcagccagcactcccaagatagagcctgcccagatcagccttagccagcgatctctgctgttaagaacagtgcaacgctttggcaatacctcccagaaaaatagctagtgggcaatggcactggctcagcgcagacctgccctaggtttctgggcacatgacagtgcccactcactccatgggcttgagaagactggcattcagggcctcatttatgatgtcggtgaaatggaattaacctcccacccgtgtctccctctctgttgctaaagaattctgtaggtaagaaagagaatgcataaagcgtttagggaaccaggagaagaattggtgcataaaacgttcgtgaaacactatgctcctgtttttttttaaattgagaaataaaaattccattgtagaatggctaaatcaagctaattaatgtattacctcccctcctttttgtgtgtgtagaatacacttaaaatctactctgttaccaattttcaagtatatagcacattgttattgactagatagagtcactaagttgtacaatagatctaactgttgaactaaccagtagttgaactaatttctcttagctgactgaagttttgtgcctttgaccaacatctctcccccatgtcccagcctctggtaaacagcattctactctctgcttctatgaatttggctttatttcagattccccatgaaaaggcgatcactgtgggtttcatttatttttaaattttatttacttattttgagatagggtcttattctgttgcccaggctggagtgcagtggcacagtcatggctcactgctgcttcaacctccccaggctcagatgatcctcccatctcagcctccctagtagctgggacacccctggctaatttttgtattttttatagagatgaggtttctgccatgttgcccaggctggtctctaactccagaggtcaagcaattctcctgccttggcctcccaaagtgctgggattacaggcatgagtcactgcacctggcctggctttgtattttaaatacagcataattcttggtgaagaaaaacactgaaacactgatgcattgtggaaaaggatacattagttaatgtgggaaaggatacattggttaatatgggaaaggatacattagttatcactcctgaactgtttgtaacaacaaggaaaccccttcattcccgtgctaatcctcagaaacaaacctgcccagaccccgttctgtccagaatgcagtttctgttctttgtgctcactccttgggttcacatattgcatttctcgatgtaggctcaaaattatgtgaatttttatttttctggatactgtttttcttccacttcttcaaatgtgactatgctttcaaaaattcagagcttaaatgcctgtgagaggaaaggaaccgaaggtgtaggggtgaccaggtacggactttcctggagactgtctgaattgtctacaactcagggaccagggaaatatcttctcactatccagagataatattttattggtcaaaaatattagaaaatgggccgggtacaatagctcaacgcttgtaatcccagcacttcaggaggctgaggcaggtggattgcttgagctcaggagttagagaccagcctgtgcaacatggccagcatggcaacatggcaaaaccctgtttcaaaaagtacaaaaattagctgggtgcggtggtgcacgcctatagtcccagttgcttgggaggctgaggtgggaggatcgcttgaacccaggagttgaggctgcagtgagtcgtgtttgcaccactgcactctaacctgaacaacagagcaaaaccttctctctctctctctctctctctctctctctctctctctctctctatatatatatatatatatatatatatatgaagatgaaattggagtagtcaagttgtaagatagaaaaggccaaagtagaatggtggctgcagatgaagattgggtaccactcaagatggctttcattctgagttttcacatttgtaaactcagaggtctggctcttttaatatatgggtccttattcttagaagtaggaggctggctttgtcatttaggattgtttggaaattggcattcctgaaattctcccttcaggtcctccctggtcaataaagaactttgactcttgcgccctcggttggacagtggttttgtgcatcagaggctcccacaggggagttgttgggaataggctggctcttgttctgtgagggactaggggactcatgctggtgctcatagctcatcaagagtcgtagcattttacttagtatcccattgtatgtgtagacaaatatagatttttttttctctgtagaatgtgtggccttgtagataaccatgcagattcaagctgctgaaaggcctgatgtggccctagaaagccagaatttgaatgagattagtcacagcaagtcagcaaatgtgggagatggaaaactggcttcctccacccacctaggttctttggctgggctacaaattaaatggacataaaatagattaacaggagaaaaaacacagtaattatgtgtatatgcctgggagtcccacaaaatatgagactcaaaagaagggtccgaagagggaagcttatatagccccctgagccacagaaaggaatagggacctggggcttctggtgggtggtggagacaagttatggaagagtgaggggaggaagtgtagggtgagtaaatgtggtcttgttatgcccataaaatctcttggtacatcacagttgcctggagcagccccagtcctgatagagatactttactaatgtagattttcttgatggatatcattgtgttttacaaaagggcagcttttcagagccactcctgtgtctgcagtttctcagaataaccagccccaaatatgacaagtatagtttggggtggtatattctggcctcctacagttgcattttggggtggtattgtcccgagccccaacacagaaaaggagggcagtaggaatttaagaatttcagataaagcattctcattttggaaggagcagtggagggaggctggaacagagagaaagtcaactgcatttggaagatgcagtttgaaaaacaatgagatgtttgtgcacagggccttttaaaaattataatgatgggaggatggagttgcagggatgatggcatgaacctataatcccagctgcttgggaggctgaggcaggagggtcacttgagcccaggagttcaaggctacagggcacaatgattgcacctgtgaatagccactgcattccagcctgggtaacatagtgagacctgtctctaaaataataaaatgatggcccagggagtggatggctcagaggtgaaaggttttctgagcagcaggagaatgaagctggggaggagataaggcccaagcctctggggccatgatctgtgatcgcaaacaaacaggattattctgtcgcagaaagaattgggagtgtggatttcagaggtgtacaggggcgaaacttgggaatggcccttccagaactgccatggtccctgctagaagctccagatcctgggtagaacaacatgccccagattcactgaggaggtgaaggagcagcatttcatgcctctgagaggcccctgaaccctggatttaccctgggttcaggtgtcagtaagcaagtctgccaagatcgaagatggacaacatttaatatacaatgataggatagctgagctcacctctggatatcttagactttttgggctgctacaacaaaatcccataaattgagtggcttataaataacataaatttatttctaacagttttggaggctgggaagtcttagatgaagttagatttggcttatggcgaaagcctgctttctggctcatagcaccttcttgctgtgtccttgcatggtggcaggagtgaggggtctctgtacggcctcttttataagggtttttttctttctttcttttttttttttttttgagacagtcttgctcttgtcgcctaggctggagtgcagtgtcgtgatctttgttcactgcaacctccacctcccaggtccaagcgattctcctgcttcagcctccctagtatctgggatcacaggcacacaccaccacacgtggctaagttttgtatttttagtagaggcaaggtttcctcatgttggtcaggctgctctcaaactcccgacctcaggtgatctgccctcctagacctcccaaagtgctgggattacaggcatgagccaccgcgccctgccagttcttcgttatttctgatgtttgatcagcgcatcctgtgctgagttaagaaaacaggataaagggtcaggcgcagtggctcacgcctgtaatcccagcactttgagaggccaaggcaggtggatcacttaaggccaggaatttgggaccagtctggccaacatggtgaaacctcgtctctactaaaattacaaaaaatcagccatggggttgtgcgcctgtagtcccagctactcggaggctgaggtgggaggatcacctgagccttaaagtttgaggctgcagtgagtggtgatcaggccactgcactccaggctgggcagagtgagaccctgtctcaacaaaacaaaacacaggataaacccctactgtttttaaagcaatttacattacaattccaagtgaaaccagaagcatgacttttaagtagcaggaacattgagataatggaaaacttggagcctttgagaaaacaaagcacaaagctgctcttgaacaccttgccatgaaagtaacaaaacgctgaagcatgtttataagtcagggctgaaaatcatgatgaagaggaaaagccaggtgactgctgtcagtttcaataccttatcctgtttcttttatcatgaaattgagtagttcgtcagcaagaaggtcaggtctgagcatctatttaaactcttaaccttgagactgtgatgcttatgtgatgtgggaaattgtatctgctcattagagctctgatatgtaattgaaatctgagattacttatctgccttgtcgtatttaaaccactgattatggctctgacatttttgttactcttcaatcaaccagtatataaaggattcagaatctcttggaattaagaaaaagctattatcttcctggtatcaattatagcgcaagtaaaaagcaatgccttttttagccaaaactttgcaaaagtacatgctgggatctcagatctttccttgatgcccttcactttaacccctacttttatgtgtgacacaaacccggccacttctcaccttggaggcgagcaagctccatacccttcttccactcctgctcctgctgctgttgttacagctgtcagaatggccttctaaaaacaactcaggggccaggcctgggggctcatgcctgtaaccccaacactttaggaagccgaggcaggaggatcacttgagcccagaagtttgagaccagcctgggaaacattgggagcccttgtttctacaaaaaatgtttttaaaaaattagcagacgtggtggcttacacctgtagtcccagttatttgggaggctgaggcgacaggatcacttgagctcagtagtttgagaccagcctgggtagcatagggagccaccatctctacaaaaaataaaaaaaaaatatagccgggagtggtggcgtgtatccatggtcccagttactcaggaggctgaggttcagaggatcgcttgagcccaagaggtcgaggctgcagtgagccatgattgcgccactgcactccagcctgggcaacagagtgagacggtgtctccaaaaaaacaggcgagtcctttccccgtgtaaccctcagtggctttcagactcctcatgggtctcagcgaggccaggtcattgtcattgttacctgcttcttgggtctcctggcaaactttctcctcgttgcctgctttgttttcttaaatggcctgaagcccattccttgaacctgccaccctccttccccctcccacctcagggctcttcatctttttgttctccctgcctgaaactttcttccccccagttctttttttttttttttgggttaatagtctggctttgtcgcccaggctggagtgcagtggcgcaatttcagctcactgcaagctccgcttcccaggttcacgccattctcctgcctcagcctcccgagtagctgggactacaggcgcccgccaccacacccggctaatttttttgtgtttttggtagaaacgaggtttcaccatgttagccaggatggtctcgatctcctgaccttgtgatccacctgcctcggcgtcccgaagtgctgggattacaggcatgagccaccgcacccggcctcttccctcgagttctaatgactgactcttttttcactcttcatgtctcagctttgagaagcctcccttcccagggagtgcaagaggaataacttattttattttttattttttttgagacggagtctcgctctgttgccgaggctggatggagtgcaatggcgcagtctcggctcactgcaaacctctgcctcccaggctcaagcgattctcctgcctcagcctctcctgcctcagctgggattacaggcacgcgcccccatgtccacctaatttttatatttttagtagagacagggtttcaccatgttgcccaggctggtcttgaactcctgacctcaggtgatccacccacctcagcctcccaaagtgctgggattacaggcatgagccaccgcgcccggccaagagggagaaattttaaggcatcctagagcctagaacaaacaatgccagccagcccttcttctgtttggctgattacagtttctctcttgagtggctgtgaattaattcagtaaatattcaagtgaaatttattgcttagttttacaattcctcgcccacagccactttagcagtatgtgtctgtgtgtgcatgttggagggggcattgttggatgtgtgggaagagcaagaaaatcacattctttttgcatcgctctgtaaactcatgaatcattggtacagctgtcccctggctactgggagcatggccgtgctttatgtttctttattgtgttaaggtgaaagatgcaataattttggtggtagaattttaacactttgaggactggagccagtaaataccttctaagtgcctgggattgtgcaaggtgctttacaaatataaactcagctctgaaagcaacccatctactacctactgttgcccattgcatagacaaagaaactgaggtccagggatgttaagtaacctgtccaaagttactcacctctcatgaatttggaaccagatcagttgatgctcatatttgatggctgtggtgctgttttctcctacaagatgtcagaatcgtgtaattcgtatattaagtgctttaatttagactttatcatttcagaatttttaataagtgggttaaagagtgagttgaggatgctgcattatgtatgagagaacagtgtgaaaacatcggaagcaggaaaagcacattttcaaggcattgaacaatacttattccctacaattagtgtgctgtttaccagctattctttttcttttttttatcatgtaaagaggttagaagaaaggaacaaaagatttaagtcttccttcctcgtgattgtactgctttattgcactgcttgcagactgcagtagaaaataagcttttaagactttctagattttcaggctttctactaagctgttgtagcttctccatcccacatctgggtttgctcactttatttctatgtgccaaatcatgattgagactcgttgagacacacagtagaccacaggttgccatatttagcagagcagggaaagaactctggagagtttgcctttttgattagggagaaacgctgtgggaggtatttgttgagcagctactctgggcaggaccctgagaactatcaatttttggatgcgtgaaatagaccaaacatgaaacctgctctggacgcaggttctctctgaatcaggcaaagcttcaggcctctgaaggcctcattcaggagcatgttatccatggcagggagggtgtgatgcctgattaaaattccagctgcttggctcccaccaggagctcaccacgatttctgagttgcttgggatttagccaactggtttgcaaactgcatgtaaggtgtgtctgtgtttgttaaaaacaatgacttctcagcaggactcagtaatgggtttccacggagagaaacattaccaagagatgaatgcaggggcgtgattgtcctgtgcactaagagccttcaaatcctttccccatatttgcaaggtgttgaagtaccgcttttaaggcaaaactaaatgacgagttataaagtcaaaacacgtgagctttaattattgctggaataagcgggattctcatcagcagggcagcttccagatgtgcttttcttcattttgactagatagggagaagagtgagggggcatggcgtggagaaagaaaggtagatatacaagaggcggagactcaggcgcaggtagagtcagaggcaggttcaaagacacacagagacacataggtgaagatacattcgatgtaaacagcttaggagccaggtcgggcctggtggcttctaagctcatatctgtaatcctggctctttcggaggccaaggtgggtggatcgcttgaggccaggagttcgagaccagcctggccaagatggcgaaaccccatctctaccaaaaatacaaaaagttagatgggcgtggtggcacgtgcctgtaatcccagctagtcgggtggctgagggatgagaatcacttgaacctgggaggcagaggttgcagtgagccaagattgcgccactgcactccagcctgggtaacagagtgagactctgtctcaaaaaaaacaaaaaaacaaacaaaaaaaacaacagggggtgggggcttaggagccaggattctaaggccatacctgctcctgctctgaatcctgtggcctcctgtttgcaagagtccaccctgagattagtcatcctctcagtctcccgttggctctatgatggtgttgccctttgcccaggatgtgagtaatgagagtaacagaattcagggttgacctgactttcctgcagaggtctgggaagacctccatgtgacagccttcccatgtcactccctgcgggttccaagaatctcaggcctttgcagctgggatggcatggcatagacatgtgagacaccccctccttgtttgtatgagcgaaagggccaaaagaatagggtggaggtcctggctggctgcccccgtgggctgctatggatctagatgcagaaactctgctgattcgttcccctggaggagaggttgctctgggaaactgcagctgccaaacctactggagactgatttgcaaataaggactccagcctgttcacatacaggagcctccgtgagtggggagggcagttgggtcaggctgaggctcagaagacacgtatgcctgtcttggctctgcccttgcccctgagtggttctgagctctcaggcaagatgctgaaccgcttggctccaagttctcatcctcagaacccaggaggacttgagcatcttgagagtgggagcttatctgtctggttcaccagcccaggtgcccgcaggtgatggggaataaataggtccttctgaaaccgtgaatagtcagggaatgatacccatgtgcctctcctgttgtaaggatcagtcatgaggaagctctgagggacggtaacatgtcagctgaggtgagcggccgtggggttattcccattcctgacacttcgcagcccctggctgaggcacccccatcctggtccttgggtacctgcctgagaaaccacacttggaatcggaaggacacttggtgagtgtggaacatcagcctccgatgcagaatggatgtgtcttgctggctgggggagcacttggagggggtccccgaggcacccctgataatacagcctgggggtgggggggtgccctggtgggtgtgtcttccctggccagtgcagagggggacagctacatttttgtcactcctctgtttcttccaaactccttgttggctccttcccttaatccatgttgccctggacaaaatccagctaaccggatcccagctgggttccgtgtattgtatccaggacctggatgagatttggaagaacttgctgagcacatctggggagacccctgcgtccccagcagtgtggctgagctctgccttgttggggcctgcatcctcccttgtacgaaggcaaccttgttgctggtacccgtgtttaaatatctttttctgacttacataaacagcacctatgtgttgcttttatgtgtgtgtgtctgtacatagacatctgtgtacgtgaatatacatatgtatttaggtatctttgtgtaagtttatatataattatctgaaataagctcatattatatacacatttcttaatttgctgggttttttttcctacttatcacctaactgggagttatcctgattgtacatgcaatcccactcaccttcgttaacagccattatgttactgaggggtgatagcgatggggggtctgtcccctgccaggtgcttggggaagctctagtggttggccagagctgactgctctttgatttcttgcatcttctttatggtttttccgtctcctctgtcacttattcttttttttttttttttttttttttagtagagctgggatctcatcatgtggctcaggctgatctggaactcctgggctcaagcaatcctcctgcctcggcctcccaaagtgccgggattacaggagtgagccactgtgcctggcctatcacatactcttttctttctttttttttttttttgagatggagttttgagttttgctcttgttgtccaggctagagtgcaatggcgcgatcttggctcactacaacctccgcctcctgggttcattcaggtgattcccctgcctcagcctcctgagtagctgggattacaggcacatgccaccatgcccagctactttttgtatttttagtagagatggggtttctccatgttggccaggctggtctcgaactcctgacctctagcggtccacccgcctcagcctcccaaagtcctgggattgcaggcatgagccaccgcacctggccatactctttatcagtgctatctatgtgcctgcctccaacattaccctgccccttctcatttaatttggattctgaaaccagataccaaacctattagactagactgtaagagaaggctaagtgtgttttttcagagaagaccaggtggagctttttattgagtaatgtgcaggatcctttagtgcaagctctgtgtcacatgacttggttgaacagaaatgtttgtgttttctggggtcctggttgtgtttcagatgggtaagggggtactggtttgcttgttaagtggcttgtgaataggtaggatgttactgtaattctcctctctagagaaaatacaaggactttaatgacaacttgttgaaagctccttctgtgtctttttgaattcagttttatattcttttcttattagtattcataagtaactcattttcctttcttccttttttgaggtggaatttcgctcttgttgcccaggccggagtgcagtggtgtgatctcggctcacctcaacctccacctcctgggcaagctattctcccgcctcagcctcccgagtagctgggattacaggtgcccaccagtacgcctggctaatttttgtatttttagtagagacagggttttgtcatgttggcctggctggtctcaaactcctgacttcaggtgatccacccgccttggcctcccaaagtgctgggattacaggtgtgagccaccacgcctggccaagtaactcagtttctattatattttttaagaatctcactttagtggtcaggcccagtagctcatgcctataatcccagcattttgggagaccgaggcaggagggtcgtttgagaccagcagggtgtagtggcacacagctgtggtcccagcttactcgggaggctgaggcaggaggatctcgtgagcccaagagtttgaggttacagtgagctgtgactgtgccaccgtactccagtctaggtgacgagcaagactcagtctctggggggataaaatgagtttatttatttatttattttttgaaacagagtcttgctctgtcacccaggctggagtgcagtggcatgatctctgctcactgcaacctctgcctctgggtttaagtaattctcctgcctcagcctcctgagtagctggaattacaggtgcccgccaccatacctggctaatttttatatttttagtagagatggggtttcaccatgttggccaggctggcctcgaactcctggcctcaagtgatctgcccaccgtggcctcccaaagtcctgggattgcaggcatgtgacaccgcccccggccaaacctgagttttaagattccaatttaagttaatcaaggagtttagctacaaagagattttggggagatctgtgtgcgaaggcaaggaaaccaaaagggtggtccgaggctcttttttctttatttctcctgacacttgattcagtctggcctttctccaggaaggcgtagcaggatctagttacaaatcggtgaaatcatgagcccagggtgtgggggccggcttagtgtcactctgcgcttcctgcagtgggccctcagccactagaaagtcacttctcttttgcgaggaacctggtattgtcacaaataagccaatttcaaaactaagtatgtttgtgttggggagtgaggagtgagtttcagcagacacatgtatgcacacccacatgggcacagtgccacactgagcccccttcattctggaagcagtcccttggccctggacctggttgtgtgccccttgaggggaggatgaagttgacctcagcactacccggagctcgccctttcttcggtacactctggtgtccacaggtggcctggcttagcaccagccacagtttgttcctggcctccagggtctctttcctgtccagctcagcagctttgaccaagtaaaatagaggacttggtctgcttgctagcagaattacatttccccaaatttcttttctttctttcttttttttttctgagacagagtctcgctctgtcgcccagactggagtgcagtggtgtgaccttggctcactgcaatctctgcctcccaggttcaagtgattctcatgcctcagccccgtgagtagctggaattacaggcgcctgccaccacgcccagctaatttttgtagttttagtagagacagggtttctccaccttggccaggctggtctggaactcctgatctcaggtaattcgtcccacctcgggcttccaaagtgctgggattataggtgtgagccgcggtgcccagcccttatttccccaaatttctaatgcttggaggccaagggcagatcagagctgcaataataatggggaggcattatccttatggtcattaatatccccatttatgtgacagtcccagggcctgggaggtcaggtgtcttgcctaaggtcatgtgcttgtcaaggggagctgggaggcatcctgtagtagactatggttgtttgtggactgcttgccctcccttccacatcctgcctgccttttggggaagtctgtctccccattctgttgagtctcagcaggttgctcctttgttaaggttccctaccctcttccagccaagagacccaagaggagccaagtagatactccctccctggaagttaaaccgtgagctgagatccagaaaatggttggaggactgaagtgccctcatttctgtctcttcagatgtggttccttagcctccttgggttttcagtaaatcccattcttgctttagtttatttatttatttatttatttttttgagatagagtctcgccctatcatccaggctggagtgcagtggtgtgatcttggctcactacaacctctgcctcccgggttcaaacaattctcttgcctcggcctcccaagtagctgggactacaggcatgcgccaccacgcctggctaatctttgtatttttctttttttttagtagagatgggtttcaccatattggccaggctggtcttgaactcctgacctcaggtcatctgcctgccttggcctcccaaagtgctgggattacaggcatgagccacggtgcctgaccatgctttagtttaaattcagaattgggttcctgtttcttgcaactgtattcaattaacacctggccataacccaggcatgggactcctcaatctgcagtgctctttccacttggtcatgctgctgctataacctagcgatggtcaggacggcgatggccagcgccccgggaaccccagtaacatcacaacatagccacgaagtgatagctacttgattctgaaaataggacctgctgggaatctcggggtaaatgtgttgtcatctgctttgatttttcgcgaggcagccgtaggtgtcagcctggaaaattctagcagcctggcttgccagagctagcttggtgtttgttcatggaaggcagtacctggctggctgcttctcagtcacctgaccgtccaagatgggtcttggcatttgcttgtgttgaaatcatgttcttatttagctaaatattgatacaacagagcaattccttttgtatatgcaggatggatgaattgaagtgaaagatcagtttgtcagcccttaaaaaaaatgaccggtctgatcatactgttttatgccagcgaggtgtgtgtgtgtgcagagattggggaggggaaagcttttattggcaagactatctgaaggtctcattcagcggaatattttgttgaatagaatctagcatgcgcagtttcaaaaatatccatttactcacagagtcctcaaacccttacacaagatgaagagatgaatgagactgtctgatctgtcgccgagggctcagttttgtttctggaaggtctccctctctcttcagggatggcagctgctctttcagcctggacaatgctggctggctttccccgaccagggcttttgtccagagctgttgcttttacctgggcttggtcttcaagggaaaaagaggtgggaggaggaggggagctcagaagaaggaagcccctgtctttggcctgcactgtgttctttcactctgaggagtggtcccaagaccctccctccagttcccagatcactttcatgttgggagctgcaaagtggaattctaaggaattgacctggattcgaatatggaagtatcctcttccccttaagcaatgctcaagaaggaattgtttcttgataatcaggtaacattcaaatgttatataaactttagatttccaggatgagtgttgtatttagagcaaaggctcttgtttggaggcagtgctccatgaaggtaggcctggttctatggaatttccagctctagctgtcatgaatgggctggttaccttgggcgagccactttagctctctgggctttagctgggataagtgtgttggaataggatatgatctctaaattttcttccaacttccaagattttatggcctttgcaatttattatttcaagcccttaaattatctccagtaaaacttgagcaaatgtaaccatttaatgatatactgggaaccatatctatagtacctctttattacaagatgcttatgttttagttagagatatactcacatgttcacatatgggtgtatatatgtgtgtatgtgtatattatgtatgtgtgtggatgctgatcttaaactattttgttgtcgtagttcatagaagtaaaaacctgaaaatatttaaaccagatcacaaatacagggaaataggctcttagggtctgcattttccagctacctgactcttgctttggggccaatttccacgcccttctttcacacggtgtgtcagctgtggaggtgtttaattcagcattgtgtggagcagagcttttccgactgtgctctgtgggactctagagaccaagaaagtacttgaaaaaacgtttttaagccgaactagtacacagtcgaggagctcggcagggtcctgttttcgtggccagcacagtctgtccccacctggggttacgttgttccctctttcctgcttggttgtacacaccgcactgtgtgctattggataccattagcacattgattgcctggtacggatagattaattcggttggtacagctggttgaccctcctgccctgtctgccttattaaaaattattgcatgaacacaggacaggccgttaaaaatcaggggctgtttgtgatgactcatgggtgcatctcaggactcttcccagtgatgtgcagcggggggagaaaccaacgggcatccggctacctcatgtctccagcccccagtgtcaggtttttgagttcctccaaacaacttaattgctctcgatgatggaccttatacaagcatattgtaaattgctattacattacatatcgtaaaatgctattacaagcatattgtaaattgagcttgctgaaaatgtttggaagccacagatgtagcgaaaagggcacagattttagagacaggcagttctggatttgagacttagcttccatcatttagtaaccatacggcctctggcaaaggaatttgcacctctaatgcctaattgtctcatctgtaaaatgggcctgctgtctggcagccaggacccttttttttttttaagagtcgaggtctcgctctgtcattcagtctggagtatagttgtgcgatcatagcttgctgcagtctcaaactcctggacgaagcgatcctcctgagtctgcctccacgtagctgggattacaagtgtgcaccacgatacctggctaggcaggacgtttctgaagaccttagatgtgtgtacagtgggcctactcctgtgcccgacacataacagtatattcaacaaatgctggtaattatcatgcttttcatgctgagaattaaagtgttacaagccaggggtgtccaatcttttggcttccctgggccacattggaacaagaagaattgtcttgggccacacataaaatacactaacactaatgatagctgatgagctggaaaaaaaaaatcacaacaaaatctcatagtgttttaagaaaatttacgaatttatgttgggccgcattcaaagctgtcctgggccgcatgcagcccataggccgtgggttggacaaggttggtttacactatagaaatatagatattttattgcatttgcatatttacttctgtggtggacatagcatatgcatagtctgataaatatatttgcctataatttagagatatttcagcagattgtaatgacaacatttctctttctgctacatttttgtagcaaattaaattaattttcttttctttcatttttaaaatgtgtggagccttaacagaataatttcttgtactttgggttttttctagtaggaaaagaaatatcaaacagccggtgggaattgtgcttatacactgggcctccaaagtgctgctttatttttatgtacagactcgttgggggtggactgccgaaatccttgctcttagaaatgtatttgagcccctgggaaactggatagggaaaaaagagctaattaaaaaagctgccatccacctcctctaattaacttgctgtctgctcccaagagagggttcagaaatatgaaaacaagacaggcagcaccggaagtgaatgccattctcgtggtctgtggtggtccctggtgttttgatgcagagatcgttcatagtaaacaggcaagggaccacaaagaggcttggtgtgccctggcccaccccatgctctgccttccacacagggcgatcgtgaacggcggtccctctgagcaggtgcacaggctgggcagttgctgcagcggagaactcattggaattcaggggctagaaccgaggggcatccggccctccctgttgcttgcttgtgctgttgagaaagagcagagccctttgtgcttcagagcctgctgtcgccagtgcccaggaatgcagaagccaggggatggacgagtactcaggctttcctcgaatctctgcttgagtggggcagcctcggggcctccggacgctggagaagctcacagcatctgtggccggtggtgcagctaacttttttggtgacattgaaagagatttaggtccaagagatacgagcaggggaattaggggtgggaatttgggggacagaggctgttcttcagcggaaatggcctatgcctcctggcagaggtggtccccagtggaatgggcccggtggatgtggacagcggtgaccagcagtggggactccagtctgctggtgcttcagggagactctggaaaaaggcaagttatctctgtgtatcttgtcagtgttgctcatgatggtgcagtgctgggggcctggtgaggaagctgggttcccggggcagcacccggggcagcacccagggctcgccaggctgatctgaactctcattcttctttgctcctcagttgtgtgacctccttttgttttccacaccgataaacagatgcttcaggtacctcgatctgttgttgtgcaagtgcggatctttccttctccccatagacaaaagctaagccctttgatattaatgagtgtttgtaagaagtcagtatcttctgttgggtttgcatgaattatttcctcatgaaatttaatagtagactaggtttggctcattggatcccatcaaaagcagctatgatgtttcttttaaaccctttggttccctggaggctttgtggctggttggaggagccaaggtccttggggggtggaggggcaagggtgctgatgaagtaagtcactgacaaactagttgtaaaagcattgatacagattttctgaagggaactcaccaaatagctctttcttcaggtcccagtggatagtggagggattggtttggttcctggtgctctctgccagctggctggtggtctttagaagatggtggcctctactggggtccctggttctttgatctttttggaagctcagcaacgtgagcatctctcagcattgggttgcacggctcggtgacaccggtgcagcttggtgcacacactgtccgtactcacctgccaggtcaccccgatttcatgtcttcaccagatttgcttgctgggatcattcgtgccattcagccactctaagtttccattctcttaataattagccccctcgttgcaaatgaataaatcagtatttcagtctgtttaacccttccaaaatgggactcagcccaactgcgactgctgctgccaggctagctgttctccaaggcaaggctgggctcaggaccgtgggcccttgggcatcttgagcataggtggagctggcttagtactgggggaagccttattctttctggcttaaaattgagtcaccggtggaagcagggtgatggggagggctgtctgttggttcttcgttttcttctttttatttttttaagagacagggtcttgctctatcacctaggctgggatgcactggcacagtcatagctcactgcagcctcaaacttctgggcttaagtgatcctcctgcctcaccctccctagtagctgagaccataggcacatgccaccaagcctgggtaattttttatttttatctttttatagaaatagggcctcactgtgttgcccaggctggtctcaaatgcctgacatcaagcgatcctcccacctgagtctcccaaagcgctgggattagaggcatgagccaccgcacctggcctgttggttcctcttcaacccaggccaaggcttggccagtggcctctccttgttagtgggcagagtttctccacatggatttttggtccagttctctgggtgaagagtcttccttgagaacagactttcctgcagaccagcgagggccattttcactgtgtcggggttggtggccgtgctttgtgtcttggtctgatgcaccctctgcctggccggcttgctggcttccttcgttcactccattcacccactcaacacatgttcattcccggccctccactgtaggcttggagatactgtgataaacaaggccggctgccctcctgtgttttgagctccgtagaagagaaagacagtaaacactactagaataagtctatactcacaagttatgagaggcgctgagaaggcaggacagtagagaggatgatggggtgggatcatgtgggtgagttggcacaatggcatcgaacatgcagaatgcctctctctctctatttgaatcaatacctaataatgaacgcgtgcggaagttcatccagagtccgctgtgtgtgtatttgccactaaggcgagaagcgtgtatttccagtagagccgagttcaaagaatacatcatttgtgtgcaatcagagccagtgataagattcaaccttaggaatcacgactgagaaaatgactttcctctcatctgtccctgcacagtttaactgagcagcgagccagaacccactggctctgggtgcgaaggccacaccggctcagcagaactggctctgggcccctgtctaacctgtgcttctccctctctcatcaggagttccgattctgaagaggcatttgagaccccggagtcaacgacccctgtcaaagctccgccagctccacccccaccaccccccgaagtcatcccagaacccgaggtcagcacacagccacccccggaagaaccaggtaaccaagggcagggaggcccccagacagccctgtagagttgtgagccctgggggagatttgcagcagttcctcctgggtcaggctggaggcgagcactgactcgacctcttggctttgagttgtgcttgacgtggcttttgtagttttcttgaaaatgaagggtgaacagatacactggattattttgcatttgctttgcagaattttagggggggcctctggggagattgggtttggaggagggcagtgggtctcggaagttcacagcacagtcttggattccagcacttggccccttgctcttttaagaacattagctgtggacaggcctgtgaatctacatgtgtatttccagcactaggcttggggaaggaaggtagtcagtgggcggggatagagaggtagacattcacagcagatcatggtggtttgtttattcctcatgaatctcgtgtcacctgatttcatatcactttcccacaactttctcccttagtgtgagtgaaaacacctttatgttccttttagacgggtggttagtggacaggtggaatagatctcgtccccaccccacccctgtggggcatgcattctgcgcctcccagttacaccagcacagagaaccacctctcacatggaagattcacaggagactggaagagatagggcctgccagaaatggtcccacaggctggccagggggcccaggtggtattgtccttgggcctggacagctctgggccccacaacttacaggaccccactttggccttccttggcccacagccttcccgtgtgatgagaagtctgcagggccaaaccccttctagaccacacgctggatacctgggagcggccactgccaggggccccctcgtccccttctctggctcttcctcccgagggcaaactgtacctgagaaggaaccaaggatggggctgggtgcctccactgtgtacttgccctggccaggagccaggtaaactgaacaatacaataacattttgaccttgatgttggttttagaaagaaatgggtggaattctttttatccgccgtgggttcgagcagcccgttgttttggaaaggatgtacactcccggagctttgttcctaaaccagcaaacccccgtgctgggacaagggggcaggacagttttaatgagagctgatgcctttggtggagtctgccgaatactgctcccatgtcccccgtctttgacggctcatcagtctgcagcagtgtctggattttgctgagtcagtgtagatgccagactctgggaggatagtgacggatatttctttgatttgaaagtagagaagagccaggagggctgtctgtagttctcagagcatcgtttgcatctcttcctttattttgtatgaccaagcatataaaactgtatttctcgtaatatttttaaaaacttacccataatttttaatggaaagtggctggatgacaaacacattgtaatctctaggtcaaatgtgtgattaagaataaactattctggccgaggcgggcagatcatgaggtcaggagatggagaccatcctggccaatacggtgaaaccccatctccgttaaaaatacaaaaaattagctgggcgtggtggcgggcacctgtagtcccagctactcgggaggctgaggcaggagaatggtgtgaacccaggaggcggagtttgcagtgagcggagatcacaccactgcactccagcctgggtgacagagcgagtccgtctcaaaaaaaaaaaaaaaaaacaaaaaaacaaagaataaactatgcttggccgggcatggtggctcacgcctgtaatcccagcactctgggaggccaaggagggtggatcacctgaggtcgggagttcgagaccagcctgcccaacatagtgaaaccccgtctctactaaaaatacagaaattagccaggcatggtgccgcacgcctgtagtcccagctactcaggaggctgaggcaggagaatcgcttgaacccgggaggtggaggttgcagtgagccgagaccatgccactgcactccagcctgggtgacagaaccggactctgtctcaaaataaacaaacaaacaaatgtttagaagaaaatgatagcatgttatagggcatgtaccatccccagcaccaaggagtgtgcggagaggccacttgtggccacaggtgcgtcttctgggattcccagtccgacatcctgccagctctgggatgaatgggatgccactctgttctcttctttgatcctgtccttcttccttctgcctaacttcctttcaacaaagcagagaacaatctccattcttaaaacgaacacgcacaacatccatctttttcttagatggcagttactaaaagaatgagcattattgaggattaaaagataacccccaccagggaaggggatggaaacgttaattgctgtggagtcacagcccctcagaaccttggattacaccaattggagtgtttgaacggggactttatgtttctcctcctttgaaaacggcagcaaggctagctgtgtgaggattgtacactcaggagacttacggttggaactgtgtctgctgaaagcccccctagcttgggctgtacaaagatccatttgatttgctgccctggttagaaaaccgcctcccaggcggagggtcccctcgtccattctgtagaccagcatggggcattacgaaggcgtgggaaggcagctgtgcttgctagtgtaggtggctgtaggagaagaaagatttgttctctcaaccataggaaagaagggtaccaggggaaaatctattgtttactttcctctgcacagtgcccgggatgttgcgaaaggtgctgtgggaaccacgtgaattaatacacaacacctttggctgtgaataaagatggtttttccccctggcaacctacattttataaagcactcacttgccctacattgggtcctaccagcgtgtctgggctccctgggatggaagatgtgtgggccagagcagtcccatgagcctgtcctgagggctgtagcctggaccacactcctgaggcagaagatggggcaaaggattgcacctgctgccagctggggcgggccaggactcagctcatctgaacgcagttcccttatctgtgaaatgaagagggtgatctgtgggtcccttcagatccttccagctccggcctcccgaggtcctgtgaagggaatggttggctgatgtacagtgaccgtgttattagaactcaaaaccggccaccaagggtcataattacatgtcatgtaattaaataatagctcccattcaagcatttgccttgtcagggctatgctaggtcctctgagtgtttcatctcccactcaggtgagggaggatcagccgtatgcacacagcatccctgtatagtggatgtcttcccctgattccccagtgacacgcggaggttacgaacctcatacgccatctcacagcgataaggggactctggtgtcagaacccaggcctccccacttccaagcccggctcccttccatttggaaccagactgctctctgcgcaggtacagtgagctggtgcctttgtgcgcctagcctggggcaggcccttagtaggtgttgagtgaaagttgttgctggacctgctgttgcttagatgtgtgctggggcagtcctgccagcctgtcctgagagctgcagcctaggccacgcccccgaggcaaaggatggggcaaaggattgcgagtcagtgggtgatcagtgggggcgacatggcaggagagctgaggcaggtccattctgacagttgcccacctgcccttcagggacattgttcagcattggggaatgcagcttctttactcattcttgctaggagattgccaagcccagggaaaggcccgtgttggggccttggaggtaatgggggcctccctgtgccctgcgtgcctatacctttcctctgtctcccaggacatggtccccaggcactgattgtggcactgcacctgggggcccgagccattgagccaagggtatacagattcacagccaccagatccaagcaccagtgtcctcgccaggcactcgttgtgctctaagtggctgtttgtggacagctgtcctcacattgacttggaatggagctcagtgcccagcctggctgcagagcacacagtggcttcccttttctttgggcccgcctctggttttcgtatacactgtcacctgcttttgtctccaaagaggccatacgtgggtgctccctgtagccacgggagacttcctggcatggggtggggcatcccagaatccagctgaggcccttcccagcctggggcaggggcacaggggtgggtgtcaccatggcgtgtgaagagcagggggctgtggttgccttttcctgacacctgctatgacctgggccaggtgcttacagactctccctcttcacccacacaagaattccctatgacagctgatgacagcacactgtcttaggtctgatcacacggctatcaacgtaaccatagaccaggtacctgttagcaacagaaatgtattgcttacagttctggaggctgggaagtccaagctcagggcactggcagatttggtgtctagtgaggacctgctttctgttcatagacagcacctcctccctgtgtcctgacatggtgaaaggacacacagtcttcctcagtcctctttcgtaagggcactaatccactcatgaggacactgcccccatgagctcatcacctcccaaaggccccacctcctgataccatcaccttatatgaggatttcaacataggaatttcggggacacacacattcggaccagagcacacagcaagctgagggccgagccttttcaggcctggatctggctgccacaggcactcgggccctcttgggccggctgctccctcttcacaatgtgagtgtttcatgggcccaggaccagggaacaggtgagaccactggagattctgatgcagtccaggcagaggctggcactgcacctgggggccctggccatcgagccaggggtatatgggttcacagccaccagatccaagccccgttcatcccaggctggaaggacgatggagagtttggggcctgcatagagccaggtgaggagacatgagaggatggcgacctcacctgcccacagtggccacatctacagtgagaggacgggcacctcacctgcccacagtggctgtgttcacatggggaggacagttacctcacctgcccacagtggccacatctacagtgagaggacgggcacctcacctgcccacagtggctgtgttcacatggggaggacagttacctcacctgcccacagtggctgcgttcacatggggaggacggccacctcacctgcccacagtggccacatctacagtgagaggacggccacctcacctgcccacagtggccacatttacagtgagaggatggccacctcacctgcccacagtggccatgttcacatggggaggacggcgacctcacctgcccacagtggccgtgttcacatggggaggacggccacctcacctgcccacagtggccatgttcacatggggaggacggcgacctcacctgcccacagtggccacatctacactgagaggatggcgacctcacctgcccacagtggccacatctacactgagaggacgaccacctcacctgcgcacagtggctgtgttcacacggggaggacagcgacctcacccgcccacagtggccacatctacagtgagaggacggccacctcacccgcccagagtggccacatctacagtgagaggacggccacctcacccgcccacagtggccacatctacagtgagaggacggccacctcacctgcccacagtggccacatctacagtgagaggacggccacctcacctgcccacagtggccacatctacagtcagaggacggccacctcacctgcccacagtggccacatctacagtgagaggatggccacctcacccgcccacagtggccacatctacagtgagaggacggccacctcacctgcccacagtggctgcgttcacatggggaaaacggccacctcacctgcccacagtggctgcgttcacatggggaagacagccacctcacctgcccacagtggctgcattcacatggggaggacggccacctcacctgcccacagtggccacatctacactgagaagacagtgacctcatctccccagggtggccacatctacactgaaaggatggcgacgtcacctgcccacagtggctgtgttcatatggggaggacggtgacctcatgtgtcctgtgcaccttggatggagacaccaccaacctggcagggccccaaccctctggacgcacattcacttcccgtaatgacctcgctggaggggcttgactgctctccacatccacacaggcacagtgggccatggatggatcctgggatgctcggggctctcacagaccccaggctggtggctcagcccattatcctcccgggaagacaggggtataaccaagcaccgcaggtgttgtcctgttacagatgacatttgataataataatagaaaaatagtaacattgtggggggtggtactagagacagtgacagcgaggcacagcaaggttaaggagctttggccaaggtcaccaagccgattagtggcaaagccaaggtttccgctgctttttatgactctgcgctctttgaaactgacctcttttgaatctgacattatgttagtggtctgtcttcatgctgtcttctttagcttttttttttttttttttttaattcataatcagtgtttttattattttcgatgatggctcatttctaagttaagtgatgtatactgtctacatttcccatctataagcttttgtttttcctggacttttgttacctaattttgatttgcttaggttattatttttttaatctatggcatgtcttcctatcgctatgtacaatggctttcagtagaactttttacatcttcaaactcatcagataactgtgttttaatatctttttctgaggacattcctcccaaatccctctgttctgctccacttggggctgataggtccttttctgttttgagacagggtctcactctgttgcccaggcttcagtgtagtggcacgaccttggctcaccgcagccttgacctctgggctcaagaggtcctctgattgttctttattcttgttgcacagctgttgtttggggacttccctttgccatcatcctgggatttccctttacctccttcctgtgtgatctccggtttcctaaaatccctgtcttcctctctgttaggttattccctgttttggtcagtacatcatccaagagtttcctgacaaaagagatgggaaggtaatttgtttctccagaagtagatttttctttctttctttttttttttttaattgatcattcttgggtgtttctcggagagggggatttggcagggtcacaggacaatagtggagggaaggtcagcagataaacaagtgaacaaaggtctccggttttcctaggcagaggaccctgcggccttccgcagtgtttgtgtccctgggtacttgagattagggagtggtgatgactcttaaggagcatgctgccttcaagcatctgtttaacaaagcacatcttgcaccgcccttaatccattcaaccctgagtggatacagcacatgtttcagagagcacagggttgggggtaaggtcacagatcaacaggatcccaaggcagaagaatttttcttagtacagaacaaaatgaaaagtctcccatgtctacctctttctacacagacatggcaaccatccgatttctcaatcttttccccacctttcccctctttctattctacaaaaccgccattgtcatcatggcccgttctcaacgagctgctgggtacacctcccagacggggtggtggccgggcagaggggctcctcatttcccagtaggggcggccgggcagaggcacccctcacctcccggacggggcggctggccgggcagaggggctcctcacttcccagtaggggcggccgggcagaggcgcccctcacttcccggatggggcggctggccgggcagggggctgacccccccacctccctcccggacggggcggctggctgggcgggcggctgacccccccacctccctcccggacgaggtggctgccgggtggagacgctcctcacttcccagacggggcggctgccgggcggaggggctcctcacttctcagacggggcggccgggcagagacgctcctcacatcccggatggggcggcagggcagaggtgctccccacatctcagaagatgggcggccgggcagagacgctcctcacttcccagatgggatggcggccgggaagagacgctcctcactttccagactgggcagccaggcagaggggctcctcacatcccagtcgatgggcggccaggcagagacgctcctcacttcccagacggggtggcggccgggcagaggctgcaatctctgcactttgggaggccaaggcaggctgctgggaggtggaggttgtagcgagccgagatcacgccactgcactccagccttggcaccattgagcactgagtgaacgagactccgtctgcaatcccggcacctcgggaggccgaggctggcggatcactcgcggttaggggctggagaccagcccggccaacacagcgaaaccctgtctccaccaaaaaaatacgaaaaccagtcaggtgtggcggcgcgcgcctgcaatcccaggcactcggcaggctgaggcaggagaatcaggcagggaggttgcagtgagccgaggtggcagcagtacagtccagcttcggctcggcatcagagggagaccttggaaagagagggagagggagaccgtggggagagggagagggggagggggagggggaggggtagatttttctaactgccttctttagcttttaaagaaagcacttttccagagcgtctcatttcatgcctgcttataaaggatgaggagtggccccaggtcacagccggtgttatttcccccattgccctctccctctgccttcaaatgagcagttaagtcagtaaccggctgagcccttgtgctgatgctggggctctgcctgggggactgtggccccttggtcggcagcccaccagggaagcaccccagcaggacaacaggtggggatgtggcaaggaaagctgctcatctctggctgacaccagagaagtgacagtcagcaaagcaggacagagagggacatgtgggccgggtacggtggcccatgcctgtcatctcagcactttgggaggctgaggtgggaggatcgctggagcccaggagtttgagaccagcctgggcagcatagcaagactgcatctctacaaaaaatttaaaaactagccaggtgtggtgtcacgagtttggctagccacttaggagggtgaagccagaggatcacttggagttcaaggttgcaatgagctatgataacgccactgcactgcagcctgggtgacagagtgagaccctggctcttcaaaaaaaaaaaaaatgacgtgtggcatgctctaggtggagccaggatcagcccagggctgctgaagtcccagctgtctgaaccgcccgcacagcacagtggggctgtcactccaacagtgctcctgggtgccttcttacttcttaccctacctagcaaagcctccccttaggtgctccccatcctcactatggctctgtcacttagatgctcacgaggcggactctgctgggaacaatttggtttatgtaaagacactttaatttcttcatcactaagtgagttagcacggtcagtaactgtccccacagtgcctcgacggcacttttccctcttggtttctgggaattgaacagaagtttgagagcagacatacgagagcaagatagacctcaggaagcagaggagcacagccccacccggtgggggttcctggggtctctgtgagatcctgaacacccactggtctgaggacagaaggcagccatggcacgggcctcctgctctcttgctggtcggttttgggtttggtttcttgagctgtctgttttggaccacatcagaggagggtgggcaccaaaggacagcctctgcctggtacttctgcagcactgatgcctcacgcctctggggtaaaaaccccacaggaacttggagctcaaaggcccatccaagcttatcctcaaagctgactcatttttgtggccaaatactaaagtgttacccactggaggtttaagaatgaggataggcccagatagaagcagatgaggtgagatagcccagttccagacttcccgatgaggaggcgcacctgtggcacctgttacgatgggggccctgagcccccaccccagccctgcagaaggaagtgctgctctgcagaggaaggggcggatggaggcggagtctggggttttaatgagtgtctcaggtgtgtcttaggctagacaaatttgggaaatgttgaattcatcacggacttgctctgagctacccacagcaaccagcaaactgccacagaaagaccaagtactgctttgtatctcgttagcctacttaaaatggacaccttttcccagaataaatattactaactgaagattactatttgtgtacttagaagatacaaagccatgctctctgtgtaggagaccatctacccgtgatgcggcagcttaagagaagagtctgtgaatgcctgggcacacctctggccctctgggcgccaaggattcctgtgcacagtgaactcactggggggcggggggaaagaggggaggatggagaggcgccagtgcgggggctggcagcaagtgcttctgtgagaaacagtccagcaaggctaagggtgtggcctttggagaaggtagggtgacatcagctgggtgatgtctgctgccctgtcctggctttgtctctttcctgggagccccctgtcatctctaacacattcgctttccctcaacttgggcattttactgggcagcactggtgctatggcctgaattgtggcctccaatgtttgtatgctgaagccccaacccccaatgtgattatttgtagggaggacctttaaggagacagttaaggttgaatgggttcatacgggtggggccctaagcccatggggaccagtgttcctatacgaagaggaagagaccaggagtgtgcagagaaaaggccatctgcaaaccaaggagagcggcctcaggagagacaaacccactgatgccttgaccttggacttgcagcctccagcactgtgagaaataaatttctgtggtttaaaccgcccagtctgtggtccttggtgatggcagcccagcaagctcatgtaactgggataccctagtgacccttttcatctgatgaactgcgggtgctgactttgtcatcagactgagccagaaacctggagcctgtgtgcaaggcactgttctctggggcattgcccagatctgtgtcagtggagacatgaggtggaggaagtgttgtgtatgtattcatctgggttcctatccttccttacctctatgtcctcggcacaccccccagtggctgatgtatgggaggcaccccaggttatttgtggaatgaacaaatgaatcacacagttgattgtgtctgcattggtcttcatgcagatatgccgtgtggatgtttagaaatccagtaggggagcagggaggctgggtgtggtggctcacacctgtaatctcaacactttgggaggctgaggcagacggatcacttgaggtcaggagttcaagaccaacctggccaacataatgaaaccccatctctactaaaaatagaaaaattagccaggcgtggtggcacacacctgtaatcccagctactcgggaggctcagacaagagaatcacttcaacctgagaggtggaggttgtagtgagctgagatcgcaccactgcactccagcctgggtgatggaatgggactatttcaaaaaaaaaaaaatgcagtaggcgagcagggaggacttcgaacccagttggaccacaggagcccttctagccctgtgaggggccccgtggagcagcctgctctggtaaccaacacaataagacagccgttcccaaccagggaggattttgcccccacaagggtacatggcaatgtctagacacagtgttggttgtcacagctggggtaagggtggggcctactggcatccattgtgtggaggccagggatgctggtaagcatcctacagggcacaggacagcccccagcataaaaatctgactgcccccaaatgaccataatgccaaggataagaaaccctgcagcaagattaggtttcctggttcatgatgagctaatgagagcatgtcagttctaaagaggaaagccatgctaagcaggcagggagctctttcttctggaggaagcaatgagcagatggttaagctcattgttgcgtgataactgctgacatttgaagggcctccgaaggcttccttctgcaggctgcagaggcacgtgtaacggcctgagagggagagggttggtgtttgtgggccttgacgacgggataggctgaggctcgtgcttcctcctgccaaggcccatttgaaagcacctggtccccctcagcatcccctggtcctctgttccctccgtgtatccaggggcaattacagagcaggaagaggaggtcacggctggtgggaggatggggtacttgagagtactagggcctagaggaaacagggagttgattttagaaagaagcgaggcaacaccttttgaaatgagaaggaaggagtgtttggagaaaccgtttggtagaaagagctccgtatttagggcgtctgctccaggtaggccctgggtggagaagaggagagtgagaggcttgaaaccaggactagctcatagatgtgcttccaaatgatgctttcaatccaagcgtttattgatcctgtaagaaagtgtgaccagtcaagggggaaacaaagccaaggccagttcctgaactcaagaaccttgaagttttcttgtgttgtgagctgagttctctgccaggtactccaggagaaaggttgctatgagcaaagcttggtaagcactctgcagaatactcactgcccagagatttgcagtcgggagcatgaattgctctgagaaaatcgacaggaagagaccagttcaggggttaattgtgcatttcccaaaccttgtttgtttgttgggatgagagatagggctccctgatttagcaaatgaaaatacagggtgcccattaaatctgaatcttagataaacaaagaatcatcgagacatgggacatacttatattaaaaaacatgttcatttatctgaaattcaaatcagctgaacatcctgtcctttgtctggcaaccatgccggtggcagaaggggactgggggtacataacacctgtcacgaggcacacattggaaacgctgtcccaggtcttacctgtgccagctccgtttactcctcattctgcatctcccagtacttaggcctgcagaccgctttatcgtgtttgccctcttgtccaatgacacacttttagttttctggcatccttgactgcctggagcagctgtgacctcagaaatgcatgaaagatgccgctgggtgccagcagaacctagagtagccaagccaaagctggggctggccggatccccatgggcagtagggtggtggcacctttgagcatcatttggccaacatttgcagcatctgcagcatgtttgggaaataggagcaacctccttgactggcaggggctgatgaggtagaaaagctgagaggaggcagctgggagagcagtgagactaggcaagaggcagggccaaggataggcaggcaggactgaaggagaggttacaggtgatggctggagcggcaggtggcagacagcaagtgctactacaggtgccgggggcctccgtgtacaggctcccctgatcttcacagtggctctgaggagtcaagaacaggcttgctggtggccgtggctagtatgaatatttatggaagcctccgtatgccttcctgcaggatttctctgtcttcctgtcccactcttgacccttgctttagccacactggcctcctcgctgtttctgtaacgcaccaggtgctcctgccgcagagcctttactcgcactattccttctacccaggatgcttcctccccaggagtcctcctgtttcatgcacttaccttgattctggcctttgcttagatgtctcctcagaagatcttgcctgactaccttattttaaaagtgaaactctcctatcccggctttatttttctccttagcatgtatcaccctctgaaattctgtacattgtttgtttgtttttgagacagagtctcactcactctgtcacccaggctagagtacagtggcgcaatctcggctctctgcaacctctggctcccaggctcaagcgattctcctgcctcaggctccggaatagctgggattacaggcgctcaccaccatgcctggctaatttttgtgtttttttagtagagactgggtttcaccatgatgaccaggctggtctcaaactcctgacctcaagtgatctgcctgcctcggcctcccaaagtgctgggattacaggtgtgagacaccatgcccggccctggtggtttattcgctatcttcccctgaagaatgtgacttccaggaagggaaaggttttgtctatttctgttccttgttgaatctctagtacctagaaccatgtctggtcctgattaggcacttggtgaatgtttttgaatgaatactctgagctgttctttaatcggtcctcatgatcctcattgtacagatgagggaactctgggcgaacctggcctgggtcttgagctaattacgggtaggtcaggttctgtacccaagtagtacacacagtgatgggcggggtggcctggggccgtggtttgtcaacccctacgctggagggtgatgttttggtacaagaggagaggtgccccaatgcgtcctgtgtctgtaattgatggcgttgtctgtgtttccccaggatgtggttctgagacagtccctgtccctgatggcccacggagcgactcggtggaaggaagtcccttccgtcccccgtcacactccttctctgccgtcttcgatgaagacaagccgatagccagcagtgggacttacaacttggactttgacaacattgagcttgtggatacctttcagaccttggagcctcgtgcctcagacgctaagaatcaggagggcaaagtgaacacacggaggaagtccacggattccgtccccatctctaagtctacactgtcccggtcgctcagcctgcaagccagtgactttgatggtgcttcttcctcaggcaatcccgaggccgtggcccttgccccagatgcatatagcacgggttccagcagtgcttctagtacccttaagcgaactaaaaaaccgaggccgccttccttaaaaaagaaacagaccaccaagaaacccacagagacccccccagtgaaggagacgcaacaggagccagatgaagagagccttgtccccagtggggagaatctagcatctgagacgaaaacggaatctgccaagacggaaggtcctagcccagccttattggaggagacgccccttgagcccgctgtggggcccaaagctgcctgccctctggactcagagagtgcagaaggggttgtccccccggcttctggaggtggcagagtgcagaactcaccccctgtcgggaggaaaacgctgcctcttaccacggccccggaggcaggggaggtaaccccatcggatagcggggggcaagaggactctccagccaaagggctctccgtaaggctggagtttgactattctgaggacaagagtagttgggacaaccagcaggaaaacccccctcctaccaaaaagataggcaaaaagccagttgccaaaatgcccctgaggaggccaaagatgaaaaagacacccgagaaacttgacaacactcctgcctcacctcccagatcccctgctgaacccaatgacatccccattgctaaaggtacttacacctttgatattgacaagtgggatgaccccaattttaaccctttttcttccacctcaaaaatgcaggagtctcccaaactgccccaacaatcatacaactttgacccagacacctgtgatgagtccgttgacccctttaagacatcctctaagacccccagctcaccttctaaatccccagcctcctttgagatcccagccagtgctatggaagccaatggagtggacggggatgggctaaacaagcccgccaagaagaagaagacgcccctaaagacgtaagttcaggggtggaggtggtaaggatcagaggcgggggtgcgcattggctgtgacccttggtcatgtgcctggataaccttcgactgccctaaccttgcccctgggtgctgtgatgatgccacgcttacggccgttgcaccaagcagacaatgtacgtgttttccttcctctctgcggtcacagtggtggcattttcccatccacatacccctttgtgtccttgatcttttgctttaataaatcaatgggctggagctttacttgtagccaaagacctaatgttcaactccagagcaatctgggagatcccatggaaggggaaaggtccttagagatctggttcatctccctgttggtgactgattgctttttggagaagctgggagatacaccctttaaaatattaaaatgtatagtacttgtttctgcctattaatgagacattagcccaacctacaaacatagtagattccaggaggctcaggaatgagagatgtggcctgggcccctccctgctgcactccaaccagcccgtaagaaacacccttctttgtctccttccttctctccagtcatcttttgtagacaaagtccctgcaagttctgaagagataaatggaacctgaaagtggggagcaaatccccacaatccccaggaagccattggtccttggctctatggtccccagacacttgacaaggccaagtacatcgtgcttaaatatcaaacacccatgcctccagaatccaccccaggacccggctctaatgtggatggctgctggtcctttattctttggcccctgtggttaatatcttggcgatttccttactcttacgggaagtattgtcagtaatttaacaaggctgaggagatcagtctcccaggggcagcagaacagaccacagcgctggcccctctgggtctgcctggcacgaaagagacagaacgacatgtttacctcccattctgggctccccctaacattgaatttctgagaagaacccagggcctcctgagaggaggtctctacagcaggttaccttagatcaacctgccactgtctagtggtggctggaggccatcctggccaaaatggggactttgttttagatcagttactcaactaggtccctactagagactctctagaattcacgttggaaacttgatttcaagcctggaataggagaagtctgcaatggctagactgcaaggccgtgctctctcatctggaatgagagccaaccttagccgccacctcttccttctccaagatatgttctgtgtctcataggcgtccccagtcactttcttgtttgaatattagagctaacaggggtcagggaagtttacccaactgtgtcctcacctctagtgcagacagggactttggcgtggaagaccctgcgtgggtctgacaaagctcttggggcaccacggctttgtgggatcattaggatcaagagaggaagctgttccccagcagctccttccaaaaagctggggcattgccctacagcggtggccgccatatcctaacccattaataaccagttgtctgcagatttatcttttttgtcagttccttctgtctgtctctctttttctttgtcttcttgtcttaggatggttgaagatgtgatgtctgtgtgttctctgttgtaagtaaatttaatgcaatctgcctcttatgccaaatgtgcttatttttctgccttttgtttctgcttccaagccatttttatttcccctctggctgctactgatgtgtttctgtggtgggcctgcgaatgatggggcatggggctccccagtagcaaagattacttttctgtttcatagtgatttgcataagagactgcttggctgtgaaaatgtgattatccagcatctgcctgcttatcaggaatggaacttttttccttcccttgcatattggatgtcttcatctgaaatcaaacattttttttaaactcttcattacattttttcattttaaactgggctagtgggcgattgctttcaacactactgtggcttcacgttaaaataactgtctggtctaaccacaggcagcgacggccacagcttattcttgctaacatgtaaagcagaaatatttgggccgttccaaattgaggcccacagagtgccctgaaatgcagggtcagtgcagagtggagcacacagctgtgagagccatcgccaggctgccccagtcctgcatcctcagtcacccaggacctggctgggtgtcggcatgccttgtctgccatctgtgggtcaccctgccacttgtcagtagaaacagagctgaccatttctgtgcctctgctgctttgcctcccatggccaggagggatctgtgggcagctcgggggggtccaaagacatgcaacttttccctgtccttagaagggaagccggccagtccaggtggccagcagtcccaggatagggtcgagtccatcagactctcttctgcccaagggatttcttgagtatttttgagccacttagcaactataaaatatatggttatatatttatatgcatgaataaatatatgcttcaagctgcgattgcactgttttaatggcaaatattataaatgctgtaaatagccatttatttttttttcatgattaaatgccattgttggagtgatttgagagaacacaaggaaggaacttgaatgccaaattgctctgcccacccagttaacatgcaaagcaggggagggtggtgggatctaaggagagggatcaccccccaaagcctttgctttgctgggagtgggaccaacccatggaggggctggagacggggcaggggccagtctacagggtggaaagagcccccattctgactgtggaagtgacccccagactgctcggtggacttaatggaactgctcaggctaaaaggcatccctttctcctgggatctgcttccttgacccttcaggagtctgatttggtggtttcctttgcctctcagccccgctattcatatggaggagaaaaagggagagaagagctgtgaatcttgtctgtttaccatggttaggagaagacaaaaaaaatcatctctcccctggccctacctttagtcaggattccacctagaagccttcagagcatgggaatccattgagctcaaagatcctgtgatagggaggattcaggaggttctccttgaggaccccgaactttctatttctgcgtggcccccttcagttgttcattaagtgaggtgtcgccttgcccgtctgtaaattggtgtcctgagcctagagcccctcccctagccttagttgggttcagatacccctggaagaatccagataaattaatctgctcaccagaaatttgctttataaaatacgaacatttagttaaatttagcttcattttctgggtcattctccaaaatggcatctctttaaagatctccagcttgatggatctttcccttgggggcaaaaataatagctgttaaaaagtgagagtgggtagccggcgtggcctctcgctggtgctggagtgacagaggtgggagggtggcctgggccagatggctccgcagaggcagtagcttcggtccgctctgtactgctctggagtgttccgtccctctgcttgttgtgtttacgttttccattttgtttccagtgacacatttagggtgaaaaagtcgccaaaacggtctcctctctctgatccaccttcccaggtacagtgttcctttgatcttgatggttttatgccccccccgggggaggttttcttcgcttgttgacaaagctttgctttctgctcatcccgggcctgtttccaagaccctcttcttgcattctgtgtggagggtccctcgatgtttgcttcacattgttttggtcccttcactttgcggaagatcagagtgtgtcccgagagtgggaagacgttcaggaaaaacattagttgggctctggaggacccactctgctccattcaggccagttcatctgctgtgaacttctaggactgtcgagatgagaaagtctcttgagatgaacaaatatgcagtgagaaggtgaagaaactcagcaagtgtcaggagcactgaattgtgcagccaaaattggagtgggaagaaaagggaagcccctcccctaaagaagtggggcttaggttctgtcttgattagagtccctcttaccagttcctccatcagatagattccatttcttctaccctgtttacagaccaaggaaagttatcgtcaagcctgtcagtatgttagggctaatttctgggtcataaaacaaaacagacctgccacccctccaaatctgagccagcaaagccccagcctgcagaccctggccagagtgggggcagtggagggaagcactcagccctggggataggggctcaggtcccagctgcagctctgtcctgacctctctaggttcccaccctgccctactccacttcccactctccagtggaaatggagataagatccccctttttctgcctccagggactgatgagatgcttgtcaggtgattctggtgatattgatgtgcaggcctgaagcactgtgtgagcctcgcacagcagtcacagtcgtaaaactagcaggaatgctcaagtaactaagacacaaaatcctgattttttttttttttaaattcatggtcattccctgaaacaaaccatcataaaaggagattcatagagggaagaatctgtgtgtccatctgtttccttaatggaccatttggagcagagtctgagaagagcatgcagaggattgtgaccgggacctgtcctggctaatgggtccccagacctgagggtgggcacagtttctgaccaagagtctgatgagacaagaaacagtttctcttctctttgcaggaccccaccccagctgctacaccagaaacaccaccagtgatctctgcggtggtccacgccacagatgaggaaaagctggcggtcaccaaccagaagtggacgtgcatgacagtggacctagaggctgacaaacaggactacccgcagccctcggacctgtccacctttgtaaacgagaccaaattcagttcacccactgagggtaagcaactctgtagccagctggacccccactctgcctcggagaatcctgcccctagggagccaaaggccaggagagaaacttctcagccaggtaaccacgtgatcatcattgtgagatcgtctgcacgtctcccgctgcacttgcagctcaggctgtgtttgaaaacagcctgagacttgaaagcagctgtcccttgacccaagactcctgctaagagccagcacggtgccctctaactccacctcaggactccatcgagtgggtcctgagcgcccactcgagctttgcccatggcttatgtcccctctgtgattttgataaacacagctccaagggagtgtcattcaagtcaaactctcagtgtaggtcactgacctggactcgcttggtgccaccgttattcctaggccccatactgtgttcagacactatggccacaccttttaatgaagcctcaaaccagagattcaccccaggcttgctgagagggcatgattccctcctcagaaatgggcagaaatgggctccggacaactttgcttatctcaatatccttcctcctatgtatattcaatttcagtgttttttctttttctttcttttttctttttttttttttttttttttgagatggggtttcactcttgtccaggctggactgcagtagtacgatcttggctcactgcaacctctgcctcctgggttcaagcgattctcctgcctcagccttgcgagtagctgagattacaggcgcgtgccaccacccccggctaattttttgtatttttagtagaaacggggtttcaccatgttagctgggctggtctctaactcctgacctcaggtgatctgcctgccttggcctcccaaagtgctgggattacaggtgtgagctaccccatgcttcctttttgataggaaaacctttttgaaggagagctagcacctttcttgggagggatgaccccattgccctgacctgttggtgcaccacgttcccagtcctccaacccattttctcctccagccacctctgtgaggctgcccagttggcattttgacactccagcttttgtgatggttttgagttttcctttctcgatttctaacaatttattttattatttttttgagatggagtctcactctgtcgcccaggctggagtgcaatgatgtgatctcggctcactgcaacctccgcctcctgggttcaagcgattctcctgcctcagcctcctgagtagctaggattacaggtgcgcaccaccacgcccagctaatttttgtatttttagtagaggcagagtttcacagtgttggtcaggctggtctcaaactcctgaccttgtgatctgcccacctcggcctcccaaagtgctgggattacacgtgtgagccaccgcgcctgaccgatttctaacagtttttttgaactgagtagaaatcactgtgaagaagatcacatgtgaaggtctggtctccactttttgctgctaataagagactaagatctcctttaaacggcttcctccctgtctgagtggagtggtggtgtcatgagggtgcaggtagattttaatcgtaactcaaaaactcccaaccttcttctggacgctcttccacagtcaggcccggaggcatggtttgctttgtgcccacgaggtcttggaatggtaccagcatgcaattatggtagatctatttcatgtttttcagagtattggatgcatatcttctccctacccaaaactgcctttctaaatttgacaatgaaaagatgatccaaattatgtatacttgtaccttttggcattttgttttctgtaaaatagagccttttggttggctgtcaggttggccctctggtttggggtttgagaggtccgaaagtgaccatcttggccaggcacagtggcacacacctgtaatcccagcattttgggagactgaggcaggcagatcacatgagctcaagacccaggtgttcaagacgagcctgggcaacatggcaaaacactgactctaccaaaagtacaaaaaattatctgggcatgctggtgtgtccctgtggtcccagctgctcaggaagctgaggcgggaggattgcttgagcccaggtgacagaggttgcagtgagctgagattgtgccactgcactccagcctgggtgacagtgagactcgtctcaaaaaaaaaaaaaaaaagaaaagtgaccatcttgctctcccctgaccccagaggccctacgatctggcctcagcctcctttggatccttatttctctctgcacctgcatccgaggcaggagcctgttcccggaacacccctcactcagctgcctctgcagtgctgctgtagaccccgcctgctggaacacccttccccccaccctcactgcactccccccacctcatccctgtttcacaccctttccttagtgctagcccctcccagcctttccctggaattccgctcctggctctgcccgccttcagtgcttgatctgggctgagctggggatatgaaacaccgtaataatgatgtgtgtgcatttcttgcttcccaactagcttgtatgtttcctgaaggcaagaactttgtcaggttcatctctgttcctcacagcaccctcaacgtcgtaggggctaaagacaggtttgtgaaataatggtaacacaaggtcaggcaggtcaacagcttagtaatgtcagctcagcaatttgatcctgcagtgggcatcacctgcgtcagatgtggagcactgcggggaaggtgctttatgttccagaggcagcaagggacatctgagcacaggcctcagacttggccattttgatagcacctatggtgggttacatctcttgagcttggtaagagatttctaaatatcggagaaaagcatttagaaaccatcctgaggttggggccgggcgtggtggctcacacctctaatcccagcactttgggaggctgaggcaggcagatcacttgaggtcaggagtttgaaaccagcctggccaatatggagaaaccccatctgtagtaaaaatacaaaaattagctgggcatggtggtgggcacctgtaatcccagctactagggaggctgaggcaggagaatcgcttgaacccaggagacggaggttgcaatgagccaagatcatgcccctgcactccagcctgggtgacagagtgagactctgtctccaaaaaaaaaaaaagaaaaaagaaagaagccaacttgagctggacatatgattttgatatgtgtgtgtctttagttttaccatcaggaaccaaatacatgcatttttttttccttaggaaatataaaaatactaacagtacttttagggctaatatatacctcattcaatggtggcatttatttgtccatcttctacattgtactaaaacagacaacttactagctgagtgacatatttgacagttgtttttttctgtaaaaattgaacaaatatgtaaatatatgggtttggaacaaaacttggttaaacccattaccttagaaaatgggaagatttgggaagtcatgactataatttaagctggtagacaataaaaaatccattaatgtgaagacacaacagttgcagtttcaggaggtgtgggccccactgcatccacctcgctaacacacccagggtccccccagcatctggacgtggaaataccattaatgtaatgaggtccagtctagcagcaccagacacacacccaggggtgctgatgtgattgatcgtcagaaagaatccgtgtggggcggggccccagctgtgatgtgagacttacactaaagtcaccaaccacaggaaaaggaaatgttgggtgagaaataataattatgatttaaatacatattcactatcattaattctataggtaacaataataagctagggcctgtcattgggtgaggacttactttgagctgtgcagagtcttttacattcatgatttcatttcatcctctcagtctgcagagtgcttttctacagttccccattttaggaacaaggatacagaggcttggagctgttagtgactcccccagtgtcctggcacaaatccgtggagagccaggtgtgcctgacttaacagctgtgctctttatgtgagcatggaacaggcttgctgcctgcgtctgtagaatgaggctgttgacctactcacactttcctacctaggtccataggagcagaatgttgcagagcttcaagttgtctttaatatttcaaaacacctgaatgtaactaggttagaaagatgcccaggggattaaaataccatatttgggctgtaattgtatcaactcactaggatgacactggtcatcttccacggatgaagaactcattgacaattataaatggttttctttgcgtggttgcttagtaaatgcccttttttggtgcagtcttttaaagcgtgatgcagtgggagaaaacttaacccatgtagtccttgtggaggaaaagattaggaactattggtctacacagctgagtcctctcctggctgtccaagagaccctgacagagtgcagttgttttagattcagaagtctcagtgactctttggtggtcacccagttgccctgtgtcctttaacacagctctgttagtccctccttcccactctgacagaggggaaagtgccctccttggaagcctcagctgttctttaacggcaggcgccgtctctgtcacactgcagacacttagaagggtgacggtggggaagctgggagcagcctccctgtctctttccctggactcttttcttctcccctaatataatgtcacttaggttaaaagttccagaaatactagccatgagcaggaatatatctgatcatgctcctttacatttgtgttacccatcgaagggtttttatcttaaagtatttcattttagcctacaaaatataagcactttgagctccacttggaagataagtcaataggcaaggagatatcaggcgagttggcttccctgatcctagcaatggagacctggactcagtggcatccttctggcttctgcatggggctctttcctgttcctagcaagcccccagcaattagagacagacgaaagcagcattgaaggcccctcgctgtgcagtgcccccatatgaaataattaccaaaagcagccctcagaaacgacaggacccgtgaacgatgactgagcctcttcagctaggagcagccacacacgttagcaaggaccatctcctccagttgagaatatgatgtgccacttggtgtggtgacatcacccttcctggcctgccagctgtgtgtggcatggtgtgaaaatagggctgaaattggatgtggtttcacccccatgcctgccctttgaggcttaggatttgaagcagatgagtgaaattttgaaaaccaagttcaggaagatgttttctcaaaatagcagagatcacccaagatgacaggaggaagtatttattttttttacatcctctccaggtcattctgtaaattataaatcaggatcccaaatgaccgtgattgcaacaagcagggcgtgttctgaagcagcatctccaggcgtctgccactcatctgggattgatggggaggagtgcgggccttctgaaaccaggcatctcacaaatgcaaacactaatgtgggtgtcagagtaccccacttttgcaccgtcagttgctccttctgaagggaggaatggggacacaggacagtgggaagggacttccttttggcaggtagcagagaaggcagatgagtgagctccgtgacctaaaactcacccagattcagccaccagaagagctgaggttccaagtgggacactttagtgaggcgagctggttaccagagccgggcactcgcccggggccacaggcccctggaaaaactctgcggtggtctgttgctcgtttggtgtgtcctgggtgccctgtgctgtactggagtgtgcttagagatttctgttacatcatttagggcatgtaatgccttggaaatcgtaatgataccttagaagaggcagctgattcactattattttctcaacttaaacagcttataatagaacagtaaaatgatagtcccagagttttatacttggaaagtgatagatagatctggaagagaccctaaatatcaccctgtccatccctgtctccttcctcctcctctctctctctctctcttttttttttttttttttttgaggcagtctcactctgttacccaggttggagtgcagtggtgcgatcttggctcactgcaacctgtgcctcctgggttccagtgattcttctgccttagcctcccaagtagctggaactacaggtatgtgcccggctaattttagtatttttagtagagatggggttggccaggttgttcttgaattcctgacctcaaatgatccgccagcctcagcttcccaaagtgctgggattataggtgtgagccactgtgccctgtcctgcttctcatttttaaggtgaggaggcgattaagactttacaaattaatgcttctgtcttaagttggggcagaccctggggttcaggcttggtgtgagagttggaaacacactttctctactcatctttattcaggatgcaacagggctttctggcctttaatcacaaaactgtcttcgatttcatgagctggccatgctgagtagaaggatatgtttgcctcaccaagggagatttagagattcctgaaagattgtccacgtgtttaagtagttgaggttattcagccatttgcaggttttatgaaagtcctccaggaaatagctcattttaaagctgatatttttttgacgatgcctttagcaataggcagaaataaaggggctttaaaccagaactgctatttatctttattttcatcttaaaaaaagttgaaagattaaacttgatggattgccactgatgctttttcacagtgggtttctgagcaggtcactcttcacctcttggttttctttttaagtagaaaagaggtatctggtagctctagattgtggcttctgtgaagacagaagtccattctggtcttatccaccactgtatctgctatgcctggcactgtgcaaaccatataggaggtgcttcatccgtttgctggatggggagttcagttgagtgtcagcttagtttccaggtactcgaggcaggcagtggtgtttgccgtctccattgagtgtatgggattttcaccaatcaatttgaaacaggtcatttctccacccattggactttactagtctttgagtttgaaaatagatttggaccagccctgaagacactggtagaaccctgggaaaggctccaggtgacttacaaagcttctcttaaccagcagcgctgaaggaacaatatcgtccttccctcacttcagagggtggccagagctgaatacccagagagggacaagtaagggtccagttccaaaacatcatgaggatgtatcatcccacgtgtctcacctgacagttacagaggaaacccgcacccagaatgcacgtgctgtcttatgggaacactcagcgcagagtgctcaggtctggccacacttgggctgtgcttggtcgtgccatggaattcctcaggactttctcagcctccctaatggcagaagcccctttacagcaagacatttaccgtttgtctgaaaatagccgaactgagccttttcttcaggctatatgagaagtctctagacagtgggcaccgtcagaaagcccagagccttgtgatagctcccaccctgcctggctcagatcttcccatttttttcctctggcactaacctcaccttttgtttttttgtgtttgtgtttgtttttgtttttgcagagttggattacagaaactcctatgaaattgaatatatggagaaaattggctcctccttacctgtaagttcgtctgcctcgggccacttaggggactcgctttcctgccttcaggggcctcctcccctgtgcagagtgtctctgggagctcagaccccaaatcgagtgttttctgtgtacacagcttcccgggtgcacagcagtgatggactggggctggggggttgaggtttgtactcaatccacttcgtttgacattttcagggagaaaatgatagaatacaattagacgtcctgcagaattactttcctagactgagaaagagctagagatttctttaaaaaaaaaaaaaaaagaggtggtgatggtttttcaggtatacgattagctgtttttgagaaattgttttaattaactgaatattttctctgggcaataagcctttctccctggtttttcattttaagaggttatgatgggcactgtctttcctggcataatacctgctgccctagggcatgttattccaagggtgacctcttgctgttgtcagcgatgccctcggagacgtgtggcacacaggagggcttgcttgcttacagcactacgtggccctggatatgttgctctttatctttctttgcattagtcatagatgccggggttactgcttccaaactgcaggttgctgtaagttagacctgaaggttgggtgggagaatgtccccatgcacaggcttaactcatgcgccacgtcagtgagatcacagcttcctgagtaaagcacatgggctttgtcatcatccccttgtgcgttgcttaaagagcttagctctgtggccacacctgtgtccccagtagctgaggccatatacataatactgagggcgagacattttaccgctgaaggggaactgtcgtgtgttttgagatctttgatttaaatggattgaaaccacaaggggccccttcctcttgtgccaccacccactgcctggtgcgttggcaggcctcgcggatgaattcgtgaggagcatgccctgctcaggaacagcagagccacccagagatttcatggcagtgcagagcagcatacctgccggccgttgcagggacttatttggggaccccagcagggcatgtggagggggtctttcaaggtcttcccatcactgagagatgccagtcccacagcccctgtttctagtccagctgagttgctctccaggccctgcccctgccctgggctcattcagctatggtcagcccaggtctaggctcttgccctacctctctgtttatctgcagtggccagcacagctcctggcccagagagcgtgctcagtaaatgttggtgaattgaacaaagtccagctcaccaacgccgtggcgtcttctcccctggccacgttcctacttgaactcagttgtactttctctgcatcctccttccctcctggcctccccacctcactcctaaccaggccccacttcctcctctcttcctggtggctccagaacaatgaaggcttttccctgatgggttatttgttctctgttgaagagtgctccagttttcatctccgttgcacgttcaggccaactgtacccaagctgatatgtgattttgatccctgcagcaggacgacgatgccccgaagaagcaggccttgtaccttatgtttgacacttctcaggagagccctgtcaagtcatctcccgtccgcatgtcagagtccccgacgccgtgttcagggtatgacttccatgatgagagagttacacatcatgctggatgttctaaagcctctgagcaccttcatgctgttattttgacttcatttcagtgcatagattcaggcggctgacatgccacatattttttttttttttaatagagacagagtctcaccatgatgcccaggctggtttcaaactcctgggctcaagggctcctctcacctcagcctcccaaagtgctgggattataggcatgagccacaatacctggccagcccacacttcagtctctctgaatgtccacagggacataaacgcattggttttgttactggctaccctttggactaaagtgaaatccttcagcagttgactgtgtgtcccactccctataatctcgcccagtgcacacacactttattccatcatttgtctaaagggggacactgtggcccagcattcaaagctcgaatcccacctgtaccccctcctggttgtgtgacctgaagtgaggtacttgcctctcctgggcctcagcttccttgaatgtaaagtaaaagtaataatgaaatggaccttgcagggatttgatgaagattaaaggaggctatccgtcttccagagcgtccccgagctgtgtgacggggagagggcactctgtctaccagagagatgctgtgtgtaaagctcttgttgaagtacctggcacacctcaagtgcctggtaaatgtacattattgatatgggtgttcatgtttgcatttatgagggctgatgtttggagcagtgcattgtttgatcaagtaagtgtgggcattgctgtgagatttggaccagcctatttttgtctgcctgcccctttaagcaggagtaaaagtgcttgcattgacttctcagacttacaaaagagactctgcaggctgcccagggtggtgagaacaatgatgatggtggttatgttgttaaaacagtagtggcaccaggtgacaggtaccacattaagtgctttacaggcatgcagcatctcatttaatcttcacagagaggtccattgtctccatcttatagagaaggaaatggaggcacggtatccagtcactttcccagagtccacaaccaagcagcgggtggtctgctgaactgcagagctcgggtctgtagccagtggcatctgtgcttctgcccctcccttgtcacttggtcctggggtgactgcccagcctagaggctgcatggccactggagacctggctcatatccctctggaagtccaggattccttgtgatattgacttggtcagggcatcctggttgatttcagtgggtttcccaatgagaagactaaagaaagatgccctttgcttcccccaggtcaagttttgaagagactgaagcccttgtgaacactgctgcgaaaaaccagcatcctgtcccacgaggactggcccctaaccaagagtcacacttgcaggtgccagagaaatcctcccagaaggagctggaggccatgggcttgggcaccccttcagaagcgattgaaattgtaagtggagttggagggccccagatcacaggggatgaggtgtgggccagctgcgtattgtcaccaagaaggccaggccttcagagcaacactcacctggcacctgccatgggtcccaccctgactccctgaccacagaagccaacctgggaaatcccataccatgaggatgaggggaaggttctctattcccaccagtatggttttgcatttcccacttaagtactttatatgccttcagggttatttagtttccattttttgccacttaggactagactgttgctttagggcagtcgttaagcagtcctctgccgcttcgtccttgatggcagagggcaagggacccttttttgggaaacagttagttttcctgggacttagtgatgggaatttctcctgttcaaaaccaggacttttcctctccccaagccctgtggggtcttgcagagcaaacagagctgagctgaaggcctcacctaccccccagtccctgcacagcacacgtgtcacatggccttgtgcattccccaaagtaagcgatgcccatgccacggtcttccacacatctgaaatgcaccatccttctaggtgaattttagttttatttcctctacctcccgcccagcaatccccaagcaggtgtgaagcccttgatttagtgtgttatttttgttgttctgtgttagtaggccatttctcttgtgcatcaaatgtttattgagcacctactatgtgtttggcagttggatgctggggtggatactagaaaaacaatagcaaaaagagggtctagatgtgaatcaatctctcacatgaatactctgaagcacacgtccatggttcgccttctacaaagctggcttctgattgtgaagtctttctgatctatcagaagacactttttcatttgaaatcatctttccgtgatttagaaaatgacctttaccaaaaccttacttcatatatatatatatttggaagtatttcttgaagagttatgttacgtttggaaaacccaccagctaactggcctttcaccttccgctggctagctcccactcactgaccagggagtgagggtggcgtgggggtgggaggacactgaaggctatgcttttggggagggggtcgggtctgccaatctcaagatgtgcattgtcagcatgtgggaattagtctagatgaaaccacaagtaatggcagctaattgatactctctttagcctcaaggcaaaaatgtccagcaaatggctgcatggcccttgcttggaatcaatatcactctctgttctcctctatttttcttgtgtgtcctcctctctgccggctttcagacagctcccgagggctcctttgcctctgctgacgccctcctcagcaggctagctcaccccgtctctctctgtggtgcacttgactatctggagcccgacttagcagaaaagaaccccccactattcgctcagaaactccaggtttgtagcccacgtgtgaccttttgggagtttgtcaaaacctcagtagagaatgaacccccgaggcccaaatgaaataaggcaggatttgatgaggaactgccgagaacgttcccagtgacatatcttcccctcaaaggatggtatatgtgacgttctttccccacgataccaaagtgatgtaaattgtgtgattacatattgaacaaaccatttctatttcaatttacaaactgggcccaaatagtcattatttagaagcattgatagcccccaaagcagtttctgtgatttattcactgaaccaagaatattagatcaccactgagccaagccgtttatatatacgtggctatctcagactcccagtgagataacatctgggctcagtcttgcatctggaaccaaaaacaatgatctactctgtgctttaaatttgacaacttaatttgatatcctctagactagggtgttcagagcaaacctagagagattgttaacagccatctgagagatgcagctccattcatggaaactattggccaactttaccttaagaaagaaaaagggaaagaaatgaaagaaaagagaacagtaaaaattttgatcccattttgaaaatcatttcgtattcaactgcacaatacttcctgacaatcagaagggtgatttttagaaaaggaaattaaatgcttatttcatgatctgctgaggtgctaattgtgagagaaaggcggagcgcgtgtttttcccgagtgcctgtcatgacacattttcgtggcacgttcatttctcggatgtggaaaccattgacgtctgtcttgatgcatttccctgcggtttgcccacactccctgtgggcaggaggagttagagtttgccatcatgcggatagaagccctgaagctggccaggcagattgctttggcttcccgcagccaccaggatgccaaggtaccggtttgctgctgcgtgcgccacctcctgagaatgtcatgtgtgccgctggggtccagaagctgctttgctaaccatccgccaggcgggcatcatcggtgtccagcaaagagtcgtttccaaaaagctgaaagcgtcactcttgcataaatacacactgagcacatagctaagatccatttaagtcgataatgctaaaccgcgggatagtaatgctggttaaatgagagagaatacagagaccaatgtatgggtcagtagggtaaagaaggctagcctaagatggcaaagttggatagaaaactggttagcaccaattcaacagagcaaaacaaaatcatgacctttgagggttttttttttctacagataccatttgcttctctattgagcaaacataatttgcaacttttctattttctgcaagttaacatctgactttgttgagacaaggccctaatcaataatacatagtaagtgaaaccaagacatttgataatattctagaccaggcttaagcaattctttctgtaaagtgcaaatgataagtatttccagccttgtgggccgtactgtctggcactgttccaataaaacttttatttgtctgtttgtttgtttgtttttttacaaaaaacggcagtgggccatttggcctgtggagtttcccaattcctagttttagcatggagtatgacattgacagggcatgcagaaatcttttcgcctggcttccaagtttggggtaacttttattaacaatttgaatgagttgctgatgacgtgcagaacgtgtgtttgcccctggactgcccatgcaaaccttggtctctgagggcggcctcgttcccacccctcaccccaccccaagttggacagcccgatgaacctggtgtgtcagactgtgctctgtggctttgaacaagtaggtgaacctcttcgagccttagtattgccgttcgtgagatgaggccaataatagccagtgtacaggttgctgtgaggatgacagatgtctggtgtgcggagagtggcaccatgcttgacacatagtaggtgtgtgataaaggaaagctgctgttgttagctgacacttccctcttgcttctgttacctgatcaggtgctcccagcatctctcctcggtgggtggatccgggtcccattttacagatgggagatggagccacttgacagtgattcaccagcctgttggggactagaactcaggtctccaagtgagaggcccctcgctgggtgtggtggtacacacctgtagttccagctactcgggagactgaggtgggaggattgcttgagcccaggagttccaggttacagagagctgtgatcacttgattgcactccagccaaggtgacagagcgagaccctatcttttaattgaaaaaatacaaatgggagcccctggcctgcctgcctggagtaacagctcatctgcaggggggcagtgaggtctgtgtctctcatccttggtacaagagtaggagttccggctgctgctccagccctgagggccccgcagtgaggtctccttggccatacccaaaagagagacccctcccagagacagtgggtgcttacactgtgggtgtgcaggctgggaacagcgagacccaaggcagggacaagaatgtcaatacagattggggatgtcctcgttcttgttgccaaaccataagcttaggttgaatttccatgaaagcgagatttttagaaagcatgaagcagtgaggattttccccccactagatttatttctagacatccttggggcctaaagacagaatgaattgcatgcagtttggccactgtaagtaccatgtattcctgtccagagtttgaggtggaattgagcatgtttggtgagtagctcagggtggatatggagtgtgctgagtgctttggtccccctgccacctcctttggagagcggccagagatgactgttggcaaataatggccaggagttgactttttgtcaattacaggctgttctcagaatatgtgccccaattctgagttagaaaatagagtcatgtgtgttcatagtatataggtcggagaggcagcccaagccacctcttttatttcagaggcgtatgctcaaaggagtattctgtgactgtcttggagtatatagggaatatttttctctagcagagtaacttgtattgcttttgttaaaaagtgcattacctggtgatgttggcctgtggaaaatagatggtgttcctgtagctacccagcccgagggtggtccacgggcctgacctcaagttggtccctgtgggtttctttttcatatagaaagattgttccttgctgcattggaaactcctgatgcataggaagagaaaacagcagctgtgtatccaatttgcctttttttctggccatatatttcagcggtaggtgacacagctctgtcattttgccaacatggtcttaagctgttgctagcacaaagatgaaatcacttggaatgaaaaatatcatattgcatggatgaaaatcaccataagctagagtggggagtgattttccggttgttccctagagcagctttgacttccatatctctctagactgatggagagctgagtcagccttgcaggagctgcagtgggggtttctccatctcagttagaaaatgtgagaaatgaggagaagtccttaggggccggggtgtcaggctgcagtctcaccattactttccttccacatccttctggtcaaacggaatttggttgtgtcctcctgggagtgaacctgaccaaggtcactggaaatgtggtacaggagccctgaatttaacactcagccacgtcagatagaacctgaatgttgtgtctgggtggctctccaagaggcacaggctgtgggcctttctggattgggggacccaatataaagacggaaggatgtgtctgggttccttaggaacaaggccatacaaataacaagcttcaggaagggggcaagtcctagcaagaggcccccagcacggttgagtggtgtggcccctcagtcctggcttagaagaggccgatgcctggagcttacatgagcaagagaaggagttggggccacctgtgttgtcgttgagcagcctggcagcatgctctgtgtttccctctccattgctgtgtcacagactacccccacccatacacacacattgagccgaggttcaaaaggagggagacgtgatgcccaaaagccacaagtacagcctgagaggagtgacaaggaccagctcgcgagcgcctgtgtatttggccgtttggagcctctgtggtcattggctggaggctgtgtcttgactcggtgggcaggagcggctggctgttgccagtggtgccacctgtgggagtggcataaggcctgatgctgagtgcctccccatgatcaccgctcctgctgggcttggggactgcctgtggtcagaattggatggggcagcacccagcggaggccactctcctgcgcgggtggcggcacatgacctggacaccctctgagcaccaggcctgtgtccatgcaccgtggccttggtccaggtggctgtcatctccctagctcatcctgactcctggcctcacccctccgtggcccctctggcatggctctcccagcctcggatggcaggtgctctccccagaattggcctctctctgctccaggggacagggatcctgccacagtgctagcccctcccctccatgtctggcagcagggaactgtcgacaagggggctacgatgccacccccagctgccagcaggaaggaccccaggcacagcctgcaggtctgaagtgggtgacagtggccagaggttctcacaggtcgcaggacttcagtggagtgaaggttggaaattggttacaaaggccatgccttctgcgtcacagccatttcacatttcaatttgtgattctagtggctttttttggcccctctaaagtagcaagtgggggttatgtgagagaaacaaagcttaatctaaaaatgtctgatcttaaaatatcagcgacagacaaagctatcaatttctgttaaaaacaattcttggttgtaaggggaaaccagagtgtacacaatgcatttcatcaacatgcagatactcaggcagtaattcaagagggctctgaagtcatctgttcctttattgaaaactccaggtggccgggatgaaggggtcagtgaacagtctacatggtagtgtccatttgaattttcttagaaaccccattattttacttattttttttcattccctttcttgttttacaaaggattttaggcagcataaagataattaattccttcattagtcatatttagtttctgcccactatgataaagttagttttaattaaatcaattttctcctgcgctgcagggagcctgcttattttgatcagaattgaatctcattctgggaaaccttgtgccccagtctctgagattctccattttattcatcttcagaaggtccacgctgagtttgatggtgactaatgttgttttcattttgaaattttattgctcattaaaaaaaacacacacatttgttgactttaaaagtgaatagtttttgtttttccttttaaaatcctttgcctttttaaaatttttttaagacagagtctcactctgtcacccaggctggagtgcagtggcgcgatctcagctcactgcaacctttgcctcctgggtttcaagcgattctcgtgcctcagcctccccagtagctgggattacaggcatgcaccaccacacctggctagtttttgtatttttagtagagacagggttttgccatgttggccaggctggtcttgaactcctggcctcaagtgatccacctgcctcagcctcccaaagtgtttggattacaggtgtgagccactgcaaccggcccccaatttttttttattaaaaatttttctagagatgagatctcacaatgttacccaggctgttctcaagctcctggcctcaagggatcctcccacctcagcctcccaaagtgttgggattacaggtgtgagtgagccaccgcacacggcccagaatttttttcagaattgtgtgtttatgaactttctccataaggacaaatattgagtcttgatctctgtgtcatttttcagctacttcctgagaagttcccccatgacaagcagaactgtgaaacccattttccaatagcagagatgaacccctgcatgtgaggctccggccctgcggcttggtggtgcccttgcttctgggaggtcagcctgcctctgctgagggctattagtatatattctggtcaagcgtccttaaaacggggacttcttgagggcctgagcctgccctgttctcacatgagcgagtctctggggtctgcttgaaggggactgtgtacttccatctctggccagtggatcatttgggtcctgcttcagggtcaccccaagtatgcaaggccaggcaggggccaagaaacccaggcaacagacgttcaatcttccaggacaaccgaaactatatagtttcaccctgcatgtatacagctaactaaccggtcctaactcagtcatctccggtcctatccattaaacttcttgagttttccaagctgtctcccttctcgggttcattttccctgatgctgtcgtagggtaggcacgcctgttctggtggtggaagagacaaattctgcacaggtacctttaggtcctcccccttcccagttaatgttggctctttaatcttacctgctgtccttgataagccctcattattctttccccaaatctctctctctctactacactgtggtagccttccaccattcaatttcttctcataatttcccaagggaagaagcagcctactctgcctgttagagcactctagtattgataactagggtagaggttcgctgggcagccatgacagcgccacgaggttaatgcataggactgagagtgtggttggtttgatgtttcttttgcagtagaagtagactgacaacccggctgtgctggtcagtgatgctgctaacaccgcatttcaactgtgttgcaaattgccgagcattttgtgcaaagggaaaaagaataaccacagattcctcctcctcacctgtgggaggccagtatctgtcctccacaaaaggctgtaaagcctcaaccaacatcagttgggtgggttggggtggtggatcatgccacttgttcagggtctaatcagcagatgtggatattgtcattgacccagtttttaattttcccattaacgtaacagacttcatggcaacagaactcttacataactctaacataactccaacataactcttacatccagagactctacctagccaaaggtgatattggttgacaactacagtaggctttaagctttgcgtgactcacatcctttcaaacagagctaaacaaatgcccccaaaatggaaatgtaaacagtcttacaaaagtgatcaaatctgtggttattcaaaactaggaaaacatagactagaattcaacattattcaccattgagatctcattttggaagtggaggctgctgaatagtgccctgggttctcaggcgctgtgcctaagtggctcagtgagtgataaatggcagagataagcaggtaccagacatgctggactccaaggcctcggagcttaaggggcctctgccattagcccctttgtctgcctgcccaggtgcagaatgatagatctccatccatagactggactcggcatttccctgttcatcagtctttgcactttctcatacttttgatgttctttgtttcaaaaccatacaattggcccattcatgagagggtgagtgtaatcctctttgtcgtatgattaatgctaactgttttttttttaattaaaaacgattccacagagagaggctgctcacccaacagacgtctccatctccaaaacagccttgtactcccgcatcgggaccgctgaggtggagaaacctgcaggccttctgttccagcagcccgacctggactctgccctccagatcgccagagcagaggtatcgtggcatgtggtgtaattaccctcttcctgccacttataaatacgtatgctcgtggtccacaaagccagagtctttggagacagactttgtcctctgaacgctgcaggcaaagatgtgtggcacaccatgcgttttgatcttcctagacgctatcgtgtaatgggccttttggccttgttgaatttacaacaaaaagcatgcccctttcagttgctccccagtgggcactgtgaaagtctgatatctggctgctttcttttttatgctcggggaagttctctgaatgtaattatggtttgttgtaggaagttttcattccacatttattcaccgtctccttttcttgatctatgaattgctcagagctgaattcactcatttggggctaacctttctcttcttctctctgaaactagatcataaccaaggagagagaggtctcagaatggaaagataaatatgaagaaagcaggcgggaagtgatggaaatgaggtcagttggggagctgggccttcctcgtgcctgagggatacttacctgtggtttaataatgaccggagctggtgtggtccacagaagagtgtcttctgtggaagttctctcttctttattacacacagttcatatttttctaaaagtatttttactctattactattactaaaatagcatgcacatgaattaaagaatgcattcaaataaatgtatgtacaatgcaaaacagatctccccactcagcctccagttccacaactcgcaggtgactatcttctgtttctggtggatccttccaagaattttccatttctcatcacaaatgtaacaatgagtgtaaacagcctcttttttctccaaaataaatgagagcttgcagtatacatcattctacactctttttaattaattaatttatttttttgaaacagagtttcgctcttgttgcccaggctggagtgcagtggcgccacctcggctcactgcaacctccaactctgccaggttcaagtgattctcctgcctcagccacccaagtaactgggattacaggcgcctgccaccatggctggctaattttttgtatttttagtagagtcagggtttcaccatgttggccaggctggtctcaaactcctgacctcagatgatccacccgcctcggcctcccaaagtgctgggattacaggcatgagtcgctgcgcctgacccaccactctttttaaatttaatagcatatttttgacgtattttttattcctctctgcctcactctgtttaacaggtgcttaatggtccattgtatggatataacgtaattaatttaaacagtctctgtggacaaacatttaggatgtttcctgactgtagcttaaatgatttattttcatttgtggtatgttgtaatagaaatatagtcaccatgtatagtgtacataagtgcaatggccgatactagttttttttgtgtgtgtgtttttgagacggagtttccctcttgttgcccaggctggagtgcgatggtgcgatctcagctcactataacctccgcctcccgggttcaagtggttctcctgcctcggcctcccaagtagctgggattacaggcacctgccaccatgcccggctaatttttgttttgtatttttagtagagatggggttttaccatgttggccaggctggtcttgaactcctgaccttaggtgatctgcctgccttggcctcccaaagttctgggattacaggcatgagccactgcacccagccccgatactagtttattatcaaaatcaattgcattcctggctaccattttaagcagaaaagcgaactgtaggtaatcatatcccgttttctaggtcatcgtaggatcttcctgaaaattctcctgttcgttccttctttctgctgatggttccctgtgaccacctctggacattgagcctagcgtgctatttcacattcaaacgaaagccctgcatttgcattatttttaaacctctttgttttttctcttatttgggggtatgggtggttctagtttttttacatgcactgaaaatgaggcatggcacccaggaaggctgtaagttctgtctctaatttcttttgcctcctgggagctttgccttcttggtgcctggggagtgcttattcgtggtttgagaagtcgtaccactgaggggcccccaggaggtgccatttactagctgatgtggtaggatttcaagatgtcaccagctggtgcagatgtaccggcatttggtagcccgaatgtcagcccgtcagcctctggagctagactaggtgaaaaccaggctctgcttcccagccactccggggcatcttacttaactctgcctcactttgcttattaacttgaaaatgggggtaaataacagtgcctcaacagagtagagcagaaggattatgaacaaaggctgcggagtgtgatgcttggattcacatctgggctctgccacttggcagccttgggatcctggaagagtttctgaatcactctgactccaccccagtgtcttcatcagtaatgctgggaacagtgagagcactgcctcttagggtcattgtgagggtaaagtgaaaaaacagcacagctaaggtattttcaggtccccggtctctccacgcttccaaaaggacacgtcccttacctccttgtgtcctcagcagtgatgagtggttagacagggcagcctcaaagatctatcacagcttggtgattctgagatgcaaggaggtgttgtttaatggcagaaaacacagaattgctcctgtgtaggatttggaaagaaccctcggaggctcatctcatggttacctttcttgggagtccattctggggtgagacactgaccttgggaccaaggttgagcagccaagggcaggcacccagcattagactttgcagaatgcattctaccttcattatcccttttacccttattgaatttcccatacagccctgaaaggtggggtctaggaaaatccttactctaccaaggagtaagcagagcgcccgcagcttccatgaatgtcgtgctcagggtcacacagctgggaggggcaagctcagcgggatcccaggcctcctgaccggggtgggggtctctatggttttctgtcattagggtcctggatcttcaacagttatccgctcttggttctcttgtggggaataattattggataatgtaggtgaacccctgattctttttgagaagtttcttccagcagattggctttggagaaaggacgtcttcacacatcagtccttccatttggggacagctgggaggcagtatgacaaacaggggatcttagtgcttttgtgcagttactgtctattgaggcttcccaagaagtttactctgggccagtaggagatgagatttgtgttcagtgatgccagatgcatgagatgctttggaagaagatgcggataaaaggtaatagggttccaaggagaaatcaaggaaggcttcttgaaagagacaccatttgaattggaccttgagaaacagactgtgaggggtagaaatagagagaaagtgaataacatgggcagaggcatggggatgagaaggccgagagcaaacaagaaatcgttggttctcgctgagccactgtgttcatgacgtggtgtggaaggaggtaagatggatgagggaggttgggcccaggttgcaaagacctcagttgtcgggctggaggtttggctttatttttaatttttaaatttttttagagatggaatctcgctctgttgcccacgctggagtacagtggcacaatcatagctcactgtagcctcagactcctgggctcaagtgatcctcccacattagtccctcgagtagctaggatcacagacgcagaccaccacacctggttaattttgtattttttgtagggatggtgtttcaccatgttgcccaggctggtctcgaactcttggactcaggcaaaccttctgccttagcctcttgagtaggtaggactacaggtgcacaccactatgccttattaatttttttttcatttttgtataggcaggatctggctgtgttgcccaaggtggtctcaaaatcctagccttaagtaatccaccagcctcagccttctcaatacctgggactgcaggcatgcaccactctacctggtttgattttttttcttagtgggcagtgagggatgttgaaggctttgcacaagggagtggcatatttagagtcacgcaccaggaaaatgagcgtgcagggcgagggctgacattgaaggtgaccctggaagttggggccctgctggacatgggtcaggctgtggcgtccagctgtgtgagatggaaaaccattctgttgtcatgactccaacgtgtctttacttctcttataggaaaatagtggccgagtatgagaagaccatcgctcagatgataggtaggtgtcctgacctgcgggggctcaggccggccccgatgtttctgaactatgaggaggccttggaagataggaggctcagagtgggtttctggtagagcgtgaagcctttcagggaaggaccagagcattccagaaaatatggctttgccccaggacagagtctggggcttcttggtaacacccccctgaactgtgccatagcattattcacacccatggaaagccatggcagtcacctgccagccaccatctgactcagccaaggactctctactttgtggggaaagagattccttttgggtgggatatttgggggattttttcttttcgcttgtgggagataataggaatcaaatccctagaccctaacttagtttagactcaaatgacacctcagcctttccacaaggacccagggacaaggacagtggaccacggcgtgattgtccgcctccttcctcccgtgaccatggcaggccctgttcactgaccccagcactgtttctcactgagattggacgctgcctcggaatccttcttaacacggcgtccctggcagccagtactgagaaatttgctttggctcacaataaaagaaggcctcaagttataagctacacatccctgggcctttttttcttttcttttctttttttttaaataatgagaaaagatcttgcagaagttctaagcccaagtttttatgctaatggtcactattcagaaatcatattataactgggtctgtgggatttttttaaaattaattaattatttgcttaggtttatgataatccattttttgtttgttttgggatggggtcttgctacgttgcccaggctggtctcaaacttctggggtttagcgatcctcctgccttggttgcccaatgtcctgggattacaaggcgtgagctaccatgcccagcccatgataaccagttttgttgttgttgtttgagaccgtctcgttctgtcacccaggctggagtgcagtggcacgatcttggctcactgcaacctccaccccccaggttcgagcaattctcctgcctcagcctctcaagtagctgggattataggcatctgccatcatgcctggctaatttttgtatttttagtagagacggggtttcactatgttggccaggctgatgttgaactcctgactttaagtgatccacctgcctcggcctcccaaggtgctgggattgcaggcgtgagccgctgcacctggcccgataaccagttttttttcttctaaggatatatggagtaaaaactccaggtcactgcagaccacgctttatgtgtccaagtttgacactgtgctggcacctggtccccacccccaagcatatggatgtatgagtcacatcacacctctagcttgtcccaaggtaaatataatagtagcctcaggaagagtgaagaggccaacaattgagtgctttccattcaaaggagcttcaattttgatttattgtaacaaagttcatttcacccagaaaagaagccctttcatgtttagcctcatggtgcatgcttcctatcaaagtgaaacttctttattaaattggtataagaatttatgaacacatatggataagataaaaaaaaaaactcttggagttgaaaatgctggcaaaaatggtcaggctaagggattgatgtcttccttatgtggtgtttggcaagtagaacacaactttttggcctcctggagtcttgggatttgagaacatcactcaggccctccatagttcatctggaaacatcctgctccatctcagagccatacactttcatttttgcccttggtgatgacattttggtaaatgttgaaatgcgggggaaagggtgtgagcttttgctcctgagagaaagctacccaagccatcttttattgctcagctggcgaagttgatataaacagacattccctcttgaaaattaaaagtggagaatttctctagttggcataaatgtcctgtccttgtcatgacagaaagattactcccacggtttcctcaaagaatatctgcaggtgacagcagtgaggaccttttcaatcctaggcagtgtgagttccctccaagccctggagagaatgccacctgccttcctctcatcctggtgccaggggttagggccacacatcaccccccatccccacccctgctccctgatgtgtttggcctgaggggccctctcttcaagagctgtacacacaatcccttagaacattttcctgtccttggggtactctctgggtggcccctgagactcctccagtgtccctggctgggagcagcactgccacacagaggggcatctcactgtgtgtccgttccccgatccccatcctcattcacccattgaccgtcctctgtcattccaaggcttttttcatcaggtgacaggcctgtggttgtcattccttcagccactgttgcaggtcattgactaaggtcaccgtagatttcaaggtccttgtgtccttgtggaagacagcagggggctgaggcatggctgggactcactgtggctcttggcaggacgtgccttctttctggcacggttcaggtcagggtctctccatgcttggtaacatgcccaggaggcccacctgggttccatgcttttctttccattttcactcacgtaaccagcatcccttgtgaaagaggaaactcaggcccagagagattggcagttcaggaccaccgtgactgtagtcgtattttgaagtcaaaccagctccagcccacatgtctagctcttcctggctctgctccattcagctttcacagatgctccacaccagtgtgacatcagtcctgccgttgttattcatttgcatcaaatgttactggagagatatgttttgttaagctcacatagtgactatttagaattcagaagagagagagacttctgtgctttctgcattccaggttgttgcaattgatttttttctgcttttctaacaactgccctgattatctgttttgcttccattttctgttgcttcttgccctttgcttgcaaaacaaacaggcaagcctggtaagtaaacgcttttccccctaatttgacacctgcccattgcaaccctttgtttgtttgtttttctatttttgttatttttgctttgtgtattgctgcattccccccacatgatttcatgatgttttgcctgaaaaagccagaaaagtcttcaggagcattgttttgttgttgagtgtagggtgtctttctcctgatttgaagaacctaactgcgtttgtcatgtacaaaaggatttgtgaagcattcttgcctcccccgtctcctgggaacggggtaattctatttttaaaaagggttaggttgagaggaaaggaaacctgaggcaggtgaagtcttggatccaggaaatcagatggacttggtttggtaaacagctcctttaccaagtcaggtgaaacatacacatgggctcagatcagcccagaatatacaccatacagcgtgctgggaactaagaaagcagccagaattccaagaataaaaacaagcatttgattattagagacatgttgaaaggccctttcttttaggagtgtgggtgtggcaagcaggttgttggcgattctatgttaaaaagctccctcttcgcaagccactgtgacactgttgctctgattccaggggtcacagagtttattatggacaatgaggctcttaataatgggttaccaatacgggactcttcctccttcttgggggctttatatacattttctcatttaatctcctgcaaatgccaggagatacaaatactctttcttcctattttagacaaggaggctgagactcagagagtttaaaaccctgctcaaggtcactcgtatggaaagtgtcagagtgagagctcgaactcaggcagttcagaggctcctagccactggcctgggcagctctgggctccagaggctcctagccactggcttgggcagctctgggctgctggtggtgagcgctctaggagtcccacgatcgcagaggcaggtgggaaggatattcggcatcttcagggccagtggttctccaagcagggtccctgccccagcagcatctgcgtcactggggaacttgtgacctgtgcacgttctctgccccaccccagacctcctaatctcacgccgtggggtggggtgtagcagcctgcgtgtgaacaagcccttcagctgaataaatccacactcacgtgggagagtttttggaaatgaggtgctgggaccctaagaggtcagaactttagagcaagcttatgtcgggaccggagctgaaaccgaggaaatgaccccaccacaccacacggtaacagtgtgcctagtcctggggtatggcaaggtgcagatatgtccggaacctaagggaaagaaactcatacaacaaaatctccctgctactaagggagctgcatcctccaaggtctgtcattacatggggcccgtgtagagacgtggttatgatcacggcttcaggcttggctttgggctctgccattttctcagtgaacagtgacttagcttctcaaaccctctgttccgccttctgtaaaatgagggtgagaaaagctgcccgggtggttgtgatgctctaagttgttcactcgtcgcatggacatgtatcaagacatcctgtatgcccggcactatcctaggccctggggcagagcaagtggacaaaacagactctggtgcctgccctcacagagcgtgcattcatcagggagatgagccgctgatacaccagcataggcacgcacgcacacacgtgcacacatgtgtgcacacatctgatacaatgataaggggtggctgctgctgcaaagaggaaaatgaaggactctagaggaagaggagccatttccagtacctctggggaggtgacatgggatcagagccctgagagaatgttggagagccctggaagccctggggcgggaccccctggggcattggaggccttcgtggctggagcagagaggcctgggagggtagagggcagagcatgtgggcaaggatttgggtgttatttccatttcagagggaggtcactgcgggggagctctgagcaggagtgaggtggcctggtttgcacattaggaagctcagtctggctgctgagtgctggcttagggacagtcaacacctagagcaatcagcagggtgcccgccacatggaagggtccagtcagcgctggctcccgttgttctgttatttccagatgtgatctgtctatggcagccagccctcggagtcattccaggtggcaggcagccccctccccagtgacgagggcctggtagaaagacaggtctgctgagctccttccccaggagctctgagtgggcgcttctcccttccccactctgctgtcaccaagagagcaaatggttcctcacccacctgggccggggatggatccgcacagaggacagaggggtgttttgtgtagagtagtcagagaaggcctttcccataagtgtagaaatgattttctaagcagccataaaaaaagaacaaagtcatgtcctaggtaccagcatggatgcagctggaggccattgtcctcagggaattaatgcagaaacagagcgccaaacactgagcattctcatttataagagggagctacacattgggtacacacggacacaaagatgggaacagaagacgctggggagttcacagtgggggtagaagggagacgggttgaaaacctgcctttcaggtactatgctcagtacctgggtgacaggctcattagaaatctgtaccccagcattagtcacacagtatggccatgtaaccaacctgcacatgtgccccaaatctaaaaatatacattttctagatatttggggcagattattagcttgggatggccaagggccggagaggtggggcagaggacaatggttcctctcaccaggatcagccactcggaactgagccaacactgaattaatattgtacatcactgagaagctaaccttgacggaaatagctccgtgtttcttggagttacaacacttgctgtatcgaagacgctatctgtgcctgcgtgaatggaatttcagaggagatgcttttttgggctctgggtttccagatgtgttaaggatctccaaagacctcctctctgtcctgatacataggagggcccatccctcacagcccagacctcacaccctttaatcgtcccaacgcaaaattcactagcgatgtcttcttttttactttacggatctgtctgcttgctgtcaacaaccacatagaatcaccagggacaccaatatagacctgtgaaggggccgtactgatcaggttaaggaatagtaatggctcatttctacctcacgcgaggctgcacaggcccgggtctgggaagccagggctctggtttttgttctgttagagacagtctgggagggctctggggcgtgggttcgtcccaaggaaaagctggggtttgagatgcccccactggtgaggctgagttgcatctgaggcctcggctggccccagagacccagtttggactttctgggctccatcatttggctcctggtctctcctgccagaggacgaacagagagagaagtcagtctcccaccagacggtgcagcagctggttctggagaaggagcaagccctggccgacctgaactccgtggagaagtctctggccgacctcttcagaagatatgagaagatgaaggaggtcctagaaggcttccgcaaggtagggctgagtttgggggccacggaggaggaggatctgattgggagagattgtgggagcactgggagggggtaggattccagaagttggtcttgagccacctgcgaggagggggtccatgcaggctggggaggcagacttggccgcctggggttacacctgcatccgagagttcctggggttcccaccagtgctgggcatttgttctcgtgggcttgacgcctgtcctctgccctgctgtgtcagaatgaagaggtgttgaagagatgtgcgcaggagtacctgtcccgggtgaagaaggaggagcagaggtaccaggccctgaaggtgcacgcggaggagaaactggacaggtaacatttagccactgggggtggctcccaggggcctcccagcagcccttttacccaggcaggctgggacctctggcagcgcctgtgacattggcttggaaagggggcatcatccaagtgtgtgtttcaataagactcgagagaaggcacacagttagcatcatttaatcagtggaggatgcgtgttgcaatgtccagggtgccccggcaccttggtctcatggcaatggaattgggtttggtgttctcatgggctcctgtgctccagctccagttggtggcagctggggccagaccaggccactctccctgcctggacctgggaagcaggaggtgtctctagtgatccacaaaagagtgataattctgagctccctgtctccgcagggccaatgctgagattgctcaggttcgaggcaaggcccagcaggagcaagccgcccaccaggccagcctgcggaaggagcagctgcgagtggacgccctggaaaggacgctggagcagaaggtaataggggaggggtgtggcctccaggtgggccgggctgctgctctctgtgctgctggccagtccagctagacaggctgggcttccctggccactgctgctcctgaagacgaattcatgcttcatgagcatacccttggttccttctagaagttccaatttcatgccagccctaagaccagcttcctttccaccgttcctggaactgcagcctgcatgtgtgtttactgccattttcattccttttcaacattcgtttatttgttggatatttattaagtgcctacaatgtgttaggcgtagcccttgaacctctgcatccggcatgcttactgggtgagtggatggggtgcccaccaggccctggcagtggtggccagctgatgcagaacatgagcagtgtcagggctggaagggcgcccaggtggcctctaattccagggacaggggtgatcttcccgaggacactgagcttgtgcgcaggtttcctccttttggatctggcacccctccatccactgtgagcactgtctccctgggtgtccagataagaagctccctcagcccaggagggccctctgagcgttgggctgttgagactgcgtgtgtgtgagtgagggccagcctccctccttggatgtgtttctcaaggagaggatttccagatgtgcagcctccttccagtcaatttcctgagccttggggttcccctgcgtagtcatccacgagcccagcagcctgggttggcagcacaatttttgcattttgggccttgataggcagtgatggggcatcctttgttggcatcagaaatccatgtgcctcccgagtggcctctactaccgcaggagcacccagccagccccaggggattggctgtcctcctttgcccactgtggttggtggtggtctctaggggcatttgggccaagcagtggtgatctctgccctgggcaggtgccagtcctcactccacctaagtaatgttggggaaggagccctggggagcaagaaatggggctcctgtccccactgcaccatctgtcatggccctgggcaagcctcgcaccccacctcagtgtctaggttccatctagccctgaaaattagaagcctgtatcgttgggcagatggatttccctgaggtccatatctgatactcacccagtctccactaggccctgtgccctattggatgttcctggttatccagaatttattcatattacagatcattattttcattcttttttttttttttttttttttttttgaggcagggtcttattctgttgcccaggctggagtgcagtggtgcagtcatggctcactgcagcctcaaccacctgggctcaagtgatcctcctgcctcagcctcctgagtagctgagaccacaggcatgtgccccctaccaggctaatttttttaatttttgttttcgtagagatggggtctcactttgttgcccaggctggtcttaaacttctgggctcaagcagtcctcctgtctcagcctcccaaagtgctgggattataggtgtgacattaatttaattttttacctttcttcttaggatgaaaaagacagatggctactagacagttttaatatcaaaattgcattagaaaatagtttggaatatgcatatgttcaactacctgttttgtaggctctgatgattgttcttagcagtatcctcagaacgacatatgcggtcacaactgtcaagtgcaagtttttgctcactcacccagtatttattgagcatcattatggttttagtgttgagtgtgcattttctattccttgtctcttgataatctatgtatggcatatttggtgacttgaaaaatggaatgtttcattaaaataaagatcatactagaagccaggcatgttggcatgcgactgtggtcccagctattcgggaggctaaggtgggaggactgctggagcccagaagttcgaggctgtagtgcactgtgattgtgcctgtaagtagccagctgcattgcagcctgggcaacacagcaagaccccgtctctaaaataaagaaataaaaaccatacttcacagtcattttggctattgtagcagttgaacatacaatgtttcttggtgagaaatgtagcaatgtgtgtgtttgagatggttcccccatttccatcagggtttgatggtgtttaaattgcattatcttaaactgaacttccagaggaatgaacaaatcacacaggttcttccctgaaagacctgagtgatatctaggggatagtcccatcttaaagagattcagaaacatgattcacccagacaattcttgaatggaggcgctgggcatttcgcccaatcagcgctctgtaaaggcttttgctccatgagctgagctttatgatgaggcagtttgcttagtggtggctgatgacgccaagagagagcttggaaaacctccgggaatcactttctaacgggtctgctgatgcctcttagccatcagtcactgtacataacgttgtttaacagttataatggcaaagccatataggagctggggcaacctgaatttgtgttccaggcttgccacatctgactggctgtgtgaccttatacacaacccttaacttctctgagcctccatttcctcactgaaaaatgaggataatactggcttccttgaaggcactattgagggaaccaggggaggccagagtgcctgggatgtcttcagcatggtgagcagctcacggtgggcactccaataagatggaagatcaccgttagcagccccagcaggggccatagtggcaatgagagttttttttttctttcttttttttttttgagatgaagtctgtctctgttgcccaggctggagtgcagtggcgcaatctcggctcattgcaacctccgcctcccaggttcaagcgattctcctgcctcagcttccctagtagctgggattacaggtgtgtgccaccacgcccagctaatttttttgtatttttagtagtgacagggtttcaccgtgttggccaggctggtcttgaactcctgacctctggtgatccacccgcctcggcctcccaaagtgctgggattgcaggcgtgagccaccacgcccggccaataatagtaattttaagattagtggtcagtgctgtatcccattcagagccccatcgtccagctggcatttcagtgcctctctcgagttgttgacctcagatgcaaatttgagccaggaggtgggccagggttctgtttgaggcaggcttctcccacagtggggactgctgctgggaaggactggaacttcccctccactgaggagagccacttcctcccagcactgacacaatgatgaatgacaccaggagttctaacctagaaacagagggcacgtggctctgggctggaacatgtctcaggagttctgaggttttcagggaagggctctgcacagcctcagggacaggcttttggtgaagactgatcttccatgggaatctcaaggaaaagctggctgcaaaacatccccagtatgctggagggatccagcccccttggagaaggccattggagatcggtcgtgctgttgaacttgatcagcatcagagccagcatgtaacctatctgaaagcaaagccacacgtccatgatggagggatcgtcccgttggatcccctcactttctgagaagatggacagtgtaggatcatctgtgctagacaaacctgtggttggttccccttgattagacaggcaaggtgtggtgggagaatcaccttaaagccagctcgcatctgccccccaccccccatgaccctgtagccacagcatcacctatttggcatccctctgagcaatgccagtgatcccattcacgtagaactgcgtaaccctccttatgctacatctcaaaaaagccaccgaggggtttaccccagacgctcctcacctcagatcacatccttcccgggcaaataaagggaaaggaaccagactagttagtccttcactctgtgctggtcactgccaggaaactacatttatcacctcatttacttctcagaaagaaacatgttatcacctatgttctagagataaggacaccaaggctcagagaggttgtgtaacttgtggaagatcacacagctacagctgggatatatactcagattgtttggctccaagtcatttgtctcactgctttagtggggaccaaggggcctggtggtcccccatctccccaaaaagccccatgagcattctgactggccagatttcaaacatcagcaacttcttccttgtcttcacttgcagaataaagaaatagaagaactcaccaagatttgtgacgaactgattgccaaaatggggaaaagctaactctgaaccgaatgttttggacttaactgttgcgtgcaatatgaccgtcggcacactgctgttcctccagttccatggacaggttctgttttcactttttcgtatgcactactgtatttcctttctaaataaaattgatttgattgtatgcagtactaaggagactatcagaatttcttgctattggtttgcattttcctagtataattcatagcaagttgacctcagagttcctgtatcagggagattgtctgattctctaataaaagacacattgctgaccttggccttgccctttgtacacaagttcccagggtgagcagcttttggatttaatatgaacatgtacagcgtgcatagggactcttgccttaaggagtgtaaacttgatctgcatttgctgatttgtttttaaaaaaacaagaaatgcatgtttcaaataaaattctctattgtaaataaaattttttctttggatcttggcaataagtgtgcctcgaatttattttctgggaagggttgagtcttttctcacctttgtcaaataccagatttggcttcgtgctcttctctgtctgggctcatttctttgtccatagacttaaataatatttcctttgttatcgtggctgcatttgtaggatgaagctaatgagaaatactgactttctacttaaataattaagtggaaattaattaatctcagcactggattagctgagatttggtttttacaaagcctcatgactttaggaagcaaatctatttcattttattgagtcaaggaagtaacagactgccactctttctgttcaatcctttagtgtttgaaggtcaacctgaaacccccattcccctctaaagaaagcactgggaaagggtgcacaattgccagtggccggcaggtaattagggcactttggagattaaactagcagtgtgcctggcctgagatcgcttcattgctgccgacttgctcagggttcccaggttgaagggtgggtggatgaggggagtcgggggtggaaaggtgtgatcatttcctagggctgccattaacaaatcactgcagacatctgcagcttcaaacagcaaaatttattctcagttctggaaggccgaatccaaaatcaaagtatcagtggggttagttcccccaagaggctctgtgggagtctgtcccatgcctcttccagcaactggtagctgctggctctccttggcgtcccttggcgtgtagcctcagcaccccagtctctgcctctgtcttcacgtgaccttctcactgcgtttgagatttccctcctttcttataagaacaccagcattggatttaggccctcccccatcaaggatgatcttagctcgagatcctcagttacatctgcaaagaccctgtttccaaataaggtcgcattcacaggtaggaaggattaggatgtagtcatatctttttgggtacatgtgtgtcaatgggatgtgtggtatgggctgtaaacttggaaggcagatgagagcccctgatggcccagagcttgactgtccctctttctgcctcggcacggtggctacgggcaactcctctcacagtaggacaacccccacccataacaggacaggccttaggcagcctcagcttttcggggacagggtggggtgttttctgtgatttataaggtggatgaatttcggctgtgccagacagctccaaggagagaggactgcacatgtgctgttggcctggcagcctgctccgggttggggggcgggggggcaggatgcgcggcgtcttttatgctctgagatcctttgttttctttctgctacactttcgaaatccatccagcagagcctgcctctggtgccactgagaccctcacctgccaggcaacctaagccagggtagggaactgcctccttcccactgccagcatcctttgcttggtccagcctcctggtcacagcatgttccagggcccagccatg

SEQ ID NO: 598 - DNA, 554896 bp, Homo sapiens
  source 1..554896: mol_type = genomic DNA
ggaaggaaggaaggaaggaaggaaggaaggaaggaaggaaggaaggaaggaagggagggaagaagggagggagggaggaaggggggagagtggggtaggggagggagcaaagggaggggatgggaggggaggggggagggagggaggggtggagggaggggaattaaggtaggaaggaaaaaagaaagacccttactttgatagaaataataacattctaccatgagttctctatgtgggtagcagggacagaagatactcagtatatgtctctccaaacttttcactttctccaagcagagtgtccagtgtcatcctaattctccccattaaattagtgggtcaaagtgagaaagggctggataaggaacaaatacaatttgatttctttgtttctttgcatcgccctttcatatggatacattatctatgaattgagaaaatgatcaaaacttggaaaagatcaagtctcatttaatcactcaattaattactatgctattagtgattattatcgaaagtcacagtcgaattgtatagcattggttgtaaatggtgcaagtattgttatgggaaataaagaataaaatcaaaatttctttttattttaatcagatgcagattctcagatctcttcctacccgttaaaaacaacagcatatttgaaatcacatatagtacactctgatgttaaaactggaagtttctattgtgttaaggcaacaagagtgtataaaaaataaagtaaaataaaactataggatattattccaaaaatagaggactttaaaagaattatcacaaatcagtcactcattggcccatagtctcacactgtaatctcatccatgttccagcatattacaatggatggacaccaattgtaaaaggattacacacacacacacacacacacacacacagagttcatgtgaaaactagtgagatctgaattaggtctctattgagttaatagcattataccaatgtcgatttcctggttttgacaatgttatatggttttgtaaaatgttatcactgggtaacatgggtaaagttttcaaagaaaccctctgtgctattttttgtagcttcctgtgagtcttaatctttaaaaataaaaagttttaaaaaaactttaaaagttaaattatagtcatatttgtgattttaatattttcatacatattttgaaagataaagagatcattatctttaacaattttcataaaatgaattttacatattgctagcaaattatgccagtggtactcatagtcaagatgggcaagtagcgtaagtgttaagtatatctatttcaattgtatcctagcaaagaagcattcatatattggaaccttgtgtaaatggcaagatttgccatggatctttattttaaaaaaaaagattgaagaatttatgtcatcttccccaggaattcagaggtttccctggataataactgaaatgcttttaaaataaaacacagaaaacagatctatatatgtaatttatgaaagagagtccattttatatcccaattttattcaccttttctgaatagtcacaacattaatctactggggataatctagttagtatatttgaaattccatgttttttttctattatatgcatgtattacacttgtatataatacagagtttccagtgttgatttaaagaacatagtttaaaaaatgagaagcatgatgtataatttcaaatctcaaacaaacctaggacaaattcataatttccaaaaagtatagtttttcacttggttacaaagaaattaatgatattctaattgatgcagaaaccccagggcaactttttttttataatttcatatagtcttgagccattgtgaaaatccactcaaagccatctaattcattttatgcatgattaaaatggaggcagaaagccatttcattccatgaacttatgagacagtggattttagttcaatgtgagatacatacttttcagattttatttttaaccaattttacatttttagttgctcttcccaggaaagtgtctgagtagtgttttggcctttgaatattgtcacaaactaatagaccaaagctccccaggatatatgggcctctatcctggaaaccaacgtatgtctaactgaccacgtcagtgagtttttagaatacaaagtatttccataccttcttccataccaccttccatgatggaaattctaacaggacaatttttgaagcatcttctgaacagcctaaaatgagtaaaacacagaaatccttctccttgcattccttcaaactataggtttacacaatattgttacagaatggctatgcacttttctttcttctctcccttcatatcacaaatgaaacaaaataaatgtagtacaaaattatacattctataacttagaaaaaaaaagtacatacatgtttaaggcctttaaatatttatgactttcctgtagaaccaaaaccataaacgttaaaatcgctacaaaaatgtcacaaaatattggcctaacaaattgtttgaataggaaaactgtaagcaaatatttataaatttgagactgaggaaaatgaacaattttttctatcaacagattgaacaaatatataagcattcaaacagtcattgggatcaagcaaaagaaagtcttttaaaatgagataggacagttttttaaaaaatactggaagaaatctaagtgaataatgttcaagctaagaaatcagaaactcacatgcatccctgtcaatttttttgaaactgaaggctacccattaacttgactgctcactgctgatttctgtgaagggaataagtaaacataaaaaattaaagaaaagctcacttaaaaaaaaacagaaagggagagtgctctagaggtacaaagtattatataatgaaaatggcaatccagttctaactactacctatttgacaaagagcttcagcagggtgttgttagccttagggaaatatgtcagcttgtctatacattcttatatgattgatttattcagataactattacttgccaacattattaccaatggatatatatttccattcctttaacaaaagcaactttaagatgttaaaacatgtaggctttctgagctccaagattaggatataaataaaattgtctcagtctacaccatgccagaggaaaagttctcaaaggaaatgtcattaaagccatgtgtagtcccactagcaaatgaacataggacccaggaacacatccaggacagaaggacagtgcacttgggatacagcttgcagaaacaagaaaagtagtcacatctggagccaataactcaaaaggtgactgtctctaacatcaccctgaaaaaaacaactcttcaccagctcctcagacagtgacttcaaattcttttaacaatttacaagttgaacacagttcaaatctgctgaaatcttcatgacatgcaagttcatgtctgacttttaaaaagtcttgatttcaagaagaggccatgaaatcccttggaaatagactattgagcgcctctttcaagtggtataaaaatcttcaagatcacctcaggagttgagttaagtttctatgcgcatgttcaatgtcatcagccttgaggatcacttgatttctcctgggttaatgggttacctacaaaggaaggagaaaatatagtcaacatttcataacataccgataatcttaaaactaaacacaattaaaaattaatagataactcaaaatgctggtgtttgctatatcaaatgcattacttaattttaaaggactaacagatgcaggtatttccatcatataaaaatatactttttttctcattatcatctcacaatatttttaaagccatttgcacaattatccaagtgaatataactgtgactagaattatcccaactggtgacaacaatatccctctcacacccagagagtgattctggaatccttgtttttttgcacaggcttggtagccataacccaaatatcacaaacacatcatactaggcctcagtgaagaaagacctttgtccccagcaacacagtcacatcatattctcaaaaagcccttggggattggttccataaagttcatttttgaaatagtttaaaaattgagggtttatttgagtcaattatatttgaaaaattatatttgaaaaattatatttgaaaaaaatctgtttatgggggacaaaaatatctgaggaaagaaacaataaggaatagaaaaatgttgtaccaaatgttaaaggtgccccaaaattttcataaaattgattggaatatactattaatgctattttaagtatcactaaaaacattcatactaacttcacacctactaaagtccaaagaccatttgtgtacaggaaaaaagaataataaacagatagaatacctgatacatatatacatacatatctacgtatgcatagatacagaggaaaacacacagggagagggagaagaagagagagggagaaggaggggagaggaaaagagattttgagagagagagaggatagagggagaaagaggggagaggagaagagattaccaacacagcagaaatatctcgatttctgctgtgttaataaatttctaattctattctaatatcaggcagggtatttagagagttacctaacagttcttttctaggaatggctaaaacaaaaagtgattttaaaaaattattgtcaaaattttgattttattctattaagtgacattgttacttgtcctttgaaaaacattacaaaagtctgtttggtttcattgttttctgatcaattatgtaaaaaatgaatatattaaacaaaataataagctagttctagactttgctatggctagtctcaaattatactaccaaagggagatggtacaaaaggcaaaaaagtgttttcatgcatggagacagtcatctcatttctgtctcagtggtctgctagcactcccaaggaaggagttctttgcctgcatatttgaagtgttttactcccatgcacagaaccatggaagaagttgtgccaaggatggagggttggaaacacatgaagagcctactgaatctttgagattctgggagcaggagatatcttaggcatagcattgatctcattatcaattatcaactatcaatctgcctgccattcaggagtcatcatatacaatttctgtgaagggctcccaaattgagtatgaatgtggaccatattttcaaaactaatgctgaaaagacaagaaaagagaggggaagctatatgtgtgtgtgtaaaagatggagagaggaaattgagagagaaagagagagagaggaaattgagagagaataaatggtttagcctctgctgttgctcagtgtagccaaatggagaaacatggcggaaatgaactgcataaatgtggtgccatgactctatgatagcaagtgacacgtcctcttgatccacttcaagctcaggttctaagtaatctattagtgagtataatagatgcattcctatatcttcatttcaagctaaatatttgactctactagtttatataaagttgagaaatgatcctctcagctatttacatattaaaactttgctctcatataattttgaaaatagacatctaaattaaaagtataatacaaaaggcttataaaactaaaacaatttttttctccatttctgtagagaaaaaacatagatatatacacacacataaacatacaaacacatataaataaggatataacccatatcctcaaaaacatcataaacatccattttcatgatgatatctttctatcagctaacataattgctagagaaacaaaacttaaacatgactaaaagaagtaattgtctaaacacacatggattacagcataattaaagcaacctattctcacacctaagttttacacaatattcctggattactaattttaaaaatatcctagcatatgagatgaagaatatggtataaatcatttctaatattagatgaaagtatacaatctaatacttgattttttttttttgattatttgattttgaccaagaggacacatggtgattcggcatcaagagctctgtatttaggccagaatggcagtattgccatgaagatcaagtattataatgttatttaacacctagctttgtcaaccctgaccaactataaaaataaaaggtctggattttaggagggatttttttgcttttgaatgtataaatctttaacaagagagccactaaaagtagaatgaaagaatcacactattaaatttagcctaaagcttcctccttacatattttaagttcagcctaaaggtttctctgtacatcataaactgtaacctaaatggaggtgtaaacacaatgtagcccactcttacaccaatcaccgagttttggccaatcaaaggtggccaactgttcaaactgtgttcaaatgaggcagatgctgagctgtaaccaatctggctgtttctatacctcacttccgttttctctatgtcactttcctttttccgtctataaatcttccacaacgtgtctgtgctggagtctctgagcctactcttgcttgggagactgcatgattcacaaattgttctttgctcaatttaattcggctaaagtttttctttgaacaatactaacagacattcatgaaagtttagagaactgcattgaaggaattaaagcctaactaatgactcatccttttcaacacaaaataaggatgaacatgtataaatatctaccagcaccctccctgacaacctcagggtttgcactaaacaagatgggaaaaccaaaggtttaaaaatgtataggaaaatgattctaaatataggtacattatcaccagttgaaaaagtttactatgcaaggtccaaatactatttgcaaatgaaattattacctaaaattaaacaaaaatatcaaccttttatgatttgtatgcttattttaaataaatatgagtgacccaagtttaaattctggcatgctgggggggaaacatattttaaatgtcattttaccttttgtagaccctaaactggaacaccctgatatgcaagatttgcttaagcaatatttatacaatccaacattttaaaaagtataaggaatcgttaatatatcaaattaagcattgccatatttttacaacttaaataatactctttcattcaaactgtattttttggaagaggccaagtactaagttataccttctaaggaagatttttggcaagttttcagtaactaaaagcaggaggttgcaataaaatcagttttacaggatgggagatagcatttgctaccatgaatgcacactatcttcttgttctgagggcaatagatataaaatactgcatgagggagagaaatggccctatgattgttatggttatgccttgagcttcatgcgctataatcactatctcagtaaatttgcctttccaaaggcaatattttacatagctgttcttttttacgcaaatcttatttgtgtgtgctgcacaccagccagtttggtaagtgaaactactgggctgctgaacacatataaaatgcagaaataataatagcttttctgtcacaagcaggacgctaccctggtagcaatcaaccaggatgaagatgctaatctggtaacattaagcaaaaagtagtaattatttaagatcaaggcacccacttatcacaggccaacaaaacaattatagggccctgattagatttctaaacaactcatgctaaaatcatgtctttaagtctgttcaacaatttaaattgagaaaataaaacctggttaatgacatatatggtattagttaaatttgaaattaggtgaactcaattatttatacagtttccattttattgtttgagtattgtgaaatttcctctgccaatcttcaagttaaattacaaagttggaaggaaattcaataatctattctgtccttttataaaattcttaaatcttaaaattcttacaatcattatattgaagcctaaaattccttgttccccctgttcaagtcctgctgactaggttatccgcaggaggtaacatattatggtgagaggcataacgacaaatagctcaggctttgttcggcagactgcccaggttcagatccttgccttatcactttctaacactatggggttgaataaattatttaaactagctgacccttggcctccctgtgtgtaatacgctattgtgattaaatcagataatccagacaaagtgcttgtcccattaaatggcttttaaatattagtaggtggtagaagtagaaattctcaaacaagatacaaaaggtgatacataggatacctattggagggcggtattacttcttatttctctaaaaatattgacttaattttctgttgcttatagtgattcatcttgcaattatttcttttcataatcttgttatgttaataataaaagtcacatattaaaaatgaagcactggccaggtgtggtggttcaggcctgtaatcccaatgctttaattaatctatttatttttattttattttattttttttgagatggagtctcgttctgtcacccaggctggagtgcagtagtgctatctcggctcactgcaagctctgcctcctgggttcatgccattctcctgcctcagcctcccgagtagctgggaccacaggcacccaccaccacgcccagctaatttttttgtattttttttagtagaaatggagtttcaccatgttagccaggatggtctcaatctctcgacctcgttatccgcccacctcggcttcccaaagtgctaggtttacaggcatgagccaccgcgcccagccaatcccagtgctttaaggggctgaagcaggaggattgcctgaggccaggagtttgagaccagcccgggcaacatggcaagacccctcaagactctacaaaaaaaaaaaaaattaaaaattagccagtcgtgatggtgcacacctctagtcccagctactcaggaggctacagggaggattgcttgagcccaagaggtcatgtctatagtgagctatgatcttgccaatgcactccagcctggatgacacaatgagactgtctaaaaaaaaaaattgtaaaaataaaaattaagaaaaaaatgaagcacgactttgatgttccatgaaggtaggctgcctgttttcaatgctcagttctgctgatgatttactgggtaaaacagaaatactattagcatctgcatcatagattgtctgagctgagaagtaaatgagttaataggttacatgcttaaaacagtatgaggaacctaatgagtgctaaagaagtattaactattattattcagatatgtgtaaatttttggccatccaatgtattaaattcccaggttttgcctctgattgtttctgcacatatgttactagtcttctctgatacagaattccatttttttctaactctttgtctttctaataaaccagctaccatcagactttgcagaaaggatacatatttaggaagttggcacttcagtttatctacacttaaaaaataaatgggatattattatgccaaaaaaatgcagatttgcaaatttccctattctttattgatggttcctctattatttttctttgagttctaccctatatcccagatttttttaaatttcagttgttccatttgctagtctacaacatatttgtgaaatcactgccaaatctccacagcatcaatgtaaatcttatatgatattagcttaatttaaaaaaaattcttttctccaatatgttcattaaaatcatgttatgaggaactattaaacaatatttatataatagaagtgaaaatgcattatgaacaatagaagtgaaaatgcattatgaacattgcagtcaatttcattttaaaaagttaaattttcactaaaatatccatgttattagatgaacatttatttttggactgatgagcactctttagttaaacaactggaagacaagaaaatgtggtaatacttctaagaggaggcagaaggattaaatgcagtgcatggtcaatccttttaagatggctgcttaataacatcacaaataggcacaatttcaaactaacattacaataaatttaacttattcgataaaggtaaaagggggaatagaataccttcatcattctaagtgctgatttgaatgaactcttcctttctttgaatataattgctacttcactgcaaatgtatttttttaatgtagctcttacacatacatgaaataagctcttgcttcactttttgtgtgctaaatgcgcaattaaaacatcattactctgcagtagcaggttttctcatttaagcttgagaaaagctgccattacattggtcgtaactatatgtgaatgcacttgtcatatcttaaagcacctcatgcaatgaggtattacgaaatgaaagacacctattggtctgggatattcacgcatgagcaagctgaccagacaactttcaggtaaggtaaggcactataagacaatgacatatgaatcacttttataaatatactcatctatgtgaaaattaagcctatattttactttcatgatgatggaggtgactcctagagacctgaaaaccattgtattttcataccacagcttagttttacctccaaagaactgcttttgctagattggcctgaacatttattttaacactttgagatatgtttaatacttcagctaggatcaacatttccactaaaggaccttgaactatactcagttatctattttataaattcttgaaaaatttaacagccttgggtgagtggaaagagtaatttcaaacaacagcatttctgtagctaactgattatatttaggtgtaaatcagtgtgagtctccagacttggcatataatctttctagacttctggaaagaaacagaataccagatatgcctgaatgggacagcctcattctgcaaatcaggagaccagggttttataccagtgtttctacctgctggttctagaactctggataagtcacttaaaaaaatacctgaaacttgagtttttatctaccaagcacattggttggagtcagtgagcttctgactcacttcttgcctccaactactatgacctttcttaagaaacactacttctaaatgggataaaatgtcgttttgatggcctaaattcttcagtggtataaccactttgaagacttcattttctaaaaggcctaatcattatatcagaatgcagaactagtgagctcctaccacatatacaacatctgtcaatggctttcagcttcctatgctgtgcaaatgaagatcttgactggaaatgaatcttttgaacagatggacctgcgctgtttcttggaactttgaaagctgtacagtgtgcctgccatgaactattctatgtgactcatggaagtagatgactgtttgcgttgccatttatgcacattcatccactcagaagcagatcagccgtttctctctggatgacattcaatgctagcaaaacaaagcattttctgatttttaagtagctaataaattcctttgacactttaaaaaacatttgttaagacaagactttgcttccccttctcttggtaccccaacacacacacactgtgtttgtttcaggtgcagaatcacacacacaaaattaagataatggtgaaagtcaacagcatatggaataagtagaaatctcttgaagacattcaaaaaatccttaagtcaggaaaacaattattttaaatgcctcaaggaaatcttagcaggctttttaagatatttattctatatgccagcatagttcatacatttttacagacagttgaaattctgaactcaattcaaaggtactttacctgctaaatttgatattaagttcatttttttagactaggctttcatttgtagaagagtaatttgaattgatagtttttatcccctttctgccagaaagctttactttataagtttcaatctggtcaagaatcaccagtctcactacagaagctttaaaaattgtactttaaaaaatgagtttaagatagttggagttaggggtgaagaagatatgaaacttggaagaaattccttttcgcagcctagagagcattttctattaacttctttgttggtttgtgttacaaacacaaatggctcttagggacaacctttccttgagatactgaaaccacctttgcaaaaactgtatcaggaagaaaattatggcagttgggggggatctaatctagccaaaccctatcttgcctttggcattcaacctgatcttaattatttctgggtttaagccaagctaactttggaagacattcagtttatagtttaagtaatagtagcctttccccaaaactcaaccgcctttgtaaagctaaggaaagatcaccagggtaggaggatagaggagcctgaattctgctaaggcatagacataaacaattgccagccattgttctagatgtcacaatggatgcaaattctccaattactcctacagataacatcactgttgtagaacctaatatgggtcttttgagatatcttttcagggtttttgcatgcctgacaccaatggctccacctggtcccaagcaattcagcccacaggaggaccatttcccacacctatatgactgcatccccaaccaacagtagcaagcaatcattccctagccactcctagcccttccctcaaactatctttgaaaaaccctagcccccagattatcagagagcttgatttgagtaacagcttcatctcctgtgtggcatggctggcctctgatcaattaaattatttattgcaatgccatggtctctatgaattgattttgtttgtgcagcgggcaagaagaacccttagggcggttacacacctgtctgaatgaagaatatgttgctgtcacttaaaaggacttgatgtaacctgtgaaaggacaaaagcagtaccagaagtttgtgagaacatgccagaagcagcacatggagatggagcattctctccgctccatccctatcatcttccatagaattaagagatgatcattctatatgtggtaaatcttttattttaaaaatccccttctgtaaatttcaaactaaaatccattttctgaaggatagggcaacacagatggcgatgtttaacatgttgggtgcttttgcttttttttttcttttttcagtttcctagatgtaattctttttggacttttctgataacaaccatcatagttcagtaatcttgaatttccaaagtgtgtcaaaatataaatgcttaaatctaattatttataatgcttagatgcaggtatgaaataatattcaattatggggcaatttaaatatataaagaatggaccattaggtaagaatgcagcctttatttggtttatggagattaagtgaaagtctgatggctcagtacttttcatgcttatttccaaataatagcactttgaacactaacagaagtccaagaatacacccagatttttgtagtatccatttcctattttggggaaaacaatactgcagagccattgtaggtgacataacataatggctctttgtggccaattatttattcagtgtacgggcctcacatcagtttaaagaatgatgcctctctctactttttaataacaataatccaatgcctttctttactgaccactgaggcagttctttgccctctgactccctaaagctgtaccaagttcattgtcccctctgaaatcaggggcacttaaatgctaatggtaaccacaagaaagaataggtcacagttaatcctgttagcaccatgtacacacctgctgctttaaaccaagacgggagctcatttctggagttgttttgaatctttacttctcaatgaaacttctgtcccttccttagaatccgaccaacactaggattcgccacaactagtgctccaacatggagccaaaacttttttgagtgtggagaaatcaaaaattgtcatcaggcacagcagaaaccttctctttctacttctccattcgaacttgaagagttttacacgtttgcctaaggaacaaacacatgtcaggcactccactgtttaacagattattacagaaagcaaacctgggagaaaggggacattacaacaagcataaagggacaacaagacaataatgtcctttacctccaaaaaagctcacagtggggataggtttgtatctctcttagaagattatataatcttagtacatcattttttaatttcaaagagacacacacctttaaatgggactaaaataaacagtttttacaagaaatttaaaaaaaaaggacagtaagcatttcttgtgagtatttggggagcattctgcacaaacctaagaaaaaagttcattaaaagcaaggaagaaagtggacagaaatcaagacatagtcatctaagcgcaaagtgtaaaataactgtagaaacaatattaggtagtaataataaattataattcaaagataaaatatttgtgatcttaaccattcatagccttgcctgatcatccatgcctagagtaatttataatttgctgaggcaggaatttgaaccatacacactttaagggtgataaatggaaccaagtcacttaaccaacatatggatctagtcacccctgggcggcattcatttttcaagccaactttgttgctctctaatcattattaattatgtaatcctcattaacagtcagaatgagattcatgacatatttcagttgtaacttatgatattttatagatatagatagatgtttaaaagttttattggccaggtgcagtggctcatgcctgttatcccaacactttgggaggccaacgcgggtggatcacctgaggtcaggagttcgagaccagcctgaccaacatggtgaaaccccatctctactaaaagtacaaaaaattagctgggggtggtggcggttgcctgatcccagctactctggaggctggggcaggaaaatcgcttgaacctgggaggcagaggttgcagtgagccaagatcatgccattgcactccagcctgggtgacaagagtgagactctctctcaaaaaaaaaaaaagttttatttatactcccttttccaaagtactccagcgatatcaaaacatactatttgaatttcaaatatttgaagaataattcagtagttgagaggaaaatatgagtaacaataataaataataaatcgtatgtaaattggctattaatagtaatttaggctccgacaatagaggggttttggttgtataagttaaaagtaaagtaaagcactttctacataaatttgagaggttggaatagttaaaactaatagcaagaaaaaagactaatcatgtaattagaagaaaaatatattttctaattttgaaaatatttgtgttattgagtaattagaacaggcccctgttttcttatcactgctaatcctggcctctccctcctaaaccagaaaatgtaagatttaaatgatggtttgaggaagagtggaacttttgtattctggccagagtcgagtctagatgcctttatttagatatatcaaagccaacacagttgtgaagtgggtcagtgttatgacctgcagtggacacatgtagttgaagataaatgataaagactgagaaaatttaggagagtttcagttttttgtttttctgtttttaagaaaaagcgagtcgcatatggagaaatacatcatctacacatttccaatcctccattttctttatgtcgttcaaaaacatagaaatgttttcagggactttttaaaaatttcatatatacccattgaacactttaagagtagaataactttttcctatatgtcttatctctaatcagtttctaatcatctttctaatctatttcctactcttggtcccactactacactctttattccacctggtgtgtataattgcaataatgccctgacttgtcttgttccctgctgttcctcctcctctttgccaccatcatcctgaaaagaaaaatctataatactatcctattacaggaagaaacataaacttatttatgatatataacatccttcatgattagaccccaaacacccagattcatctccccttcttcccaatgtctccacaaaacatgcatgcaccactctagtcatgcctacttaatcctaggacttgatgtgcccattcatgtcccctgatctttgtgtttgttttagctttgcctaaaatacacttgtttcaaatcccagaagaaatgtggccacttcatgatttatccgatcagcactttgtcatagttctattataaaacatatttcatcatattatgattattaatctgtttctctcactaaaatacgaggtattggagaaaaagaatattagcatacattttgtttcgtcagtgctaagcagcatatcaggcacataaatgatgcctaatatttattaaatgaaagattgaaacaatggatgcatggagagatgaataaataaatgaacacgtgaatgaattaatataaggaaaaaggcgataagtaatttcagaagaaggaaagctagaatcgatatttggattctctgtaaacagcaaggggggtgattaggtgacccaaagggtcagttcctcaatctttaatttttctaggattatccctatgattctgcagtttcagcatctgaaattatagatacacatgggtcctgacattcagcttcacattttcacctcagatatttaaatttattctcacttggaaaaggtctgattttaaaaacaaaattaattcatgaaaataatgatgcaagtagataatagcaatctgtgatgctctaattggtattagactaatcacttgggatgtggaaaatgtccaaatgaatgcatcaaggttaatgctggcatattcattacagttaatatttcagttagaagctatcccttaaaaaaatacacctatctcctgagtaatttccatacagctgcttaacactgtcaggaaattcttctcatgaaatatttcatgagacaattaccctacaccaaggaattacatgctcacttgacatcagatatggtggtgcaaatgaaatagcatcaaatttcctgtaatagaacacagtaaacaaatagcacaatgattggttcaccattgccccaaaataatattgtgcatgcaatcacttatgtgcatgcacacaaacagaattatgtactgtatatattacagttcaggatggctgacctctctcctgctttatttttcctatcaaatctggagactagtatttttaaagcatgtatgtggcatgatttttattttttattgttgatactttgatttggggtttccccctcataatagtttctgaatgtggaactgcatgaacaaagagaagacacattttatattttttggtgttcttttctctttttctttctttctttctttcttcctctccctctccctctcctctctccttccttcctttcttccttccttccatttcaatacttttgggggaacaggtggtttttggttatgtggataagtgctttagttgtgatttctgagatttttgtacactcatcccctgaagagtgtacactatacccaatgtgtagtcttttatacctcacccctcaccatcccttctccccgagtccccaaagtttattgtatcattcctatgcctttgtgtctgcacagcttagctttcacttataagtgagaacatacaatgtttggttttccattcctgagttacttcacttagaataatggcctccatccaggttactgtgaaagaaattatttcatttcttttcatggctgagtagtattccatggtatgtctatgtgtgtgtgtgtgtgtgtgtgtgtgtgtgtgtgtgtgtgtgtgtgtgtgtatacaccagatgggtgtatatgtatatacacccagtagtgagattgctggatcaaattgtacatctacttttagttcttatggaatctccacactgttttgcatagtggttgtactagtttacattccccccagcagtgtaagtgttctattttcaccacatccataccaatgtctattattttttgatcttttaaattatggccattccattgtggttttgatttgcattttcctgataattagtgaggttgagcatgtttttatgtttgttggcaatttgtatatctttcttttttatctatttatgtccttagcccactttttgatgggattatttgtttcttgatgatttgagttcctttgtagattctggatatagttttttgttggatgcatagtttgcaagtattgtctcccactctgtgggttgtctgtttactctgctgattattacttttgctgtgtagaagctttttatttcaattaagtcccatcaatttatctttgtttttgccacatttgcttttgggttctttgtcgtgaattctttgcataagctggtgtctataagagtttttctgatgttgtcttctagaatttttatggtttcatgtctaacatttaagcctttgatccatcttgggttgatttttttataaggtgggagatgaggatccagcttcattcttctgcatgtggcttgccagttatcccagcaccatttgttgaatagggtgtcctttccccactttatgcttttgtttgctttgtcaaagatcatttagctataagtattttgcttcatttctgggttctgtattctgttccattggtctttgtgcctatttttataccagtaccatgctgctttggtgactatagccttatagtatagtttgaagttcagaaaatgtgaggcctccaaatttgttgcttttgcttagtcttgctttggcaaagcaagtaacctggatggagttggaggccattattctaagtgaagtaactcaggaatggaaaaccacacatcgtatgttctcacttatcagtgaaagctaagctatgcagacacaaaggcataagaatgatacaataaactttggggatttggggagaagggttggtgaggggtgaggtataaaagactacacagtgggtatagtgtacactctttgggtaatgggtgcacaaaaatctgagaagagtttcttttttctttttttttttttagaaaaagcaagtcacacgtggggaaataacatcatttacacatttctaatcctccattttctttacattgttctaaaatatagaaatgttttcagggactctttttttaatttgatatatacccattgaatgttttaagagtagaataacttttttctatatgttttatctctaattggtgggctcttttttggttccatatgaattttaggatttttttcttctagttatatgaagaatgatggtggtatttagatgggaatgcattgaatttgtagattgcttttggcggtatgcttattttcacaatattgattctacccatccatgagcatgagatgagtttctatttgttagtgtcgtctatgatttctttcagcagtgttttgtagctttccttgtggagggttttcacctccttggttaggtgtactcctaggtattttattttttgtgcagctattgtaaaagtagtcaagttcttgattggattctcagcttggtcactattggtgtatagcagtgctactgatttgtgtacattgattttgtatcctgaaactttactgagttcattttcagatctaggagctttttggatgagtccttagggttttctaggtatccaatcatatcaccagtgaacagtgacagtttgactttatctttacctatttggatgtcctttatttctttttcttatctgattgctctggctaggactatgttgaataaaagtggtgaaagtggacatccttgtcttgttccagttctcagggggaagaatgctttcaactcctccctgttcagtataatgttggctgtgggtttgtcatgaatggcttttattatcttaaggtatgtcccttctatactaattttgctgagggttttaatcataaagtgatgatagattttgtcaaatgctttttctgagactattgagatgattatgtgatttttgtttttaattctctttatgtgatgtatcacatttattgacttccatatgttaagccatccctgaatccctggtatgaagcacacttgatcatggtggattatcttactgataagctgttggattcaattagctagtaatttattgagaatttttgcatctatgttcatcaaggatattgaactgtagttttctttttttatgttatctggttttgaaattaaggtgatactggcttgatagaatgatttagggaggattctctctttctgtaccttttggaatagtttctgtagaattggtaccaattcttctttgttttataaattcagctgtgaatccatctggtcctggaccttttttttttgacaattttttttattaccatttcaaacttgctgcttgttattggtctgtttagagtttctatttctttctggcttaatctaggagggttgtatatttccatgaatttatctatctcctctaggtcttctagtttctgtgcataaaggtgttcatagtagccttggatgatcttttgcatttctgtgatatcagttataatatctcccattttgtttctaattgagcttatttggatcttctcttttcttttgttggttaatcttgctaatggtgtatcaattttgtttatcttttcaaagaatcagctttttgtttcacttaacttttgtatggtttagttacactttcatttagttctgatctttgttatttcttttcttctgctgggtatgggtttggtttgttcttttttctctaaatacttatggtgtgaccttagattgtctattcatgctctttcagactttttaatgtaggcattcaatgacatgaactttcctcttagcactacatttgctgtatcccagtggttttgataggttgtgtcactattatcattcagttcaaacaatttttaaatttccatctggatttcattgttgacccaacatgaatcattcaggagcggattacttaatttccatgtatttgcatacttttgagggttgttttttttttttttttcagtcgatgtgcagttttattccactgtggtcagagagagtacttgatatattttgattttcttaaatttattgagacttgttttgtggcctatcatatggtctatcttggagaatgctccatatgctgatgaatagaatgtatattgtgcagtttttggatagaatgttctgtaaatatctgttaagtccatttgttctggggtatagtttaagtccattgtttttttgttgactttctgtcttaatgacctgtctagtgctgtcagtggagtattgaagtcttccactattattgtgtggctgtctgtctcatttcttaggtctagcagtaattgtttaataaatttgggatctccagcattaggtgcatacacatttaagactgtgatctttctctgttggactagtctttttatcactatataatgtccttcttcctcctttttttaattgttgttgctttaaagtctgttttgtctgatataagaatagctatttctgcttgcttttggtgtccatttgcctggaatatctttttccacccctttgccttaagtttatgtaagtccttatgtgttaggtgagtctcttgaagacagcagatacttggttggtgacttctatccattctgccattctgcatatttgaagtggaatatttaacatttaggccatatacattcaatgcgaatattattgagatgtgaggtactattctattcatcatgctagttggtgtcccaataccttgatttttttttcattgtattattgttttatagtccctgtaagatttatgctttaaaaagtttctattttggtgtaattcaaggttttgtgtcaagatttagaatttcttttaacaatcttatagtattggcttggtagtagcaaattctctcagcatttgtttgtctaaaaaatgctttatctttccttcatttatgaagcttagtttcactgaatacaaaattcttggctgattttttttttcatttaagaaggctaaaaatagcaccccaatctcttctagcttgtatagtttctgctgagaaatctgatgttaatctggtaagttacctgatgcttttgcttcacagctcttaagatggcttctttcatcttgattttagataacctgatgactatgtgactaggcaataatctttttgctatgaatttcccactttttttctgaggttcttgtatttggatatctagatctctagcaagaccatgaaaattttcctcaattattttatcaaataagttttctaaagttttagatttcttccttgggaacaccaattattcttaggtttggtcgtttaacataatctcaaacttcttggaggctctattaattttttaaatttttttctttgtttttgtcagattgagttaatttgaaagccttgtcttggagccctgaatttctttcttctacttgttcaattctattgttgatactttccagtgtattttgcatttttctaagtgcatctttcatttccagaagttgtgattgttttttatttatgatatctatttctctggtgatttttcattcatattctgtattattttttaaatttctttaagtttgttttcacctttctctggtgtctcctaaagtagcttaataattgaccttctgaattctttttctggcaattcagagatttcttcttgatttggatcccttgctgttgagacagtgtgatattttgagggtgttatggaaccttattttgtcatattaccagaattattttttctggttccttctcatttgggtatactatgtcagaggaaagatctgggactcaagggctgttgttcagattttttatcccatggggtgatccctcgatgtggcactcttccccttctcctagggataggacttcctgagagaaagactgcagtgactgttattgctcttctggatctagccatccagcagagctactgcgctctggaccagtattggatagtgtctgcaaggagtactgtgatgtgatctgtcttcaggtctcccagccatggataccagcacctgctgtggtggatgtagcaagggagtgaattaaattctgtggggtccttcactgcagttttctttagtgcactggtttttctgaacactgattatgctagcagtgaagctgtcacatggacagactcaggacctctggttagccaggatgttataggcagtggaattagctggtgtatttttcttcctcggagcagggttgttctaagttgttataatatcttgagttagttggcatccagcaaggaggtggtggtttcaagagaatatcagctgcagtagtacaggggagacagaagcttgccctcaggtctcctgaataagtattgggtttctcaggcaatgggtggggccgtagagctcctacaagcttacgtcttttgtctttgcctaccagggtaggtagagaaagaccatcaagtgggtgcagggttaggtgtgtctgatctcagactctccatgggcagggcttgctgcagccactgtgtggtatggggatgtggttctcaggccaatcgattcatgttacaaggggattatggctgcctctgctgcttcatacaggtcaccaggtaagtggggaaagttggcagtgacaagcatcacccaacacctacacagtcaacaggccagtctcattcctgccatgctcccccaacagccaacagagccaaatttacatccaggccttcagtgtacagggctgagatcttgtcccaggctacaagccttccctctgagaaagcaggcagggatttcaggctttgcccctccctgtctgttgtgccttctgtgctcatatctgcacttccaatttgcacccccaccataggattctgcccaggaaattagcactcagttgaaattattacaaagttcaactggaagtctccttccccttgtggcccttccccaattccattgactgccttccccaaggacccctgtgagataaagtcagaaatggcttccctggggactgggagtacctccagggttcttcccactgcttcttctactttcgtatcttgctctgttctctaaatttgtttcagctctaggtgaggttaaatccttctcccatcatctggtttttcagtttccccagtgaacaagatggactttacccctccaaacttgggtactgagttttttgtctgtcttatggagtttactggcaacaagctacatcttgtgaattcttttgttttttctggtacgttcctgtggtggttcttgaagcaaaagtttacaatgttagtctccacacgctgttctgtgtgtccaagtgggagctgcaagttagtcctacctcctatctgccattttccagcagttaatttttgcttagcagaagtacaacacattttttggcttagactaggaccaaaaaattgggttttggttaaaactgctgctcattctgttactcaaggaatcctgaaaccctgctcattcttcttttacttccgcctctcagatcataattgttgcatcagtagacaacttaataaacttccatgttcttttgtaaaaccccgagaattattctgtgagatagtccccatttatgatttactgctattaatattattagtctttgttactaattatcattatccccagtttacagttgaggacacggaacctcagaaaaattaagtgaaacttcccaaagatgcagggaagcaggaagaaatagtctggggaaaagattcttagttttgggcttcaaaaccagtgaaacaggttatgtgttctaggttcttctatttcttcatttagctaatatttattgagcatgtactaagtgggaggcactatcctaggtgtgaagaaaaagataaaaatcactcctctgtggaactatctacagaggcaggcaaacaacagacataatacataaaattttaatgtattttaggccctgccaagagaagaattaagtcgagagaaagagagggacttttgagacagggatgtacaattttaattgatgtagatgaggaagacttgctgagaaagtgaggtttcagtaagagcatatggagataagagagccagtcaagtgggtagctgggaaaagagcattttaggcagaggtaacagcatctgcagaatatctgagatgaaaaaagtacaaaagggtggtgtggtgtcagtgaaataagcaaggaagaaagtagtaggagatgagatcacaggtttgttcatttgtctgtttacttccttgtttattcgatgaataactcaatgaattattcaatgaatcttactgtgctaccacgttatttactaaggctaaaccgtaggcaaaagcagacatggtccttgctgtcatggagtcacactaaaaagaaatgcaatgaagtttccggtaacacacatgactttgtaacttcctccctcagaaagcctcatgcttggaattgaaactgaatagaggttggatgggcatgagagacaatgcagacctctatttataagtcctggaggccagtgttctgttccttctgttcagatggtgatagttagcaatgttttggggagagacaaggaggttcagatggtgatggtttgcaatgttttggggagagacaaggtggagtgagcaagtgattttttgtgtgtgtgtgtgtgtgtgtgcgtgcgtgcgtgcatgtgttaagcaacagaagattttcctgctaaatgttttcagctgactgatgggagaaaattcctgaatgcatggtttatattcacttaaattttagctatattgaaatattccttagtatagaaaaccaatctagaacaagaagtctgtccatgaggaaatctttgaaggcatacccccatctcttatacactcaatctattcagctgctcttgggttaatgaaatccaagagaaattgagctcagtcatgagaaaacatgccatgtcttggcttttagggggttctgaaagaaagaaatagataaaaatctgaactaacatgtccttcgcccactttttgatggggttgtttgtttttttcttgtaaatgtgtttgagttcattgtagattctggatattagccctctgtcagatgagtaggttgtgaaaattttctcccattttgtaggttacctgttcactctgatggtagtttcttttgctgtgcagaagctctttagtttaattagatcccatttgtcaattttgccttttgttgccattgcttttggtgttttagacatgaagtccttgcccatgcctatgtcctgaatggtaatgcccaggttttcttctagggtttttatggttttaggtctaacgtttaagtctttaatccatcttgaattaatttttgtataagatgtaaggaagggatccagtttcagctttctacatatggctagccagttttcccagcaccatttattaaatagggaatcctttccccattgcttgtttttgtcaggtttgtcaaagatcagatagttgtagatatgcggcgttatttctgagggctctgttctgttccattgatctatatctctgttttggtaccagtaccatgctgttttggttactgtagccttgtagtatagtttgaagtcaggtagcatgatgcctccagctttgttcttttggcttaggattgacttggcgatgctggctcttttttggttccatacgaactttaaagtagctttttccaattctgtgaagaaaggcattggtagcttgatggggatggcattgaatctataaattaccttgggcagtatggccattttcatgatattgattcttcctacccatgagcatggaatgttcttccatttgtttgtatcctcttttatttccttgagcagtggtttgtagttctccttgaagaggtccttcacatcccttgtaagttggattcctaggtattttattctctttgaagcaattgtgaatgggagttcactcatgatttggctctctgtttgtctgttattggtgtataagaatgcttgtgatttttgtacattgattttgtatcctgagactttgctgaagttgcttatcagcttaaggagattttgggctgagataatggggttttctagatacacaatcatgtcatctgcaaacagggacaattggaaatcatcattctcagtaaactatcgcaaggacaaaaaaccaaataccgcatgttctcactcataggtgggaattgaacattgaaaacacatggacatgggaaggggaacatcacactctggggacggttgtggggtcgggggaggggggagggatagcattaggagatatacctaatactaaatgacgagttaatgggtgcagcacaccagcatggcacatgtatacatatgtaactaacctgcacattgtgcacatgtaccctaaaacttaaagtataataataataaaataaaaaaaactaaactaatatttgaagcacagagaaaggaatgtattaggccctatcccatttatggcaaacttgtttgaaatgtgcagcagagacaaagccaaaaattatttggttcagttaggctcttcctagtcaaatatttattttcatgacttggaggctatatagcctgggtttgatcccagttccactgcttactcacaatgtaacttgggcaacctctttttattttttttaaataaagaaatatatacatatagaatttaccatctttaccatttgtaagtgtacagttcagtggtaataactacctttatattattttccccttcatcaccccttctttccctgtgccaaataccagtatactcactatttttatgagttgacaacctctttatgtctcaatctcctcaactgtaaaaggatgataataatcaagtctttcttatggggtggttgtaagaattaaatgagctagtatgtataaagttcttggagttgtttggccatagtgaggacttaataagtgttagttagaacttaattagagttaaccaattcttgtgaaaatagaagtagtaggcaggcactaacacaagcaggaagtcatttatgtggtttcctcctgaggaattaggccttttataattagaaaatatccttctttagcaatagtatttgctgcaaattctttggtattgatatttgcatagtgtatatctttcccattattgtcttattttccatttttcttaattcttatagtttggatgtatttctgttaaacagcatatacttgtgttttgatcttttgatccagattggcaatctttgtatttgcctttcttaaaaagtttattttattcataattgacacataataattgtacatatttatgtgatacagtgtgatgtttccatgcatatatacattacataaagatcaattcagggtgattagcatattcatcattctaaacattatttatttgctttttaattgaattatttaccccattatcatttgatataatcactcatatatctgagttgcagctaccattattgagtaacttctatttattccacctgttctagatttattttccctcctcttttgccttcttttgtatagtttttattagtccattttttttagttgacttggaaattacacattctttcacaaattttttaatgtttgtcttagtgcagcagttctgcagcttaataattcactattgtatattattttgtttttgtttacattgccttatcttcatgtttgcctggttatttttcattgtatgctgaatatatttgcaaaattatttgtggagtgattgtgagactggggccataatctttccagagaagaattacatttgcttttgccaagcatgccttaaacatatctgctcacctcaatctaatttcaggtattaaagtgattcagactgagccctgtgagggctgttctacttttaattccctcttcctcctggggtgtagcactttgggtttataataggaaataagagagatttaccagggctccccttctcagcaatccctggcttactatggcagagtctgctgggttctgcaaggtcgtcaatgcacttttatccactgagccactcctctaatgttgataattgcctccatgggttaagtgatttccaagagccgactaatctctgttagtcttcatccttcctaaattctggacaagtaactcttcactttcttgttggctttccaatgcctccaaacatatcatcttatattttgttaagttcttcagttttcttttatgggatgaggggaggagaaacttaacgatatcacctgatctattactaaaactgaaagtcaagttatgtggattcaactttactgatgaatttggtattgatgagtcattcataaaattaataattgaaatttattattggtatttttctgcctgcatagtacttctgcattgcaatcatgcttagactgtcttctttctaaacttgctttcatctaatacttaaaatagacattagctaattgttacttacaattggaatgattacattttccattttgcttgggatagctctgatttaccccgttgtcctgaattcctgttgagtttatcctggaaatatgtcctactatggacaataaattatatcatcacccacatagagtaattattcttataatggaaatttacttttaacaaataactcctagatgtaaagtcttcaggctgtgaatgaatgactctctaatgcaagaatttcagccattgtgataggcaaaaaagaggattccttgaagcataaaacatttctgaaatccactaaatcacatcaagttgctaataaatgttaaagtttggcattgaagaggtatatatagatatagcactgcactaatttcttcaactttcccatcataaagatgagacatagagatagtaatgtgaaagactgactataatattgtcagttagtattgtagtccagggtcctgaactctgagaatcacattaaagtgatggcacacactactacctttgagataaaagagttgttataacaaggaggtcaaataggcatctaaaaaaatctaggtctattttaaaacactgcaatattgggattttatattacctagtgtgctcttcagtttaccaacgagattttttaagtttttttctattacattttaaagaaaaattatattataatgaaaattttctgattttgcctaaaattgaaacatgaaaattgcatatctttttcaatttctcctaactttttttcacttctttaccatgaataattaaaatttgactaaaatggaatgtgtcctacacatactgaatgtttatctaatagtaatagtgatgagaaagacaatgatgaatatagattttcagagaatcagatgggtaatacatataacatagtggttaagagcatggggttaagaacatcatctagtcttgggattatgctcacttaaatatttattaattgtgtggccctgttatttcactaaaaaaaaaaacttagtttccttacctataaatgaagacaatccatatcttattacactgctatgaaggttaagtgcaattatgcctccagcaagaatataataaacagcaacttttaaacattttcaaaacatattttgaaataagtatttttaaaataaatttatttgcttaaaattatcattattctattcctgctacaaaatatgaaatctaattatttaataaataaggcagtaagcacaaatgtatttctagctctttaatactatcattatccttcacaaagcatagaacaaagcttgctctatttttgagattatactagagtcaagacaaattataaagaatgtatgctacgtacataacatctcctaagagcaaaaacttacatattgtaacatattttggttaaaatgtactgaggtccaaaaatcacttaggttttattggttattccattaataggaattattggcctctgctaattgctgaatatctataaacactttctgcatcagtttctacttggtgttttgtgatttagtaagaacattaacgttatattagtaatagcaaaatgggcaagggtgactcagcattcaataaacaagtctttcctgctgcaacaaccactccaggctaacctcatctaaaattgcaacaggcaaacaactacaaaaacttaaaatgaaaatgaaaacacacacacacacacacacacacacacacacacacacaaacctagctcataaacccaggctaatactcctccctctccagttaacaaagcatttttaaacgtaaaagatttgtgcatgcatatgaggctatctttgaattataccactggacatagaaatactagttgaataaatgtcaataattgtgattgtcagaaaaagaagaattgtctccttcacctggtaggcctgataagtccataagagatgttgctgaaaacccaatgtctgatggctataaataagaaaaaacatttctgctcttgcagcatatcctgggtagagcacctttacaattgtgtagtccaacagtccccacctgacccacctatggtaaataactagaatggccccatgtctgaggccaggtggagactgttctcaagcactgaaatccatttagtacagttctatggtttctttctaggatgaaattttgtggctattctaaaagagacagaccaacctccaatgaatttgtgctttctcttcaaagccctagtttaagtatgaatagagatagtagaggaagttttgagttatttccacattagtatttctttaacaagactgactgctgtggaataataatgttaatatttgagttatgagaaaactggcccattttattagcctattaacaacttgcttatctgttttagttaacaagcacatatagcccttatacttggccagaaactgttttaagtgtgttacatatataaactaatttaatccatgtgagaaatctatgtggcagatatattattgtcatcatctcccagatgtggaaactgaggagtattgatgtaaagtaactttcccaagaccaccagctaatacatggcagttgggatatgaactcaagtaatgattccagagactgggttcttaatcattatgccatccttgaaggcaccagcagtgctctgtaaactgtgcaatgttgaggtaacattgcacagttacctcaaatggttatggtgggtgaaatggagaatcaaaaattacctgatacaccttgacaatgtctccatctgtcactaatttcagtaacctcagaaaggctaaacccttagtgagacatcaacagtactacagaaaataattctattatgatctgtagacatttttaatcaacttatataaacaattttgtttcatgttatgaatatttatctttaccttcagtatcatatagtgatgtgaaacagttttactgaataggatctccttagaccattacgtaggtacaacgtgaattattttaaagttaccattaacagcttttatcataatttcccttattcataagggaattcacttaaaacccatctaagaagtcctcaaagctataatctggaggcagagtgctctcaacaagttgatttcatttgtgaaatttaatctcaaacaatagttggactgtctggccagacatttgccttcggtaatctcacaaatcaatcatatgttgtaattgaagttgggggttgagatttctaatcatgatagttgtttagattatcctgactgtcggccaatgtgtctgagaatattcaatttgatttctttcaagatagaataaatgcatctcagtatatgaatcttagaaacaggctgaccaaatcaactctcctcacaattactcaaacagccttttcaaatatagagtattttaaagttgcaaagcaaagattgcattcaatttgcaagcattctttgaaaataaatttacactgcctgatattacccagtttctctttctctttctctgtctctctaccatccttctccctgccctcaccagttttcttttaacaggaccaagaagagaacagaaaatgcaatgtaagtgtaaaatatgtttgtcccatcattctcagcaaacacaggaacagaaaaccaaaacaccacatgttctcactcataagtgggagttgaacaatgagaacacatggacacaggggtgggggggaatatcacacaccggagcctgtcagagttgggaggcaaggggtgggagagcattaggagaaatacctaatgtagatgatgggttaatgggtgcagcaaaccaccgtggcacgtgtatacctatgtacaaacctgcacgttctgcacatgtatcccacaacttaaagtctaaaaaaaaaaagtctaaaaacaaataaaaaaatagacactggagactcagaaggatgggaaggtgggaggggagtgaaggatgaaaagtggcttaataggtacaatgtacattattcagaaaatgattacactaaaagcccagacttcatcattatttgaaatactcatgtaaaaaaactcacttgtagcacttaaatttatataaataagcaaattttttagatgcaaaaaaaaagtttgtcaccagaagagaataagcaataaaatataaaggtaaaatagccaatggtaagcagaacctcaacaaaataatcctttattgactttaggctaatcctaccataaatcatgggaagccaacattgctacttaataggaaaaaaaaaaatgccataatactgaaccatgagagcaaagcatatatttaacagctaaataactcatgttaaacaagttcaatattaaacattataataaatagaattctatggcttagtataagctatatgtattattttttgttttaatttggcaatttgagttttatatcttagatcacatttcaactgaatggctgattttgctaaaactaatatacattacttcaaaatttttaaagtgttttatcagcttaaaacattaaaaatatgtgcaatggtatcaggttccaatattcttattcgctcgtgggaatcttaaattattttcaatttaattagagttattagtgtagccccaattttttatatgcaaattatctcccttcccctgtctctcctctctctctgctctgtgtgtgtgtgtgagtgtgtgtgtgtgtgtgtatgtgtctccatctctcttgcatgtgtgtgtatatatatttacatgcatacacacacacacatatatatgtgtatgaagatagtctagttgagaaagcattttattgaattttgttctattatgatagtactatacagatataaaggcaagaaaaaaattcagttcaatcttgacatcatggaatataatatttagattctgttagattgcatttagttgctatatactaaggagacaaattataggtaaattgcccttgaatggcatcacaatctggtatcattgagtgttagaagagttatgggccatgcaatattaaactgccaatgtgctttcgtggcacttacacaaacttctgtcctgccacttctgtacatgacaatgatttactgactttctatccaattgactgtgaacttgtgaactcttggacagcaaagagtcataatttttaaaaaatctgaatccccaaaatctagcacaatgtctggcacatacccacatagagtacattcgatttatcttcacagagtgaatgaatgaatgaacagacaagcttcctttaaacagagtttgttaattctgctaaggagattcatatttattcttttagacagagtctcactctgtcacccaggttggagtgcgatggtgaaatctcagctcactgtagcctccacctcctgggttcaagcaattctcatgcctcagcctcccgaggccgggactgcaagcatgtgccaccatacctggctaatttttgcatttttagtagagattgggtttcaccatgttggcctggctggtctcgaacatctggcctcaagagatccgtctgcttctgcctcccaaagtgctgggattacaggcatgagccactgtgcccagcccatatttattcttatttttaaagtactttaaacagtgcattctgttttaaatggatgtatattctgcagtgtttacaatgtgttaacaatgacatcatccaactagcaggcaagttttaggattataataaaacaagtaatgttcatctaatggacaagaactcagtatttcttgtaaatcccacattcagaaagagacataaagccacataacctgtctgtaggttccatatccttgtatcaattgaaagccctggatccctggaactctatttctgcattcccccagactctggtctttcttggttttctgtctatttctctgtctacactttttgttccttacaggtactttcttccacattagttgttaaaatgtctttgacgctcttctttttctatgcatttcttttgagagagcattcttgattaactatttcaataccacctagggaataataatttccagatttctatcttgacctctagagctatatatcaaattatcctccagatatctctacctcatagtctcattagcaattactattgcaacaataagtcaagcaagaaatatgtaagaagtatgtgagtctgaatttttcctttcatttacttttcatgttcaattaattaccaagccctatcaattcccttccctctgcacccacactaccatcacctccctaccttacttcaggcccattaactcatacctccttcaattctgttgacccattgcagccaaatagacattatgaagtataaatcagacccttctcctctcctgcttgattaaggttcttcgatgattcaccactgcatggagaaaaaatccaaatcttttaacatggtatttaaaagcccatcatgatacaaactcaacctgccatgattcccctcacagggattcctcattacatacttcccctcacacacattgttaccccatgaaatggtttcaattccatgagtaagatatgatcttctattccgtcatgccttcatataagctgttttttgttttgatagcttgatgtagacaactctgcgaatttctgttcatcccttaaaagtcacaaatatatgccatcctaaaatgaggaaattactgtttcttaaggcagcccattcaatgtcatctagagttgacactgagaaagttattactatagccttagttgtattccttgtagtcacacagaacaaatctacatttttttctttcacatgctatatcatcaaataatttaacgcatattgctcctagtgctttaattccctgaggtaaatctccacaaaatcctttacatttgcctcttttcttctaccccattaaaagttggtatccaggactttcttgaccacatccagatgaggtctgatcactctaaagtaaagctcaacaccaccctttatattaggtgcacttcacaaacaactctccactactcacaggtgaagtgacaagtcctgaacagccttgcagggagctagaaatcctgaacttgtgggaacattatgtgttatttctcagctgcatcttcaccccactctccagagtaagaaaataaaattggatctgaagtcattgattacaagagttaaatttcacataaaacgtgtgatggacacaggagggaaagagccatgggagaacgtacataggaaagattatccatattttttaataggaggtttgccactcacagtagaggaaaaaagcacagaagcaccactaactatggcttcttgaacatacctttctattccccaagtcctacgaggtgccatttttcttttattaagccattttagtaaccaaaaccaggtaaaagtgttgcctctcccaggaatgcttacctttaaacaaatatcaaggtcttaaacattagatataaagccctgacagaattttatctatcagccctcaggtaagagacagaaatattgctctcgccacttagttcatagaacagaagcagtcgcctaaagatgtaccttgcagttgtaaatgaaattctatggtgctcaaactggtcctattacaatatgtgaacattcacaattaactgtaagattataagcacaacatttggagtaacatctacagattaacacctggctcaaatattgcagaagcatctacatcttagaggaacttaaaagcacacatatatcgcccatttctcatttcaattacaaaaatacaggccaagttttggacatagagccggatgatatatttttttgcattatttttcaataactctttaaacaaataccaaggtagacactcttggccctattaaattatatttaattaagtaatcagctcttaaatttaaaatatcaggtttaaaatgttactttcttttgagacagagtctcattctgttgtctaggctagagttcagtggcacaatcatggcttactgcagcctcaacctcctaggatcaagcaactttcctgcctcagccttccaagtagctgggggtacaggtgaatgccaccacatctgcctaatttttgttttttacagactgggtctcactatgttgcccatgttggtctttaactcttggcctcaagcaatcctcccacctcccacctcagcttcccagagtgctggaaacctctgcacctagtctaaaaatgttacttttactaatgctacttcatggacacctagcttagtgtcctgtctaccttgaactcaatatctaattaaagaaaaagattgccttaatatattaatccattttgtccaaatctctttaaaacttaacattagtatagtgactacatgctcccttaagtgttatgtttcacatctccatatcatttgagtttaaatattatttaatataaatatcacttagtttctgaatctctcattactatagaaaaaagtctacctactcttcttcagaaatatcaaatttaaggtgttataccatatttagtttttcattaagttaaacgacctaaatttagtagttattaatgtaaaacataaaacttgctcttcccacagttctctccatctcacataatggcaaatccctcattctatttgtttaggacaaaagtttaagtcagttgtgacattactcatgttgcctttctaaccttaattctaccacttgccctagttcactccactccagccacaagcatcatttctaccccttgaatatgatttgcccagcaaagctctcatctcaggtactttcacttcttccctctgcctggatagcttgtcctccatttagccatgtagctcatgccctcacctcccaagacctcaatcaactatgcaaactcccttgctcagcaacactccccacttcccttccctgcttaattttcttcccatggcatctatcaacatccaacatactatatatttacttacttattttgtttatttttttgtatcctcccatgtggtatgcagaattccaaagatatactcccgagattttcatcccttgattattcaaacaaacactaatctaagcactgctatacagagattctgcagatgtaattatggttgctaatcagctgatgttaagagagggagattaccctggactatctaggaggacacaatgtaatcatctgtaccccgaaaaggcagagaaagccaaaagagcccacaagagaaatgcagtggaagaggaagaaagggaacagatgggggaaggggaagtcaaagagcttcagagcatgagacagactcaacatgccattgctggtttgaggtgaaggaggaaatatgattagaatgacaggcaccctgaataaggccagagagcctcctgatgatggctaccttggtaatatggtttagttgtgtccccacccaaaatctcaccttgaattgtaatccctataatccccacatgtcaagggtgaggccaggtagaggtaagtggatcatgaggctagtttcccccatgctgttctcatgatagtgagtgagtctcatgagatctgatggttttataagcatctggcatttcccttgcttgcactcactccatcctgccgccctgtgaagaaggtacctgcttttcctttgccttgtgccatgattgtaagtttcctgaggcctccccagcaatgtggaactgtgagtcaattaaccctccttcctttataaattacccagtctcaggtatttcttcatagcagtgtgagaatgaactaatacacaaagaaacagtcacctcagtcctacatttgcaaacaaacaaattctaacaatagcctgaatgagcttggaagtggattctccccaaagtctctggaaagaaacaaagccctgttgtgaaaaggtgaaacatatcccttaatttcagtcttgtgaaacccagagcagagacccacctgagctacactgtgcctggacatctgacctaaagataattactggatattgtattaagtcattaaatttgtggtaatttgctatggcagcaataaaaagatgaatataccctattagattacaggcctgatgaaggcagggattttcatccagtttgttttgttttgttttgttttcagtgctctgaccagaattcagaatagaatctgacaataggaggcaataaagactttttgaatacagcatacatattctttctcacaaaatctgtatttcacaaagtcttttgaagagcttctgcacagcaaaagaaactaccatcagagtgaacaggcaacctacaaaatgggagaaaattttcaccacctactcatctgacaaagggctaatatccagaatctacaatgagctcaaacaaatttacaagaaaaaaacaaacaaccccatcaaaaagtgggcaaaggatatgaacagacacttctcaaaagaagacatttatgcagccaaaaaacacatgaaaaagtgctcatcactggccatcagagaaatgcaaatcaagaccacaatgagataccatctcacaccagttagaatggcgatcattaaaaagtcaggaaacaacaggtgctggagaggatgtggagaaataggaacacttttacactgttggtgggactgtaaactagttcaaccattgtggaagtcagtgtggcgattcctcagggatctataactggaaataccatttgacccagctatcccattactgggtatatacccaaaggattataaatcatgctgctataaagacacatgcacacgtatgtttattgcggcattattcacgatagcaaagacttggaaccaacccaaatgtccaacaatgatagactggattaagaaaatgtggcacatatacaccatggaatactatgcagccataaaaaatgatgagttcatgtcctttgtagggacatggatgaaactggaaatcatcattctcagtaaactatggcaagaacaaaaaaccaaacaccgcatattctcactcataggtgggaattgaacaatgagatcacatggacacaggaaggggaatatcacactctggggactgttgtggggtggggggagcggggagggatagcactgggagatatacctaatgctagatgacgagttagtgggtgcagcacaccagcatggcacgtgtatacatatgtaactaacctgcacattgtgcacatgtaccctaaaacttaaaagtataataataataaaaaagaaaaaaaaaagaaatttttagcccaaaaatgttgcataaaaatatttaaaattaaaatgtggaaggtaagttgttttgaaagctcttcattcagtagtttgtttctcttcaagttagcagcggctatcagttctatgaattggacataggaaacagtcaaataccacttcctaaagcagtgtttttcaatctacaggttgcaacacataaacaggtgataacagcaatttatgaggttgagatcatcagaaggaaggaaaggaggaagggagggagggagagagggagggaagataataaaatcaaaacattataatgcaaccttaattttaatgtagcatacatgagtgtgcatatgcatgttgtgtgtgtagtagatcactaagtaagatgtatttcttactgtgagttgcattaaaataattagaaaaacgctaaaggtcattacagtctgtgctgtggaccagaatgtaatttagggcctgactggaagtgagatgaagacaaatgaatggggatgtgtctgttaagaaagagctgatcaagaaagaaccacactattctaaacctgtacttaaatttgcaaggctagagagagcatgatgattgaagaatttacacgaattgcaccaccttaaggtaaggaaatgaacttttttcctcttgctgtgtacatcatttcccatgggtctgaattagcacccctggacactgtttagatccaccagcagagcagagtcactgagatttggtatgaaatccaaatggaagagtacaacctgaggctttaatcagcaaagcatcacaagatgctatttcttttcttccttacagtgaaaggattaaaaacctaatacttatctatcttctgagattttcagttattactgtcatttaaatgtagctggaaaggaagttagaaatcttcttgtcacatggaacccaagaataaaccttggttagagaaatttgaaattgaatctagcacaacttcctcattcttatgctattctattgttacaatattactcttaacttatatttaccactgattccagtgtttgttgtcaatagactgcatatgggtaaaggaaagaataatgtggttgggtgtggtcgctcacacctgtaatctcagcactttgggagtccaaggtgggcggatcacttgaggccaggagtcagagaccagcctgggcagcacagcaaaaccccgttgttactaaaaataaaaaaaaaaaaaaatagctgggtgtggtggggcatgccagtaatcctagctacttgggaggctaaggcatgagaatcgcttgaactcaagaggtggaggttgcagtgagctaagactgtgccactgcactccagcctgagcagcagagtaagactttgtctcaaaaaaaggagaaaaaaagaaaagaataacataactgtacactactcattcctccattcaatggcatactccttgtgggcttggatcaagccatgcattctctttagtatctactatggttgggtaaattgaataagataatacctgcaatgtactcagcagagtgcccagatcacagtaagagctaagtaaatgcttctgtatttgcttttgttgttttaattctaatatgagtactattaatataaaatgtgctgcataggaaattcttaatatattttgattttcattgcattatacaataaaataatatcataatgcatacctttaaaatcaacttatatttgaaggaacatttaaaaattacagagctcttatctgctcaagccactttaaataaatgcataaagtgaaagatttcaattagttaaaaattagccagaaaatttcttcttaagtatatgaaaagtcaatagacctgggacatatgattcataaaggtaatcttcctaaaaacaatgtaaagtcttatataatacgaagttaggtaagagaccaagtttctctaacctgatccttaggtaagaatcaacattaaaaactgcactgaccactgtattttgtagcttggtgtccataccattaggcaaggactataaatcctaaaaacagaatattatttcctttagatcttccacgaagaaagaatatcaaaacaccccacacacacacacacacacacagaatcacagtctgtttttttccgatgatttcaaccatgttaaatattttcttttcttatattttacaagctctgcagcatctttcccccctgttacttttgtgttgtataattagcttataattatgcactctttcacactggaaagatgattcttttattaatgaccctttgaaaagttctttatttgtctttgaaagtgagtttgaaatcaaaaggcttgaatgacttttcctttccttctgtttaacttaggagatcttaaaagtaataaaagagacggttatagatgtcacagaaagtcataaattttccacctttagactgagaaatggggtttgggaaacaactgttgcatcttccactctttccaaattaaatgcttgggtgtgtgaagaacaggtatgcaacaaaacactcaagttccaaaaatgactgtctattctttaccttttccccctgttagcaccaataggaaatgggtcagaaccaaaaaaattccagaatccgatagaaaaacagaagaagagtataattcacatttgtagtaagtacaatataggctcaaaattagtcttaagtggaaaaatcactcagaccctgatttgtagtcaattcgggaaggtgccactcatctctgctgaggccatgcaagccttattactatttctggctgactgctatttatttaacaggcttacccaagcactccagattggctatgggccattataagggagagtgtacattattgcatattttaattatttctcaagccattttgcttgcagtgataatcccataagaccaacatatcttgcataagcaaagcaaatagcttttggctgagacagctcttgagttattttgtaacctattcctacataacttctggcctttccaattgtggctgggacctgccaaatcaggagttcaatggctttttggctcatggtgatcacaaccacattattgaaaacagacatatggacagtaataccaatgattaaaataatgactcaaatttgttttcaaaagtagtgctatttatgcatgatggaaacacttcttctatctgcctctattcaacatttcctctatccaacacttccactgtgggcaaagtaacacatgcctagagctattttaagaatttttcttatcgcctccaatcttttcactatttcagtggagatggctgagcaataatagcctgatgaccttgaaaactttttgcttcatttgtagcaccagggaaatttgcccaaattgtttggtgggccaaactaaattgcacatttttgcctttctatttggaatgccatagtgttcctttggttgaaaatgtctaagtagctccattttcacaagcagcatttttcttgtgaaagaataaaaggataagaatttactttggttgtactcaagaagctccttctttcaagtctttctctctcctcttatatatgatgatttttcttttcaaaatgggagtgacagactcttagaaatagagggtatcttaaaagaaactaaatctaaacacctactgttgtatgaaaaccctctataatgtcttaaataaggtcctccattaccagctattctttgggacaaaagagattaaagaaaaatagaaagtgctatcctctatatagaggataatgtcttataactaaaacaaattataggatgtagatgtgattttccctactcatgagttctcagtctctcatccaccttgtttcattacatttggaagaatttgtgaagcagacactccattttaaatttgggtcattgagaatatggtcaacaggccaaaagggagtaaaacagcacttccaaatttttttttttccatgagaatttagactgcatggtcttgaccttttcatttcaatgatccagaaagttagagatatttttaaaggtcgacctcttaagaaaagaactatacgatatttttaccattattgcttaagaataagttaaattattagtacaaagtacaggttaaaagattgggttttggaatggaactacatgttttgaaacctggcttcctaattaattagctatatgtccttgggaagttacataacatttggaagttttggtttactcatctgtaaaaggagataataacactatcttctccactgggctattaggaagattaagtgagctaactcatgtaaagcattttgttcagtgtatggcatatgttttaagtatacaataaataatagcttccccttgttcactgaagtaataaaaacaaagaatttggttgtcaagagctcacaattttaaaaatttgtttcagaatctcaaaacgttaatgaatttccttaagtcctgtttttggactgagaattaatagtgctagggaaaatattttcatggtataaatagcttataaggaaaatttacattgccagaatgtttttaacaaattaatacggattatatcatgtgctagctcactgaataatataattatcctaactaattgatcatgcatccaatgggttttgaaaaggtgtgacacttagctaacaggttagagtcaagaaaaatttcatgaaatatgtttttattcatgccatttgaaacttagtcacttctgtgtatgtctgatcagtcaatgtattaaatatattacttggcagactaaattacatatctagatgagatcataaaataagcctcttgtatatgtctggacaaggtttaaaagtctgctatatcaagtagtattgtaaattagccagtctctacttttatgttactttttataaaacatcaatttataccattactctgttctattcttcaaatattcaactctaatttatagtatgcttttcctaaaagcaaaacaaaacaaaaccttcctttgctaattctataaagaaaagaattcaaattctgccagtctggaatacccatgtggcaaattaggaaatcaaagaacaaagctatttttcagttctctaccatcaccgagaggtcagtaattacaaagctgaaatacatcagtgtcttaagaatattctttttgtattgatcttgagaatctgaaactcttcctagtagcccattacaataattgtaaatcttaaccactagaaaactatttaatgattcagatatcagggagatcaaaataattactttcataaaactaaaagaatctcagttaaaaaactgtattaaaagtaatatataaaataatgttttcagaatttatttagattactatacattagaaaaataaaggattggggtcaccctcccagaatttaacatgcatcctcagtggggaaaggaggttcacattaccctcagtattttatgaaggagcaaacagtgtttattgatcagataatatgacagttgatggtactctatggaagatgttgttctgagtgaaataaaaatgttttatgaaaaaagcgaactaagaaaaaaatggggaaaacatatcttgcaaaactatactcttccattccacaattgccacttaaattggttactgcacaagctccgttctctattaattcagagacattctgttttcccaagcttgctgtccacttaccctagttgttttgactttattcccagaggaacagctccatcctttccgatccggaagaactttacattcttctccctctagacatggctgcatatggcaccaccatttctgttccactattgaagctataagagagaaaaaaaattgactcaacatttttttcttgggacttatttctcttgttcacctttaaagaggaacaaaagccactaatttttcctaccagtgggaatacaggtatttgaggtatgcctttctttttgttcaaaaggacaaaacctttcaagattttctaactaaaataattttctttaaaacattttttattttattgtaatgagaacacttaacatgagatctatccacttaataaaattgtaagtgtagaatgcagtatagttaactatagacacaatattacaggattttcatgtgaaaatagacttcatgaaagctaagatattgaaaataaactatgcaaatgtgtatatgcaccaatttatataaatatataagaaaatggacctatgaccagtttttagagtcaacactttataatcaatataatattcccatgaataagatggttatcaggagggtgtttatcagagttatcataatttttttaactgtgtgctataacctcatcacaagcaatatattatagtaatatgagcacttaacaaattactatttatggtaacatcaactaaataaatgcatataaagatttatgtcctactataattaggtgaaccctcaaggaaaaaaattaatatattattgcatcatcataaaagttgatattttatgttaattctatccacaactaaatgttcactcatatacatggtgctattttttttaattcttaagaatatccatgggtttaagaacccataatattaaatcatccattttcatctttccttttccaattaatttacacataatccacctcccaccatccaccgagaaatcaacatttcatggtatcaaaataagatgcacattaatttaatggaacctcattataatgccttttgtaacagaactgcataatattttagacctctttccagaggattttagatttcaaaatgccacccaaatattctagtttcaacttatcatggtatttgtagtatgttcacccaggattgacctcccattgagagcattatagtggggttctagttctaagccatccttggctgtgctgttacaataaggaatggaagaagtcacaccatccacacatgatggagcagctcgcgtggtgcctgccacctgcccagggaagcaggagcacttgactgtttgtgaccgttcttctatcttgttcttattacagcatctgtggagtgccaccacctcacaagttcccgttttaacatggtgagctgcacaaacaaaaaagataagacaacattgagaaagctttggacacttccccccacccttctttttaattagcagtacattaaatatagctctataaggggtccaccaggcatgaaacgagaaatacaatgatgctaactccataatgcagatttgatttcttttctaaatgtggtaggaacatttctgtcagtgaatgcttggtaaagcaggaacaattagtgactagattagaataagctgttaaaagtctgatacagaagcagtatgtgccgtcatcaaaaacatttatttgcatatgactttttaatgcctttttgttcaatgcattaatcaaagtaaaataaacctctggcctaggtaccctgcaatgggactgaggccagccccattctcaaagtgggtggttgctgataaagcttgtgttcttctaggggagagtaagaggactaggcaggaagtggaggcagacagtgggcacccacatgctcagtattcttctgctcagtttccctgaaaatgaacaaatccagtgattcttgaaattgccaccatttttctggaagatccaaccagtcccagaagccagagtcattcctttcaattttgcctgagagggcaactgtcaccaaatggtaccatgaacttggataattcgtatctggcagccaattgcctgtaaacccagtccaataagctgtcaggcttccatattcattttgtcaaccttgaataaggacactaagtgtgttggattaatgaaaattttggaccttactcatcatattatgataagattctagtttgtcttcattattttttttcagcatttcttcttcaaatagtaatcctactgtgaaaagataaaacttttgcctgctaaaattaaaaacagcttaaaatcaaacatttgttaaaagattatgctttcagtaattttaaaagtgtaattgttataaaaacagatattacaatggaaaagcaggagatcttaagttgtttaatggcataaacataaggagacccattgcaaatgagatcggcacatcatacatttatattaatcttcccattgaagatgagtgaaaccaatgtgcaataagtcaggctaagtagttcgctcagatttttctaagacagagcaaatcacacatatttcctacctcttatccttctgtgtgagaccaagaaactcaagtgtaacatacagctttgacatataatcctcaatagaaccttcaagaggcagataccatttctgccactgtagatataaattggaatgttttctgtgtttgattcaaacacaaatctatctctatgaaagcaaaaaaataagaggcagacttctgtccctatcttctcgtgctctgggtgaatattttcttagctaagaatgagtccatttgttttaatttgccaaatggtttatattacattatacacgttaatattctgccttctctacatttctttattaggtcacattttaagcgagtgaataccacacatcagccatggtcttgagtactggaaacacagcaatgaataagggacacaatctgttcctgccctcaaagagcttatgtttctgaggagaaaacaaataataagcacccacggtaataattaaggcaatgttagatttttaagctccttgaagaaaatacagtagagtagagtagagtaacatgattcagagtaattttgtaggaagggaatgcatattttttcaagtgtcacaggaaacatctctctttgaggagataatccgaatcatgagctgaataatgagaaggaagtctctaatatgaagatctaagaaaggaggaacaaatattagagcagcaaataacaaggtcatgaagtagggggaagtgtggtatatccccagggcagcaaagatggccagggtggctggagtgtggctaaacaattgaaagtttgagggcaatgtatcagaaacataagcagatcatggaaaggctggtacactatggtaaggagattggattttattcttcctgcatgggaaatctttgggtagaaatagtattacatcatctatctattagaattttactcatgctgctctttagagattgggatgaagaaggcaagagtggagaccagttatgaagaggtgtaggagtctctgtgatcaaggatgagacttagactagattaacaacagcagagatggggagaagtagcagcttggatatatttcagtgtagagttgatttgatttaccagtgggtagaatgtgcgtcatgagggaaagaagaatcaagaattacccctaagcttggactgagcaatgagaagttgatagttctgatggatagagaaggcctaggaaagaggaatttgtcagaagatggatgaggttagtatatctgtacttctgttggggccatgttaagcttaaaagataccaatgcagagatggaaatcaagcaacaacatttataaaataaagcttaggggagatatttgggctacagaggccgtcttgagtgatctaagcctacagatggtatgtaaagccatggactgaacaagattaccacggaaaaggtttcaccaatagaaaaagaagaaaaaagaacagtctaaaatctagatctggaatgggaagacagcaagaagaccgataaggagctgcacaaaaggaaaaagataaagaaatgtgtgtgtgaaggaatgaagaaatagaagacaaaagaataaaaggtttcaaaaaggagagattgatcatctatgtcaaatgctgttgaaaggtccaattaaaagaagagaaataattgtccatttaaaaagtaatacagtgtagtggccaagagtatagactccaaagtccgagtacctggattcgaatctaagttccttctagtaactacttgatcttggtacgttatctattatgcatgggcagctgagtttttctcatgtctaaaagagggatattaatagcacaatcttcataggattaactgaggattaaatgagtcatgtataaagtgtttaggacactgcctccccgtagcaggcacttctgtaagtgttagctatttctattgctgttaacatttgatcttggtaaaaatcatgttagtggcatgaaaaaaataaaagcattattgaagtaagtttagtagagaaggaaaggtaaggttgttatagttataaaaagtctttcaaggagtttttctgggaagggagaaaggaaatgaagcaagagctggaatgaatcatggggtcaagggaatttttttaaacggatgctttaaaaggatgcttgtttgctggagtgatctagtagagagggaaaatgacaacacaggagagaaaatagatcattaacaaagaatgttcttaagaaagaaaagtaaattgtgatccagggcccctggagggttgacattagatttgtgtgaggacacaatccattttaacaagaggaaggtgggatatgtaggtacagagtcaggtagatgtgagtggattcggtggtgagaagataaggtagtttcttacctgatttcatctatttttcctaagaaatatggcagcccttggagaagaaaaaaagagggtctgaaatagatacctaagaaagagtgaatttaccaggaaagagtggtaggaataccaggcagggagttagctgatgcacactgtgaattgcagagaacacagcagaatgggagatggagtgagactgcagagcagagtggagataaacatctctaagatgatagatttctggggatgcttggacttctgagagtgatttagggaaccagggatgtgagtcatgatgagattactcctctaaatctctgaatggaagccagggaaagatgattagggcttcttcagatagtgacatcagtaggcagatcactaaggtgagatagcttctgggagaacattatggtggctagggctctgttctctttcatggtcctataacagccaggagcacatggtgagtttcccctgatctctcctctgagaaaagaggcaccattctagcaccaaggccagcttccttctgtatttcaaggagattttattatatgttgaaaaagaaaggagaagtgaaaactcatctgttttccatttccatacaaaatcaaaatttatttctattttgcctgactaaataaataagaggacaaagtaactgtggcattcactagtcctgttgaccaaatatgtctggttctctcccttctggacgaaggttgtactgtacttcaccactccatttaatttagatataagggcatgacgtgctttgtctagtgaaatgaaagttaaagtaatatgggccacttatgaggagaaactaatatcaattctatatggaagctttaagagctactgtgtaattcagcatgtttctccccaccagccagagcaacgaattatgttgttgatagcggaggccacatcaatctgaatccccaactgaagagacatggaaccgactcaccaccgatcatgatgggcatatgagtgagaaacaaagccatgttgttataaacctctaaaattaggatgttctttgttactgcgaccaactcagcctactataactacaaggtaatactttcactgcttctcagattgttcaggagggtacactttccaaatgtattagtcggagaataagtcagggaagcatgatatcccaaagcccaagtcatcctagcttatttgagtcaatgcagagtcaagatgaaaaataaaatatttaaatatttctataatgtgaggggttctgagaaactattctataatgggataatgacattgggtaagtttggcatgccagagctctggtgaagaaagtgtgcctctttcttcttggaagagaaaggaagtgaaatgatgatcacagggcacaatggagagtagggaaagagaggtatgccctccttcagagagcatgatgctagatgttaggagattaatagtaaagttgaccaggaagggacaaatggtagcctgatagatgcagggctttcctgcccagtgcttttttttttttttttcactgcctatgaacaaaatgtagaaacatgtggtagtttcctggtgagaaatgaactttgtaaaaacctctctcagcctttgtccttcttattaaaactgaaggtgtaaaactttttatggggaagagaagagaggtaaccttttaaaaatagaatagatgatagatacagatagctaaatatataaatgaaatagatgatagatagatgatagatagataatcttgtgctcaaaaactttgaaggcattggcattggtaggaaaaatatcaaaatatatatatatatatatgcgccagtaaatatgtcaagtgaagtgagatacttcaaagaaggaaattagcctagcaggatttgaacatgaaatatgtatgcatacgtttagttttcttatttgtctgctgtatatcttaaagtcttgttatgataaccaaattcttgtagacaaagactaatttttcatgtaaactgctcagtatgtggtatgtgtttaataaatggtaaacaagcaatttaaaaagataaaactaattcctgtggtttttctttaaaaggttaatgagacgggaggaaattcaagcagttactagaattctctacacagattcagacagagcttgtgataaactaacctaattgaatattagtgctttccaaattaacaaaataggcttcacagaagatcagttagtatcatattaaaatgatgcaagacccccggagaagatttaaatgaaaaagaacaaacaattttattcatgtcacaattcccaagtcaccaaaaaaaaaaaaaaaattctgaaatttttcctccatggacgtgatgcataaacacaaagtattccctcctacttttttgtgaaatgacagcatagacatatagatttcattaaattctcatgaaacagggatacaaagtcttacccagctctaatttctgccttccaaggttatggcccttatgtctcatttcaacaataggacctttggctctatggtaccccagaaacacggccttaggatactgcctcttaaatcatatcttagatttctaaatattttctgaagctattatgactggtatattttgaaacgaagtcccataggcattttaccaaaacctctgcttcaagctgcttttttgatgtagtgaaagaaacttattcataaaaaagaaaatcaaattaaatgacatttgacttatacaggcatagatttttaaaaattatacataataatattcattgcattatatatacataatatggtcacatctgattgatcacttgtgaaccaaccataaatacatgggtatgaaaatatgggttcacagtagaataatatttatgcaaattattcaccttaaatagtagttactggccatagcttaatatgagcactaacttatgtatattacattctatatgtgaaaataatttatacactccataaaccatttatgaaataatggtgattgctaacattgactgaatatttattgtgtgatgagcattatttcattttatcaatgcaataaccactgacaaggaaactatacctccaatttgcaagggacacagaaatgttaagagacacagaaatgtaagttggccaagataaaatactgagtaagaaacaaaattagagataagaatccagataacttacttccagaaatcatgatcttgaccattatcttataatgcctgatatggtttatatctgtgtccccactcaaatcccatgctgaaatgtaatccccaatgctgaagatgggtcctggtggaaggtgattggatcatggggcagttcctaatggattagcaccatccccctagtcctgttcttgtgaaagaaatttggttatttagaagtgtgtagcacctcccctcttgctctctcttcctcctgctctgggcatgtgagatgtctcactccccctttgcctactaccatgattgattgtaagtttcctgcagcctccccagaagcctagcaggtagccagcatcatgcttgctgtacatcctgtagaaccatgagccaattaaacctcttttctttataaattacccagtctcaggtatttctttctagcagtgtgagaacagacctttctatgcaagaaagacctttctatgccttcctgaagttctaaacacatgcagcagactccaattccagattatgtggaggaatgcagtaagtgtatcactgtccttacacatagtgcttgataaccttgaaagagcttagcttgacctatactatatgtgaataaactctaaagcaagtttattccttttccaaagaattggtttgttcacctctaaaatggctttctagagtctttatgaagaccaaatgagataatgtgtgtgaagctgcctttaaattatatattacttaaatgttaattacctttatttttatgattagtgtaattaacgaatatcaaagtaatgcaatatgcatataagctgcaaagaagtggctgttaggggaagttatctacattctatagaagttctaatttcattttttatatatatatatatatacatacacatacagttaattgtgttgacttgagatgcctataaaaaaatcaatctgacatcaaatctacaaaagagagtaaatttagcgtcaagttgtgaatttgttcctacttggtttcctctacactagatttcagttcttatttgcattctgatttgtctcattgattatgaaattttgtttgtctctatatactcctatttaatagtttacccagcctgactagctccctggagaatctatattgtaccttctaagcagaaataaagcatcacctacatgcaccaataggcaactgaaatgcgagctagttagtggatttaggttgctgtaaatcactttaaattgaaaaaatgtgctgaaacaaaactttctgagacagctaatttctcactttaattcattagaatgggaaaatagctcatattttttagactttcatgctgaagcaatctaattaacagaaatagtaatttaaatagctcaatgaaatttcaaaagttctcataatttatgaagtcaggatgatcaggaggaaacaaccaagtgccgatgacatgtttacaaattctgttttttaaaactgttccacttttatatggaaaaaagaaaatgaaattttggggtgggaaaagattgccactaaagaaaggataatatccataaaatttcaatttaacagtatggtctctattaacaaaagcaaattctcaaccagagaatgtcccccagtctcttttaagagaaagcgacaaaacaaagggagattcactcatgggataatgcttagattctttgcctctcacctcaatcatgaatatcttcccacccacattttaaatgacagtcgatgttaagaaaggtgtatctaaaggaataagtggaccctttatacactgtccagcaacttctgcttgtaaggcctgttctggaaaagaggtacgagaccactgaaatccatctcttcagaaatttaaagtaaaagctgcagaacagacacatggaaattgacacatgagccaaaagtatgtctggtatcaggagtcaggtaacccacagaaagcttcgcgcatgcctcacggtaaagagggatggagctcggaggaagcaatcaggaaagggaaccaagcacagcagcaaagagaggtcagagagaagggagcaggtggtccatgagctgccttggtgtatgcccttctgcagattttcctgtttttttctgaattcctgaaaacattttccagaatatgtttcaattggcccccttttttttcgtgaggtaacttgatgatgtctctgttccttgatccaaaactgtgctgactaaatgatttccttgtttaaattaaagctataattaacaaaagctcattatcagccagaagtattctccaccttcatttttaaaaggaaaaagacaaattcctaccttctaagtaggatccaggaaacataatctaacagtcacacctcctacatttacctcatactgaaaactgatacttcaaatgatgaccctaagtccatttacaattacaataaaggagaaatggtccattttagattagatgattgattgatagatagatagatagatagatagatagatttttaatggcaaagtttgaaaagaaaattttctgattaatcttaaattatacaaaactgtaaagaaatagaacatccccaattcccaagcattgtaggaatcacattgttcttttatgattaagattattcctataagcattcctaggaaggagtgtagtgcagaccaagtgctttctgagggaatgacccaatgggagaaagagtgttgaaaagacagattcaggattggggctctcatgtgtagttgtttgtccctgaagagtgtgacttggagtaaggcatttaggtctctggatctctttccttatctgtaaaatgaagaaatcagactagatttggagttaatttagacttagagatttctcccaattcaaaagtttaatgaatttgtaaaatgattaggtttcattaaaatgaagacaatcttttaaacctttcagaaaatgaaaatctaaatattacagatttttaaccccttcaaactaaaacaaattaacttcattttagtccctaaacttagtgagaaactgaggagtttatgaaatttgtagtttagatatatttcttatctgtatgaagttataagtcttaactgcacagtataatattcactataaagtcaatccgcacccacacttctttatgtacaaaacagcttgattatggtcaattccacgagagagatctagttcaaatagtaatataggacagtggattggctgaggattctgaagtcagatggtctaggttcaagtcccagctttagaagaaagtgctttcctatgcatcaaacctttttctttcctcctggcttcacagctaggctattttccagtcttccttgcagttagatataggcagtgacacaaagaatgtgggcagaagtaagttatgctttttcaagtccaggcttataaaaacctcccactccatcacccactctctctcttctcctttcaggtagatgttagtgccaagagtgaccttggaaaccatgtgtagaagattgcagagctaccataaacctgagtctctgaatgactatgtagaggagagacccacccctactaccagctggatttcacataagcaagaaatacatttaggctatgttaagccaatgtaatcataggctatgttaagccaatgattttgatgtatatctgttatagtagcaagccttagcttaactaatattcctagtaataatgatattcctagtaatggacttaggaaggagttgggtgcagctcaagtgcttcttaagggaaatgacataggaagtagaaagagcagagaacggaaatatataatttgagaaaattgttttatctctgtaagcatcagctattcataggtgaaataggaattgtgatattacctaccattaagtgctataatgagggtaaattgagctaaccttcataaagatgcttaaacttagtgttagctataattattatggagagtaataacatctaaaccagacccttgtatatatttatgtaatgcagatatctaagagataatcatagatttttttagagacttaaaaataaagtccaaacttgccattttgtaaaaagggaactggtgatgagaaaacataatcctaattctatatcacagagctagagaggaggagatagctaactagaactcacttctcttaatttctagttagttcactgtcagttccattaactcctccacccctcatttctttggtcaccaaatccctgtaagtctgccttttgtaaacccttttgattttcctctcttccctacaacttcacttctactgatttagcttaggcatccttaacatttctttcttgcaaaaccacaagagcctgtgacttatttccctacttgttagcttacttccctatacacacataaacacacacatactaccatggaagatccttctaaaagtaattctgcaatatagaatcatttgtggctcttcattttttatacaataattcaaactccaggcattgcaaaagcatccttccctcagcctacattcgtcttctctagcttcactttcctgtgcacatgtgttgcatcctacactgaaggcacataaactattatcagagtcttatacaaagcataccttcacatctctttgtctttgccaagtccatctccctgtttcttgattccttgccctcttttaatctttcaagatttagagcatcacatcctctactctaggaagctgttacttagcccgttaggtagactgaaccattccctgctctgattaacaatttcttacttatctctgtaacgcgtgtaattgtcttttatatttactttttatatctctgtttcccctactaaattttgtggaccaaatctatggcttttaatctatgaatatccagcttgagacacagtttgagagccaaaatagaaaattaaaataattgaagaacaaatgaataaatgaatggtttactacaagggttctcaaaagaaagaaataaaaacagtaaatttaacattttttttccagtccaggcttagataaacttattggaaattgtaaaaacatttgacattgtctctttgtgaatatgtgtgtatgtgtgcttaactttttttctaatggagagccaagtacagttttaggagagataaaccctggatggggaggtaagaagctctggcttctagaacttgcactgacacaaactgatggtttcatctttgacaaatcagttaatctcactaagtcacaatttatcatctgtgggataaagttggtgatatatgatggtagggcatttaatatcgtagtaaagaaaaaagtgacatcagctaaaagcatgtttatattgttatattatagaagaaacttatgacataatcaatgaaagcctgctcatcagagaagcaatgtggcattggactctgacctaggatatcttgattttggtcctaactggtcaggaatattatttcagaaagcactttacttatttggactttagtttcctcaactataaaattagaagaatctctagatttctttccaactccaaaaatgtattgtacagtgtgatatgtaaaaaatttagatgaagagaggcattaagtcatttaatattaagaagtgattattccctgcaaggatgaacttttactgtttcctgtatctaattttgcagatttataattccatacccttctgtatgctaagaggtttttttttcacatatgtggtatgctttgaagccagcaagagccctataaacagaggaaatcagtattatttaagaatgaacaaaatctttgccttccaactacaatccaacaaaatcttttctcacacacggaaggtttgctttgttcccagtgattgacatgaaaagcaaatttaggttatcttttctctacacttcagcaatttcagtaaggaacatccaggttctgagtgtcactctagattaaaaggatataaatccttagtcaaattattaaagaggacaaggatgaagctcattttttttttagtttttagaaaaaaaaagctaatagctctttgaaaacttatattctgaactacccattcactagcaattttacactgtcatctcaactaagcttttcattgttgttgacatcttctgaaaatgtcctcttaaaaatgactttaaaattcacttatgatgtgaaactcaaattaaaatagagaagcagtaaaaatgtattaggagaaccacttgtcagcaagtcaagaaacctgtgctttcatttgtatttcactactaaccatgagatcactgcctagtcattcacacattgaagattccctcaacaggcattgtgctatctctcctggaaatataaatccaaaccatctctacttttaaaaaacctagaaagcagtagagggagagaaccaggcacacaaaaactaaaataaattatccatgaaagaaagaatagataagctgaacttcattaatagtaaaattggaaatttctgctctgcaaaagacactgtcagtcaaaaaaaatggtgaaaagtaggtagaactaatagtaggtaggactaggcagctcccactcggatggacagagcagcttgtggagactcatactgtgaactcttgctccaagaactaccgcagggacataccaggaaagctgagagaattcacagaccctttgaaaaaagtggcttgccactgtaggtttcgtgagatggccaaaaaaactgtgagtaaccaaagtgtgagggggaaggtccacctccaaacaaacatcctcactggtgaatctgaaggtccagatcatgggagaaggatttgaccttacctggagctgagatgaatttagagagcaaagtgaaatataagagtagaggaagcagctggaagagtgctgtgggcactctcggtccccagggaaggcattcctgattttgtctcacaggggtccttggggaggtctgccagtggaattggagaaagaccacaaggagaaggaaacttccagctgaattttgtaacaattttgactgaacatgaagtttcctagacagaatctgggggaggggacaaatggggagtgcacatagaagcacagaaactgcagcaaatggggagatgtgaagcctgaaagccctgcctgctttctcagcagggaggcttgtatcctggggcaccttctcacccctgctcactggctgccttgaaatgaactctgtgctgttggtggggcatggtgggagtgaaattgttcttcaggctgcatggaagctggctgaggcctgtcactgccagctttcccccacttccccacttccctggtatgaagcagcagaggcagccataattcccctgggaacataactccatcagcctgagaactatatccttatcccccaaagcagctgcagtaagacccaccaaaggagggtctgagctcagacatacctaaccctacctccacctgatggtctttctctacccaccccggtagtcaaagacagtggacataattactggggggctccaaagctcttcctactgcctgagaaatctgaatacttatccaggcaacactagtgcaagcctgtaacctccctgcactaccacagctgatgctctcttgaaagcaccacctcttagctggaggccaaccaacacaaaaccattgcattaaaaaaaactacaacaaaggacactcacagagtccactttactcccctgctacttccaccacagcaagtgctgatattcacagatgagagacctgaagacagatcacatcacaggactctttgaagacaccccccagtacttgcctggagcccagtagctccaatgggtggctagaccaggaagagaaataacaatcactgcagttcagctctcaggaagccccatccctaggagaagggggagagcaccataattaagggagcaccacatgggaacaaaaaatctgatcagcagcccctgagtctcagatcttccctctgacagtctatccaaatgagaagaaatcagaaaaacagttctgaaaatatgacaaaacaaggttcattagcacccccaaaagatcacagtagctcaccaacaatgaattcaaactaagatgaaatatctggattgccagaaaaagaattcaaaaggtcaattattaagctactcaaggaggcaccagagaaaggtgaatatcaactttaaaaaatcaaaaaaatgatacaggatatgaacgagaaaatctctaaagaaatatatggcataaacaaaaaacaatcagaacttctgggaaggaaggacacaattagagaaatgcaaaatacactggaaaatctcagcaatagaattgaagaagtagaagaaagaatttcagagctcaaagacaaggctttcaaatcaacctaatcagacaaaaacaaagaaaaaagaataaaaaaattaataaagcctccaagaagtttggaattatgttaatcaaacctaagaataattcatgttcccaaggaagaaaagaaatttcaaagtttggaaaacatatttgagaaaataataggggaaatcttccctggccttgctagagatctagacatccaaatacaagaagctcaaagtacacctgggaaattcattgcaaaaagatcaccacctagttacatagtcatcaggttatccaaagccaagacaaaggaaagaatcataagagctgtgagggaaaagcatcaggtaacctgtaaagcaaaaccaatcagattaacagcagatttctcaacagaagctatacaagctagaagggattggggtcctatctttagcctccttaaacaacaaaactaatcagccaagaattttgtatccagtgaaactaagcttcataaatgaagaaaacatatagtctttttcagacaaacaaatgctaagagaatttgccactaccaagtcaacattacaagaactgctaaaaggaattagaaatcttcaaatatatcctcaaaatacaccaaaatagaatctccttaaagcataatttcacagaacctacaaaacaataatgaaatggaaaaaagaaacccaaggtatcaaagcaataactagtacagtgaatagaagagtacctcacttttcaatactaatgttgaatataaatggcctaaatgttccacttaaaggatgcagaatggcagaatggataagaattcaccaaccaagtatctgcagtcttcaagagactcatctaacacataaggacacacataaacttaaggtaaaggagtagaaaaagatattccatgcaaatggacaccaaaagtgaagaggagtagttattcttacatcagacaaaaccgactgtaaatcaacaaatgtttaaaaagacaaagaaggacatcatataatgagaaaaaagactagtccaacatgaaactatcataatcctaaatatatatgcacctaacactggagatcccaaatttataaaacaattactactaggcataagcatgataatagtgggggacttcaatactccactgacagcactagacaggtcatcaagacagaaagccaagaaagaaacaatggacttaaactataccctagaacaaatggacttaacagatatttacagaacactctacccaaaaactgaagaatatacattctattcatcagcacataaaagattctccaagatagacaatatgatagtccacaaaacaagtctcaataaacttaagaaaattgaaattatatcaagtactctctctgaccacagtgaaataaaactggaaagcaactccaacaaaaccctcaaaattatgcaaatacatggaaattaaataatttgcccctgaatgattgttgagtcaacaatgaaaccaaaattgaaattttaaaaattacttgaactgaacaataatagtgacacaacctagcaaaacctctgggatacagcacaagcagttctatgaaaaaagtttgtagcattgaatgcctacatcaaaaagtctgaaagagcacaaataagcaatctaaggtcacacctcaaggaactagagaaaaaagaacaaaccaaaaccaaacccaacagaagaaaaaaaaaataacaaaggttagaccagaactaaatgaaattgaaacaaaaaaaaaaacagataaatgaaacaaaaatatgtttctttgaaaagataaacaaaattgatagaccattaacaagattaaataggaaaagaagagagaagatccaaataagctcaattagaaacaaaaagggagaaagtacaactgataccacagaaatacaaaagatcacttaaggatactataaacaccttcatgttcacatactagaaaatctagaggagatggataaatttctgaaaatatgcaaccctctagattaaaccaggaagaaatagaaactctaaacagagcaataacaagcagtgatattgaaatggtaataaaaaattgccaagaaaaaacaagtccaggatcagataaattcacagttgaattctatcagacattcaaagaagaactagtactaaccctattcacactattccaaaacatagaaaaagagggaattctccctaaatcatcccatgaagccagtatcaccctaaagccaaaaccaggaaaggacataactaaaaaagaaaactacagaccaatgtccctgatgaatacagatgcaaaaatctaactgaatccaacagcattatcaaaaagataatacaccatgatcaagtgggtttcataccagggatgcagggatggtttaacatatgcaagtcaataaatgcattacagcgcataaagaattaaaaacaaaaataacataatcatcgcaatagattcagaaaaagcatttgacaaaatctggcatcctttatgattaaaaccctcagcaaaatcagcataggagggacatatattaaggtaataaaagccatctatgacaaacccatagtcagtattatactgaacggggaaaagttgaaagcactccccctgagaactggaacaagaaaaggattcccacgttcaccacttctattcaacatagtactggaagtcatagccagatcactcagacaagagaaaggaataaaggggattcaaatgggtgaagaggaagtcaaactgtctctgtgtgctgataatataatcatatacctagaaaatcctaaagactcacccagaaagctcctaggactgataaattcagtaaagtttcagggtacaaaattaatgtacacaaatcagtagcactgctatacaccaacagtgaccaagctgagaatcaaatcaagaactcaactcattttatgatagctgcagaaaaaataaaatacttgggaatatatctaaccaaggacatgaaagacctctacaaggaaaactacaaaacactgctgaaagaaatcatagatgatgtaaacaaatgagaacatatcccatgctcatgaatgggtagaatcaatattgtaaaaataatcatactgccaaatgcaattcacaaattcaatgcaattcccatcaaattaccaccagcattcttcacagaagtagaaaaaacaatcctaaaattcatgtagaaccaaaaaagggcccacacagccaaagcaagactaagcaaaaggaacaaatctggagccatcatattatccaacttcaaactatactataaggctatagtcaccaaaacatcatggtactggcataaaaataggcacatagaccaatggaacataatagacaaccaagaaataaacccaaatacatagagtcaagtgatctttgagaaagcaaacgaaaacataaagtggagagaggacacccttttcaacaaatggtgctaggataattggcaagccacatgtagaatgaaactggatcctcatctctcaccttatacaaaaattaactcaagatgagtcaaagacttaaacctaagatttgaaaccataaaaattctagaagaaaacattggaaaaacccttctagacattggcttaggcaaagcgttcatgaccaagaaccaaaattaaatgcaacaaaagaaagataaatatatgggacttaattaaactaaaaagcttctgtacagcaaaagtaataatctgcagagttgacagacaacccacagagtgggagaaaatattcacaaactatgcatccctcaaaggactaatatccagagtctacaaggaattcaaacaaatcagcaagaaacaaacaatcccatcaaaaagtcggctaggggcatgaatagacaattcacaaaacaagatatacaaatgaccaataaaaatatgaaaaaatgctcaatatcactaattatcaggcaaatgcaaatcaaaaccgagtagaatgaacataatccaaaaatcaaaaaataatatatgttggcctgaatgtggtgaaaagggaacacttttacactgctagtggaaatgtaaactagtataaccactatagaaaacagtgtggatactccttaaagaattaaaattagatctaccatttgatctagcaatcttactcctggtatctatccagatgaaaagaagtcattatacaaaaaagatacgtgcacatgcatgtttatagcagcacaatttttagctgcaaaaatatggaaacagcccaaatgcccatcaatcaataagtgaataaagaaaatatatataccatggaatactactcagctataaaaatgaatgaaatgattacattcacagcaacctggatggaattggagactattatttaaagtgaagtaactcaggaatggaaaaccaaatattgtatgttctcacttataagtggaagctaagttatgaggacacaagggcataagaatgataaaatggacttcagggattcgggggaaagagtgggaggatggtgagggataaatgattatatattgggtacagtgtacactcctctggtgatggatgcaccgaaatcaccactaaagatcttatccatgtaaccaaacacctcctgttctgcataaacctattgaaataaaaaataaaaattaaaaaaataaattaaaattggtctttgaaaataaagacattgtcaagagaatcaaatgacaaccacagactgggtgaaaatgttgtaaaagatatatctgaaaaaggattgttatcaaaaatatacaaaggactcttaaaactcaacaataagaacacaactcaagtttaaaaaggagccaaaccatttagcaaacacatcacgagaaaatatatgtaggtggcaaataagcctgtgaaaagatgctccaaatcatgtgtcatcagataaatgcaaactgaaatgagatatcactatacacctcttagaatgaccaaaattcagaatatcaaattctggcaaggatgtggagcaacaagaactctcattcattgctagtggggaatgtaaaattgtacagcccctctgtaagacaatacggtagtttcatacaaaattaaagatactctaaacatataatccagcaatagtgctctttggtacttacccaaaggggttgaaaacttatattgacccaaaaacatgcacatggatatttatagcagctaaattgccaagacttggcagcaaagaagatatccttcaacagatgaatagataaactgtggtacatacagacaatggaatattattcaagctaaaaaaaatgagctatcaagccatgaaaagacatggagaaaacttaaatgtgtgtaactaagtgaaagaagcccaatctgaaaaggttacatactgtataattccaactatatgcttttctggaaaaggagaaactatgaagatcagtgattatcagggagtaggggaaagggagggatgaataagcagaacacaggatttttagggcagtgaaaatagtctatacgacactataatagtggatacatgtcattgtacatttgcctaaatccatagaatgtacaaaaccaaagttaatcctaatgtaagctattaaattggggtgacgatgtgtgaatgtagaggtaagccgaaagtctcagtaccttccttttaattttgttgtgagcctaaaactactcttagaaaaatgaagtctccctttggcaggaacttccatacttcagtaatatgccaaaacgacaaacaccaatggaaagaggagagacacctgatgtatgtttcctagcccttttagaaaacatggagttgttcctttgaccacacacatgcgaatctataagaaaggtgatattgtagacataagggaatgggtactgtaaaaagaaatgccccactaatgctaccatggcaaaactggaagagtctacaatgttacctagcatgctgttggcattattgtaaacagacaatttaagggcatgattcttgccaaaagaattaatgtgtgtattgagcatattaagcagtttaagagctgaaatagcttcctgaaacatgtgaaggaaaatgaccagaaaaagaaggaaaccaaagagaaataaaggtacctaggttcacctgaagcaccatcctgctccatctggagaaacacactttgtgagaaccaacggaaaggagcctgggctgctgaaaccccttccctatgaattcatgcataatagatgttaaaaaaaaagacctctggaccgcataaaagtcaacgaacataaagtgattaagagccatgatgcaaatagtcacagccacagactatactaggataaagaaagaaggaggggtcaggtctcctcagtgacagacaggcatgagaatggggattaggaaataattcataaagatgatgcttaatctgaattttgtgagatgcctgaaagctagccaagtcatatcagcaaaagtggcctcatttagttttctgatctaaactagatgatgtctaagctcccttctggttctaaatttctaaatttctatgttcaattttaataaacataaagatatttatatatttctgttttgtttacatgtggatatgtttaaccgtggtatgtatactatctaaaccctatattgaaatttctctaatataatttttctaaagaataagtaatatctcttaaatattctttaacttctcagtgttaatcttgtccataattagaagcatttggtcctggagtgtgttgtaagtgtagctttatgcaggggaaaaaacgtaagacatagtgtgaaatgtagttagtaagtggatactgagcaagcggcattccaggaattaattttcttgaaaagatccctggtgttagtttgttcttttggtaatttgcctttgtctcctgaaagtgaacatgcagagtaacatgccctcctgggccaggtaaaatggccaacatccagcaaaaccaattaatgaatcaaagactaaggcagccttctggggggaagcagcagagcaactagtggttacaacaggaaatcagacagatgccaactgtgtggctttgagcaaggtacttacatgtaagcttcagtttcctcatctgcaaatcaagaataataatcctgttttgcagtattatcgggaggattaaacaagataaggtagggaaagctcttaacactgtttctggcatgttgacagtactcagtgataactggctattattattatcattattataaattcagggagagtccaattatcctattatccttgtgaaagcaatcttcaggataataggtacaacagatgtcaatggttttaagtaaagttaacttatggatctagtcctcagcaacttaccttttcttacctaagagtcaatagaacacataaataggggcatagtaattgagaacatagattctagagtcagactacttgcactcaaattttagctctaccacttatttgctgggtaacctttgccaaggttacttaacctctcggtgccttaattttctcacttgtaaaatgagaaaaatcagagaaaaatatctcataaccttgttgtaagaatttaattaatacatataaagcacctgctacagtatctgggttcagtaagtactctgtaaatatttgcttttgatagaaataacttttcttttaacccctgtggagaggtaggaggtagtgtcatcaatgactcagtgacagtgagagaaagggtgaggttgatggtaacttcttaccttggtagtagcagcagtctcacaaatgcctcctgaggaaaagggataactgggagctcattctttagggtcaaatagacccaaacaggaaatctttcctattgtgaatgaccttgcgcaagttatttcactaaaaagtctcaggtgactcagtgttaaaaagggaatagcagtatctacttaacaaaagtgttctaaggatgaaatgagatcctgaatgtaaagtggttccctctttacttttggagattgttgcaagggctcaccctaaggattaactggattcaaagctcattccttgactactgtcttgtactatctctcgagcctaaggggcaaggaagctgccaagaaaaactttcaaaccattctgctaccatccccaccccccaactcttgagcttattacttcattatatccatctggcttctcacctgggactcagtgagagttctagtgactccctgtgaacatctactactgacaaacgcttgccaccagtcatgatgctgcctttcagattccataccacacctccctctcaccctagctctcattctcattccctctccctctcatgcatgactttactcatcactcatttactatttattagatgcccatggtaggctagacaaaggaaagacaaatgtcctgccctcagggaaaagacaaacactgaacaaattatgacatagcttgaaaactgtataggagactgatccaggaaacaggctatgaagttatgtcgacctgggtttgagctccggctctctcacttattagctgtgctcttgaacaaattatgtaattcctataaacttctatttcttcttttgggaaatgtgaataccaatgtttacttttaacttgaaaatacctgccctccatcaccatctagcccccatctgcttctgggaatgtgctctagaacaagaaagaaaaacaaattactttaccagttatccttgcttatagagactagtgggaaaggataccttgcttaaaatgtgccctgttgaaaaggcaaagtaaaaacaagttacgttttcaaagctttggtcaatctttctgtaaataaaaggtcaccaccaaatctctgtttttgaaaacataaggcaataagccctgctggaaaacaaaccacatttatcatcataatgtaaagctgtgtgttcactgtgggcaggtatttttgcatattatgttgcatttaaaggaacgtttttcttcttaaattatgcttaaaagatagtctgagaagtacatttttcctttggaggtagtgatgtgtgtgtgtgagagacagagaatccaaagagagtttaatccaataattgcacctctgaaagctaagtagaatgaggagaaacacccacactatgcactggtagaaacccctcagaaagaatcagaacttagagtggcaaagctaaagtgaccctataatttatcttccaaatcaaaacccatttgagagtaaaagggcatgctattaataattattctgaaaaaataggtgttaactggagctgccttagtgcaaattggaacatattttacaaccaccacagcctatgctcaccctgaagtgttctgctaaagcctacctttgctaactatgatcttattctaagccaaatacccaggtttttgaacatgtgctgctataaattatgttctatgaactctcctagtggggataaatcatagaaaagactaaaatcaattggtagggaggagattttcccatgtgagaataaagattttctactatgaacattcagtgacattctctttctctgaaaagctgcgatagtatatgctgggcagggcttgagacttgcccaggtatgctgcaggtggccactagccctcactctcaggaagcaaaattgctgaatctatggtgtcttcttactggatctgttcttttccctttttatgactataaatattaatccccaatataatatctctattaatgaagagactgcagccagatgctacagtgattttaggcaaaactttctaaccagaagtgtaagtcatattgggcttagagatgtgtttgaggacatcagataacaagagttataatattaaatatgaaaatcattagatgcaaatgaaaacaatgtcaaatatcccagaagataatatatgtgattccaagtcacaggacatatggaagagagggcaggaagcagattaaaatcaggagtaagagcacacaggtagtgaagcaggataaatgccaacaggtgtacatgtgctatgacaggacacatatcacatgcggaagaaactaatagtgcaaggacaccaagtcaacttcaatcaaatcagtaagaaccagaaaccttaaggttctttagcagagtagacagcatggaggtataaaaagaaagcagtgtggaaggcaggtgaccaagaagaccttaacatgcccctctgcctggcttaactttgtacagaatttttctgactctaggccactgacatctcctttcttacagcatttactttagaaaacttgtaaattctttatttgcccctttgtattaatataaatcttctcccagtctcttgccagttttacaagccatgaatatctttctcaagggccctggagccatatatccctttgacatttaatcaagaaagacagggccctgttgctgtctctgtgggagggtaggagcctaactttgataaacaatgattagcaaatacagatggcccagtcacattcaccaatctccctgctaaagtccttcagtactttctcactcgctccttccagtgtttaaaaattctcctgttctttatgtcaccagagttgggttcaatttctctcctctatggcaatagtcttcacttatattgcaacggtcttaaataaagtcttccttgccatttttaacaagtatccagtgcaatttttctttatagggactggttgtagatcaactgcttggacagctcaaaacatcataaaatctaaatcaaatttgctcgagtcagacaactgtaatttcagaagctcctgagagcttcctcccatctaactatctaaaaataatccctcaccagctcacaagggaaattaagtttttctaaaaaggaaaaagcctctcctacaatcagagataaaaggctggttgaggtaaagcttcagtgtgaaggcatctcagtgacagcataatcagtcaatcagcaggtataaatgggtcattgtaagatcccttcctatttggactggggagcaggaagcctgagaaggatagaagagccaggagagggaatgtggaggagaataaaaggcaggagaatgagggtatagacaaatttcacaggatttaccactttgcctaggttctgcctcatctacctccaactgggctaagattaaaagaagtggaatctgaggtatgtttgacatgcagctgcaaacacaggcagcacacttggcttgattagtgaagatgtttgttttattaaacatattttacttcttgtaaagcagcttagactttagcatatcaccgtacttgaaatctgacattgcttttccattttcctttttataatatgcattccattttcctttctataatgtgcatcaaattagtgtgtgcatgtgtgtttgtgtgtgtatgtgtgtgtaccatggcctcaggcaaagcaaaagactaacaatccctcatgaaaaacaaagcccacagtgataagaatgttagaaatacacgataaaaatatgtcttaaagtttttaatgaatcttacagaaaaaatattataatgcaattataaactggtaccaaaaaatcaagagattttactaaataacacataaccaacaaaataactaagccaaaataacagcaattacaattaagaatcaaaaagcagtaatttttacttttgtttagggatggttgccgggggaaaaagtaaaaattgaaatgtatgagatttcatgtcattcaccaatgaataaaattcacaaaactcttttacatgtttcaattttttttcctgtgacttctgatctcagagtctcccttagaaaacagtgggatttgagactaggaggaacggtggaatacatgcctactaaagatgtatatatttccatgaaactatttgatcccgaaggtataaaatataaacgaaattctaatgtccctcaaccatctaaatgggcccctcctcacagctgagcattccaaagttaacctcaaaaatgagttcaggccatgatgagaagaggggagccaaacatggttcgttatacccgcctccctttggaattactgataaagactatgtttgataagaaacatttacaatctattctctctgaagcctgctacttggaggcttcctacatgataaaatcttggtccccacaaccccttattgtaaccaggcattcctttctattgataataattctttcaaccaattccaatcagaaaatctttgaatctgcccatgacttccagttgtgccacctttctggactgaaccaaagtacatcttacctgtatcgattgatgtcttttgtctccccaaaatgttttttacacatgttatacaaaaccaagctgcaccctgtccactttggacttatgttctcaggatcttaagggctatgtcatgagccattgttcactcataattgtttcagaataaatctcttcaaatattttacagagtttgactcttttcattgacaaaggttaaattataggccccaaaaaataaatttgcaaggactttttccatccttttattagttcaccaggtttcaagttcctttctaattcaggcactgtttaggagaagttttaactaaagttgacattataggtaatgcagtatttataagctaggtgaagcagatataattattttctgttttgttaaaatatttagtaaagactttaaaactgtttcccctaggaaaattccaaaaagcacattaatttcctgataataaagagcacaactgacatttatcatttttttccaggaggttccaaaatttaatcttaaagcttgaggaaaacatttattcttggaaaatttatgctaacatactttacatacttagttttcaacatacttttacatcaaagggtcaataagttgtttgaaaactagctacataaaacactgcttacagataattaactacctgatggacagccccaggcaagaaagtttaaagtgcttggagcccacaaaagatcaatcagaaatagaaaaaaacaaagctataaaggaatattgcaaggaatataaaaattagtattcattttacacagaattgttgaataatgcttccttgttttggttaagaaaacttcatacgaatagactttgacttcacatgtctaattatacaggacagaatcaactttatttctggtaataaaattaagagcttatgacaatttctcttctttaccactcgtgtacttgggcagttatcaaactctattgtacgaattggcttcctctactaggataggaatttcttgaatttggcacagagtacatgttcaataagtgtttatggaattgaaattaatgaacactacagatatgccagataggaagctaacaaagtattctttatttcttatcccagacacaatgttacttactttattaatagaaaagcacttcagaaaaggatagtgagcaagaaaacctgccctttatacaggtgaggcaatgggtagttagtatttaaaattattttaaatttaactcattgaaattcttacatcctaagaaaaaatcaacaactctactgcaaactatagaagtcagtgtcctatattgatatttcttgagaaaatttaattctattaagaaggataagcagcatgctcttcaaatatttatgtagcctaatcttccatttcaaggcttttactaatagcttatttagtcagaagagagaaacacattgatatttttacttaataaactcagcacaatcaacatcagatgatgtataagtggaagattaaatagaaataggaggcataaaaacagcatggctactttatgaaaatagcataacctatattttgtccccaaggtttggggagctatgttttctcctgtgagactgaggccatctctggaaaagggaggggaaatactggaagaagaaaggatataatctaattattttggatagttagaaataagacccctctttacaaaaagatagggagctaaataatgagagagggttgagtgagagacccaggagactgcctcccactttaaatcatttgaagttagggtgacagagtagggtctgagaagttgttttattgttagaagcatggttcagtatctgggagcatagtactgccaaacacatcaagagaggtgatgtaaaagatgacccctcaagaaggtgtgaggcataatccatctctcgtcctcagagtggctcagatcagaagtgagcacagccctcttctgcttcaagtttaaagggttgggtttcttcgttctcttttaatggtactgatccacagtttgagaaagaaagtttgggaagaaaatttctcacagtccagtaaaaggtaagaaaatattttagagacaaatttggagtgctcaagactttttattaaaaaacaacaaaggtagaaatttgtcattagttctaattaaactaagtaggagttttgatgtatcttgtgatatctccctcccatttttcaaaaaaaaaaagtttatttcaaatttacgttacataaaagggaagttttacatatttagtctttttaaattctctaatttttaattattttcttttctctcttttcctcttcattttcttttcttttttaattgacatataataattgtatatatttatggaacacatagtgatgtttccatacatacaatgtactgtggtcagatcagagttattagtgtatccatcaccctggacatttatctcttttgtaggttgggaatattcaatatcctccttctagctatttgaaactatataatatattattgttaactataatcatccttcaatgctgtagaacattagaatttattcctatctatctataattgtgtatcctttaacaaatctctccctattccctccttccctcctgcccttcccagactctagtattctctgttctacatgttacttctataagatcaactttttttagcttccatatatgagtgagaacattcagtgtttaactttccgttcctggctgatttcatgtaacgtaatgtcctccagttccatacatgttgctacaaatgacaggagtttattcctttatggctgaatagtattcttgtgtgtgtgtgtgtgtgtgtgtgtgtgtgtgtgtgtgtgtttgtgtgtgtgtgtcacattttctttattcattcatccattgttagacacctaagttgtttccatatcttaatctgagggtcactttattttctgactcataaggaatcacagtaattgaacatgatatcacattgtactagagggtagtttttccatggaagcaatggccagattatttctacttgttggcaatgaaataataactataaatattgaaggtgcacctcttatgactttatgaactctgcagatacctatcctgccttgaactttctggaagaatttggagtatctctctgcacttcagtatgtgaacaaacatattacttattgactcctacatgttgaatctgagacaggcaaaaaaaaattaatgtcttatatatatgaccataagcatgctctatgatgttcacatgacaaaatcagctaatgacacatttctcaaaatgtatcctcattgttaagtgattcatgactgtaattaccaatctaggaagagtttaagcccacatgaaaatcacaaacacagtatgaaacttaaaaaaaattagggagggggaaccatatggagcctagctgactctgagttgaggagatagagctgtgagtcttgggagacaaaatcagctagagttcacagagattactggagacgagaagctgcatagagagagggcaggagtattcagcagagtactaatcagcatttgcttatgaggaaactatccaatcaaagggaaagaaacatccacaaagattaaaagaaacagaagccacagatcacgtgggacttggaaaagtgtctggtttcaaaagccagactaggaaatcttaccatgcataaggacttgtactgtactcagaaagctcttacctcaggagtaggggataattagttcttgactaaattctgctatggtcctgccttacttacctgaaaagcaagacttagaaaaaataaaaccatttccaagtaacctgtgtcccagaacaaagtttgacaacatttaaaattcaaaaataccaagcagtcaaaaaaggtaaaatctaaaagtctgtcatccactcaaaaatgaccagccacgcacagaggtacaaaaaaagtcctataatgaaaataaatttaaaaattgaaattgatccagaattcacacacattagcattagtaaacaaagacattaaatcagttattgtgcccatatcccatgtatttaaaaggtgctaggaaagataaattgaacatgttaaacagaaaagtcaaaaatataaaaacaaccaaggttgaacacctagggatgaaaactacaatgtatgtaatgaaacaatacactagataggatcaatgtattatattctccaatgtattggagaaaaggaagtatactattataaggttttaatactatacgtgaaagagtataatattaatagaaggtaattatttacttgaaagttatagatgtgcactatatactcaatcatccactataataataaaaagttatagctaacaagccaaataagatgatacaatgaaattataaaatttactcaatccaaaagaactcagaaaaaagaagggaaatgaataaagaacaaatgggactaatagaaaacaaatagcgagattagtgatttaaacttaaccgcataagtaatcacattaaatcaaagtctaaatactcccattaaaagagatgaaaagattagatgaaacagcagaacccaactatttactctttaagaaaccaactataaaccttgcaggtcaggagaaaatgggatgacacatttaaaatactgaaagaaaaaaaaaacctgttagccaagaatattatactcaacaaagctatccttcataaatgaaagagaataatgcccttccctgaccagcaaaagctggtcttcttcaccaccagactgatcttacaagaaatgcttaagggaatgctgcaactcaaagccaagaacaataattactatcataaaaacatatgaaagtataaaactcagtagtagacgtaagtttatattcaaactcagaatactccaatactctaaaggtgctatgtaaatctttcataccactagcataaaggttaaatatcaaagtggttaaaaataactgcagctacaattagttgttaaggaacacaaaatatatatagatgtaaattaaagcaacaaaaatgtaaattgtgaagaggaggacgaaagtctagagtacttttctgtgaccaaagttacactgttataagcttaaagtagtctgttataaccacaatttttaaatcttagtttcatggtaaccacaaaaatagacataccaacagacacacaaataagaaaaaggaaagacccaaagcttaccataacagaaaatcaccaaaccacaaaggcaaacaataagagaggaataaaagaacatgggagctacaaagccaccagaaaataattaacaaaatggctggagtaagttcttacctagcaataataacttgaatctaaacagttaaattatccagttaaaagatatagagcggtcaaatggataaaaaacaagactcaactgtgtgctgcttataaaagactcacttcacctataagaatgcaaaaagactgagagtgaagggatggaaaaagatattacatgcaaatgaaaatcaaaagcaagtaggagtaactatagttgcagcagataaaatagactccaagtcaaaaagtgtaaaaaggaacaaaaaatgtcattatataatgatagaaatatctattcagcaagagaatataacaattataaatatatatgcatccagtgctggaccacccaaatatagagaggaaatatcattaaatctaaatggagagacagactgcaacacaataataacaggttatgtcaacactccctattcagcaatggatgggttatccagaccaaaaacatcaacaaagaaacactgaatttaaactgcactcaagctcaaattaacctaatagatatttatagaacatttcattcaacagctgcagaatacacatttttctcaactgtaaatggtacattctcttgaatataacatatgttaggccacaaaataaatcttaataaatttaagaagacagagatcatatcaaatatcttttctgatcacaatagtataaagctaaaaaaggaataataaagattagagcagaaacaaatgatatagagcctagaaaacccatacaaaacatcaacggaataaagaactgggtttttaaaaagataaacaaaattttgataaatctctatcaagactaagaaaaaatgaagagtaaaataaatgcagagagggaaaatgataaaactgacacaactgaaatataaaggatcatgagaaactgctatgaacaattacatgccaacaaactaataatctagaagaaatgaataaattcctggacacacaaaactatcaagattgaaacaggaaaaaatataaaatctgaacaaaccaataacaagtaaaataactgaatctatcagtactaaaagtttttttctattaacaaaagccatatgtttattggccacataaatgtcttcttttgagaagcgtttatcttcgcccacattttgatggggtcatttttttcttgtaaacttgtttaagttccttgtagattctggatattagcccttgtcagatggacagattgcaaaaattttctcccattctgtaggctgcctgttcactctgatgatagtttcttttcctatgcagaagctctttagtttagttagatcccatttgtcaattttgacttttgttgccattgcttttggtgttttagtcatgaagtctttgcccatgcctatgtcctgaatggtattgcctaggtttacttctagggattttacagttttaggtcttacatttaagtctttatttcatcttgagttaatttttgtataaggcacaaggaagggatccagtttcagttttctgcacatggctagccagttttcccaacaccatttattaaatagggaatcctttccccattgcttgtttttgtcaaactaacacataaacagaaaaccaaacactgcatgttctctctcataagtgggagctgagcaatgagaacacacagacacagggaggggaacatcacacactggggcctgtcaggaggctgggggctaagagagggatagcattaggagaaatacctaatgtagataatgggttgatgggtgcagcaaaccaccatggcacatgtatacctatgtaataaacctgcacattctgtgcatgtatcccagaacttaaagtataattaaaaaaataaaaataattatagcatctattacagggatataacagcatttaaaaaagccaaagacttggtggtttcactgctaaatcctgccaaacatttaaggaagtaataccaactcatcttaaactattccaaaaatgaaagaagagggaatatttccaaacccattctgcaaggccagcattgccctgatatcaaaactatacaaggatgcaacaaaaaggaaaactacaggccaatatccctgagtgaacatagatgcaaaaaattctcaacaagatactagcaaactgaattcaatagcacatgataaagatcattgaccatgaccaaatatgattcattccagtgaagcaagaattgtctaacatacaaaaatccaataaatgtggtacctcaaattaacagaaagaaggacaaaacaatatgacaatttccataggtacaggaaaagtatttaacaaaattcaacatcccttcatgataaaaaaaaaaatccccaaaattaggtataaaggtactaccacaacacaataaaggccatatatggcaaacccacagctaacatcatactaaatggagaaaagctaaacactttttctttaacatctggaacgagagaagtgtgctcatttaaacaacttctattcaactgtactggaagtcctagccagagtaatgaggcaacagaaatcaataaaacttatccaaatcagaaagaagaaagtcaaagtgtttctgtttgcagaggctatagtcttatgtatagaaaatcctaaagactacaccaaaaatctcttagaactaataaacaagtttagtaaaactgcagcatacaaacttaacagctaaaaatcagtagtgtttttatgcattagtagtgaattatctgaaaaaaatgaagaaaacaatcacttttacaatagctaccaaaaagcaagatacctaggagtaaatttaaccaaggaggtgaaagatctctacactgaaaactataaaatgcagatgaaagcaactgagaagtacacgaataatctgatagacatttcttgttcatgaacttgaagaattaatatttctaaaatgctcatactacccaaagcaatctatagatttagtgcaatttctattaaaatactaacggtgttatttatagaaataagaaaaaaatactaaaatttgaatgaaaccacaaaagaccctgaatagccacaccaatactaagaggggaaaacctagaggcatcatattacctgatttcaaaatatacaacaacacgatagtagccaaaataggatggtactgacatgaaaagaaacacatagaccaatggaacggaagagcaagcccagaaataaatacacacatcagcactgattttcgacaacggtcccaagaacaaatattagggaaaagactgtctcatcaatagatggtgctgggtaatttgtatatccagttgtaggagaatgaaactggacatgtatcttttggcatatacaaaactcaactgaaaatggattaaagacttaaatatgagacctgaaactataaaactgctagaagaaaacagagagaaaatacttcttgacattggactgggcaagaatttttttataagacctaaaaagcacaggcaacaaaagcaaaaacaaagaaatgggattacatcaaacttcaaaaccttcagcatacaaaaaagcttcagcatagcaatggaaacaatcagcagagtgaagagaaaccatacagaaagggagaaaatacttgcaactatacatctgacaaggggtaaatatctagaatatctaaggcactcaacccaataacaacaacaaaaataatccaataaaagtgggcaaaagacctgaatagacatttctttaaaaaattaaaacatacaaatgaccaaaagtacatgaaaaatgctcaacatcactaatcaacagggaaatgaaaattaaaaccacagtgagatatcaactcactccagttaaatggctgttatcaaacagacaaaagataagaagtgttggtgaggatgtggagaaaagggaaaacatgtactgtttgtgggtatgtaaattagtatagtcattgtggaaaacattttgggagttcctcaaaaaattaagaatagaactactatatgatccagtaatccaactactgggtacctatctgtagaaaatgaaatcagtatgttgaagagatatctgcaccacaatgtttcttgcagcactattcacaatatccaagatatgaaatcaacctaagtatccagtaatgaatgaataaagaaaatatggtacatataaaaacaatgaaatactacttggccagaaaaaataatttgttttcatttgcaacaacatggataatactgaagacaactgtgttaagtgaaacaagttagatacaaaaggaaaaatactacataatctcactcatatatggaaccttaagaagttgatcttacagaagtagtgaatagtgaaccatgattacctgagactgtgaaggatagggaaaaggatgggatgtaaaggacagggaaaaggatgagatggagagaggtgagtcaatggatacaaagttacaattagaaaggaaaaataagccctggtgttttattgcacagtagattgactacagttaacagtaaggtactgtatatctcaaaatagctagaaaagattattttaaatgtggccaccacagagatgataaatgtttgaggtgacagatttgctaattactatgatttgatcattacacaatgtatatatgcattgaaacatatcattgtgccccataagtacaattattttgtgtcattaaaattttttaaaagaaattaactataaatatgaagacacaaataggttaaaatgatagaaaaaacataccatgcaaacactaaacatagaaaactgatgtgagtatattattttcacacaatgtttatttcagtgcaaataatattaacagagatgaaaataaaaaatactagcagggacaaagtggtcagctcatgaacagagaataagtcttaagcattatgcataataacagaactttaagagaaaaaaaataactagaaggaaagataaaatcactattatattcagagattaaacacctctatctttaaataactgacttaaaaagtagaaaaaaatagtaagaatatagaaaatttgcacaacattatcaataagcttgacctaattgaaatttagagaaaattaccagtcaaatatacatttgtttagtgcacagaacatttaccaaactatactatattctgggccagttctaaattactcgagtgaaatacgttatagaaagggaaattaaaacttgtttttaactaaatttttaaatgaaaacaaaaataaaactaatcaaatgtgagggatggtaggcaccttatagcactaagcatctatattataaaagaataaagatctcaaaacaatgacctcagctttcatcttaagaaactgtaaaaaggggaaaattatacctaaagtaaggacaaagaggcaataataaagattagaattaaagttggtgaactacaaaatagaaaaacaatagagaatatcaataaaaccaaaatatgattctttgaaaaattcaataaaattcataaacttctactcaaagtgatcaagaacaaatgttagaagaaaaaaaaaactccataagaaaaattttaaaagtgatggtactacagattttatagataataaaagggaaaaaattaaaaagttgtgccaataatttgagcaatttaggtgaaatgggtaaattcttttaaaaacataaactactaaacctcactcaagaagaattggataactcaaatagctcatatctatcaaataaattgaatttttagttaacaaccttcccactatgagaattctaggcccagttggctttatttgctaattctaccaagcatttaaggaagaaattataccaattctatgaaaaccctttcaaaaaactgaagaggtatgactatgtctcaactcactctgtgaagctagcgttatcctgataataaaaacaaaacacattgtaagaaaagaaaccatgggaaaatatcccacataaacatagatgcaagaagttttattagcaaaataaatccaacaatacataaaaacgataacacaaagtgaccaagttggggtttactagtttaatatttgaaaaataaagtaataactgaaaaacatatctaatgagctgaataaattcaacacaaacttttgacaaaatacaatatctattcatgactctaaaaaataagctctcagcaaactaggtatagaaaacaacttcctaaacttgatgaagcatatctatggaaaatctacaactatcatacataatcctgagagactgaacatttttttctaaaatcaggaacaagacaaagaagtccactcccaccacctgtattcaacattttactggtagttctaactagttcagtcaggcaagataaagaattatttctttttataaagtatccagattggaaaggaagaaatatttgctgacagcatgatcacctatgtagaaaaccataagcaatctacaaaaagatattagaattaattgagtttactattaacataaaaatcatttgtatatctatatataagaaatcaatgtttacaaattgaaattttaaaaatgtataatttagagtagcatcacaaaatatgaaatactttaggagtaaacctgagaaaagatgtgtaagatcttcacactgaaaattataaaacattgataaaagaaattaagatctaaatcaatgaatagatatattttgttcaagggttagaatacttaatattatgatttcgattcaccgtgtatttatctttaggtccattgtaatcctaactgacaccaaaagcccagcagcaatgttgtagaatattataagcagccactaaaagtcctacagaaatgcaaaggacataaaatgcccccaaaaattgacaaatgggatctaattcaactaaagagcttctgcacagcaaaagaaaccaccatcagagtgaacaggcaacccacacaatgggaaaaaatttttgcaatctactcatctgacaaagggctaatatccagaatctacaaagaaatcaaacatatttacaagaaaaaaacaaacaaccccaataaaaagtgggcgaaggatatgaacagacacttctcaaaagaagacatttatgcagccaacagacacatgaaaaaatgctcatcatcactggccatcagagaaatgcaaatcaaaaccacaatgagataccatctcacgccagttagaatggtgatcattaaaaagtcaggaaacaacaggtgctggagaggatgtggagaaataggaacacttttacactgttggtgggactgtaaactagttcaaccattgtggaagagagtgtggcaattcctaaaggatctagaactagaaataccatttgacccggccatcccattactgggtatatacccaaaggattataaatcatgctgctataaagacacatgcacacgtatgtttattgcggcactattcacaatagctaagacttggaaccaacccaaatgtccatcaatgatagactggattaagaaaatgtggcatatatacaccatggaatactatgcagccataaaaaaggatgagttcatgtcctttgtagggacatggatgaagctggaaaccatcattctcagcaaactatcgcaaggacaaaaaaccaaacaccacatgttctcactcataggtgggaactgaacaatgagaacgcttggacacaggaaggggaacaacacacaccagggcctgttgggtgggggaggagggaggcatagcattgggagatatacctaatgtaaatgacgagttaatgggtgcagcacaccaacatggcacatgtatacatatgtaacaaacctgcatgttgtgaacatgtaccctagaacttaaagtgtaatttaaaaaaaaaactaagcaaaataaactaaaaaatgcaaaaaaataaataaataaaaagaaaaagaaaaataaaataagattttttatagagctagaataatcaagacttacagtactgacatgaagatagataaatagataagtggaacaaaataaggaattaataaatagatccacacatatatggacaattgactttcaacatacctattagaaacgccaaaattaaaaacacttactacaccaagtgttagtgacagtgatactatgaaggaaaaagaaaaactagaagtctcatactctcctagtgggaatatgaaatagaacaaccactttgaaaagctgtttggcagtttcttaaagcactaagcataaacctaccatatgatacaatcattctcctcctagcaattttcccaaaagaaatgaaaacatatttctagacagactagttaatgtttataccagattagatagatgattgctagagagatgatagatagatctacatgcacatacacattttaactcaaaactggaaataacccaaatggccatccacaggtaaatagataaacaaattttggcataactatacaatataataccactgagaaatgaaaatgaactatttatattagcaacaacatggatgtttctcaaataattattctaagtgaaagaggacagattcagagtgtatattgtatttttccatttgcatgaaattcttttaaaaaatgcaacattatctacaataactgatcaatgtgtaataacaaatcaatggttgcccgtgaattgggaactagggtgactgggaagagtagggaggaggaatttttgaaaaagaagaaaacaaggagaaaaagttataacattaattctcatgatctaagaaaataatttcttaaatggagaaaaataaagcagaaatgaaatttgaaaattactattaaaattgtgctttgatttgaaaagtcttgagtgtttagcagttttaagtccagctatttgtctttgtgcttaatagatgagaaaatagtgccttccttcaatttatcttaaatttagtgctgatcaactttgagaagcatccttgtgttcctagattataagaaatggcatggagtcatggttaacctgaaatttactgactgtatagtttaacataaatataaaggcagaaaaacatctaacaactagcaagaagtacatgtgaagaggtcatacctcattatacctctctcaaacagctgttacaaaactctctcaatcagtctattagttacagagagaacagctgtaaattcacaagagtaaatcttggtaagtatttaccacacagatgtcagactagctacactggaagagctgatttcactgagcaattagcctatttagtccaattggttgtagaatggttaacagagtttacgtagcatcacacaccaatagcatcactagtagcctttaaaagtgaggctaatgaatagtttaccacagtaacaatgctgagcatgccctacctcacagtgccaaaagaaaaagaaaaatcatccatcagctcactgccagctaccagtaacagcatctgtgaaggaagacttctgctcctttggagaaaaaaaatccagaaaaagtaaaaatgtaagcattctctagggagctttgcactaatgagccagtgaaattaagccccaaacagtcccgggatactgcccatgagctgcaatggaagttggatggatttatagctgctgagtgaggaaatggtttggaagaattacacagcaaattggcctagatcagctgggcacaaaagtctgaaaaaaaaaatataaaaccacagatggagtcctccatgtagaaactctaagacctggccaattttcagccatctgaattcagcctccttggtttatagactcattttattcaatcagtgcttcggcactggtgagaacgtttctctgaattgttgatctcatcttccacaaagggaagagaccctttccatggccatggggacagacagaactttattgctaatgctgcagttaaaactaggcacaagctagacgctggttccttagatttgccatgcaagagtttgctgtcagtctatattagactttctcctgtatgaaatttttgtctttaaatttttgaaattcaagcacagtaagaaatacattttatatcatatacagtgtctactcatatagaaatgattttcaaaatatttaataaccactgtgtaatgggcatgaatctattagaatagggcattaaccaaaaagaacaaggtatcaaccacatacgactatataaccaccatatagatgctgattggctaaattataatgaaacagaagttttagtaccattcacattatgaacaatgtattcatatgttttattattcttttttttggtttacatgctgatcatgatctattaatttgctattaaattgctttcatgatcagctaatgcatcatgacctataattacaaaatcatttctcttaactatttggtcttttttttgtgtgtatgagtctctgctgattccagggccacctggactttattttatttattttttatttattatactttaagttctggaatacatgtgcaggacgtgcagatttgttacataggtatatgcgtaagttacacataaaatttaccatttttagtgtacacttcagtggcattaagtgcattcacagtgttgtacagccatcatcaccatctatctccagcacttcttcattttccctaactgaaactccatacctgctaaacaataactccccatttccctcttcctccagtccctgacaacccccattctactttctgtgtctatgaacttggcaactcttggtttctgtggttcatttttaatgcataatgtttctaagaaataggacaataaaaacacatgtgaagtgaaggaaaggtgaagctggacaagtaatgagagtacaataggacaactatcaaaatgcaaagttctctcatacttacatattacattgttaaacatcttgtagaaatatattaaagaccagtgataaagaaatctactaagctacatgagatactaaaaatgttctatagaatgttatctaagataattgattacataatctttcagaggaaacactaaatgccaacaattttaattctctatttttccttcactgggccaagtgccaatagtttgaactcagcaagaagcagcacatcttagaatagcttttagcaaagaaacagaagcattagaaaatatagcttcctttatcctcagctctactgggcttctaatgactagtatcaaatatgcatatatgctttattatcaacttttgtgattaaaatgtagtttttacttttaaactcatagaacagataataataacatgtggatgaagaacagtatcacagagtctgtttatattactcatagcatatgtttggttctctttctcttctcacaaaaataataatgtgctgtttatagttcacttcttagcagtgtattttttccacttttgagaagaagtcacactataagtgttattaaccatttagactttgttcttaagcatcttgatcctatcttgagatcatgtttgataaaaatgatgagaggggagagtgctaagacgaaagttagagcccttccaaaagggcaaagaacaaatcccctcttaagataagactactatcgaagtctcaccataaccctataagcaatcagaaaatatattcatatatacatttaaaggtgacaaactggccagacacggtggctcacgcctgtaaccccagcactttgggaggccgaggcgggcggatcacgaagtcaggaaatcgagaccatcctggctaacacggtgaaacctcgtctctactaaaaatacaaaaaattagccgggcgtggtggctggcgcctgtagtcccagctactcgggaggctgaggcagaagaatggcatgaacccgggaggcggagcttgcagtgagccgagattgcgccactgcactccagcctgggcgacagagcaagactccgtctcaaaataaaataaaataaaataaaaaataacggtgacaaactaaggatccagaaggtaaattctttatccaagtggtggaatttgggcaaacacagaagtcactggtgttctgatcaagttctttctccttctgggagagtattaatcctcccatttctttgaataaaatcaagtaaatcacattgtccacaaacactgtcatttggaatggtaaatgaataacggacatttttatatgactaataactaacaagatattatataattagttgaaatgacacttaaaagacaaaaatatttgaagtaataaaattagtgatcaagagataatataattagtcatagtaatgaataatatatccactatctatgtgccagatataatgttaatcacttttatgtacaataccacttttaatcttcaccacaaccttaggaagttggtaatattcttggctgagaactctattttcaagtttaaaagttcctgaaggaagaatttatatttgggaccttgctttcagaaaataaatttgacagcttgatgcaatttacatttattaaagggaaactgaaggtaagaaaacttgattcaataatggaaatcagaaaaacaagaaagagatttatttgaacaattgaattagtgttcagggcccaatactgaaggagaaacacctgaaaatatggagcaaatactcaggaaattggcctatgaaaagaatcaggaagtgatttgctacaacagtgaaatctatgatgtttcaaaagtatggaggtcattagcaataatagagctcagaattttagcaaaaaaggagcaaaagcagcaaaaagaaggaatgtttagatagaagagaagcaggataataccaggtacagaaataaatgggagatagcttggagaaggagataggtaggcaactatgtcaaatgcttcagaaagctaaggagaagatagaaggtagacaactatgtcaaatgtttcagaaagctaaggaggacctttatggagaaaagtcctttgctgaccttcaagagaatatttataagtcataggatcaaaaatagtctccacatggggcaaagagaaaaaagataatgagatgccatttatcattcttctagagtaagatactgcaaacacttcaaagatcactgtagtacatgtcagttgtaaagaatgtctaagaggaatctcattttacaatagctacaagaaactacctaggaataaatttaacccaggaggtggactctgcagtgaacactacagaaaactataaaagaaatgaaagatgacacaaataaatagaagatatcccatgttcatgaattggaagaattaatattgttaaaatgtcagtactacccatagcaatctacagattcaatgcaatccttatcaaaatattaatgtcattatttgcagaaataaaagaaaattattctaaaatttgtatggaaccacaaaagagaccaagtatccaaagcaatcctgagcaaaaagaacaaagctgaaggcatcacattacatgacttcaaaatatactgcaaagctatatagtaaccgaaacagcatagtactggtataaaaacagacacaaagaacagagaatccagaaataattcacatatttactgccagtttatttttgacaaaagcaccaagaacataaatgaagaaagaacactctcttcaataaatggatctgggaaaattaagtgtcttatatgcagaaaaatgaaaccaaacccctatctctcaccacatacaaaaatctactcagtgtggattaaagacttaaatgtaagccatgaagctttaaaactactagaagaaagcatcggggtaatgcttaaggacattggttgagccaaagattttatgggtaagacttcaaaaccacaggcaacataagcaaaaatagacaaatggaactatatcaaactaaaatggctctacacagcaaaagaaacaatcaatagaatgatgagataacctatagaatgggagaaaatatttgcaaactattcatccaacaagggtctaatatccagaatatgcaaggacctcaaacaactctacaacaacaaaaaacaaataaaccaacttaaaaatgggcaaaggatctgaatggatctttctcaaaagaagacatacaaatagccaacaagtatacttttaaaagctcaatatcattaatcatcagagaaatgcaagtcaaaaccacagtgagatttcatgtcaccctggttataatgggtattatcaagaaaacaaaaactaattgctggtgacaatgtagagaaagggaactcttacacatcactggtgggaatgtaaaaagtatagccactattgaaaacagtatgaaggttccccaaaaaactgaaaatagagctaccatatgatccagcaatccctctgttgggtattcatccaaaggaaagaaaatcagtatatcaaagagatatatgcacccccatgtttattgcagcactatgcacaaaagccaagatatggaatcaacataaatgtccatcaatgggtgaatggataaagaaaatatggtccatatatgcaatggaatattatacagccacaaaaagaaagaaattctgtcattcacaggcacatggatgagcctggaagacatgttaagtgaaataagtcaggcacagaaggataaatactgcatgttctcactcatatgagggagcaaaaagtgttgagggcatagaagtggagagtagaactgtggttatcaagagactgggaagggtagaggggaggtgatgataagaagaggttaggcaacagatacaaaattactacagctagatcaacaacacagtagggtgactttagttaacaataagctattgtacattttcaaatagctagaagagaggattttgaatgttcccaacagaaagacaggataaatgtttgaggcaatgaatataataattacttttatttgatcattacacattgtatatatgtattggaatatcactctatattccataaatatgtgcaattattatatggtaacaaaaagaaaaaattacttagaaaaaaaggaatcctcagaggaattcactgggttggttatttttagtgtcagagagctccatgggtgcattgttcaatactgcaagcaatataatttaaaactcctagctgtctcttaataacagtttctagacaatgggaaaaaactgttctgtttttaaagaatgaatagcataaacaaaataggtgtttaatattttgttcctgtggagcatagatctgaccaatactttatccaaggaatacaaaggataaataagacaaatttagaaaaataaaagatatattaaatgactggcaatacttactagtgagcatgcctgctgtttctgcttgaaagccaaagtactattagttcaaactctctgactagggaaaagctgccttggaattctaagtgtaccatgcaatagaatagaaaatgtaaaagagaaatcattgatggcaatgttataaaattaactctctagttacacaaaacaatgtctggtttcatttagggtagatagattttatccagattctctaaccaactttgttctcagctttaagcactgatgctctattccttctatatacactaaacaagaagtttctatgattaagagcaatatactacaacaataattgtacagcttatggattaaaaatagtctaaatccccctttagcatatatattaacagactcccttatgctgacataatacttgaacataaacatcattttctctaaaattgtatccaacatgctattagataactatagttcattgatttatttaaattaatatttttattattttctaaagtcagaagcataataacttcttctatggctagttaaatgaattattgagaactttgctattatacatcactgaaataacaaaaatatagtacatacttcataataaaatggcacatgtatacatatgtaactaacctgcacgttgtgcacatgtaccctaaaacttaaagtataattttaaaaaaatgacaatagctataatttatatatcactccatatgtgccaagtgtttactcatcttacatatgttaatgcctttaacattcatagtaagcctacatgaaaagcattattaatcccattattattactcagcagactgaggagagaaatagtacttaattcagtgcatttgttcaaagattcctagtcaaaattcttatcttcaacagacagtgtagattcttgtgagacctggagtatcagttcacagttctcattcaagtcaagacaataatataatggcttcctatactttaaaagaacttcaaggctcatatttctcttttataagtcttcaaaatttaacaagcaattgacattagtgtccatttcactattactgttgttaacattattatgtctatctttaaatatatgtcactcattataaacatatatgtcaagaacttgccataaatgaagacattctggtttatgctgctttctcagcaattcaaattcaaggagacttgaattagctcagcaagcactctctccttgatcatcttcaagagaaaggcaaaataagagtacttcaactagctcctactgacagacaagtatgtgctaatgcacccaggaaatggattaggtaaagttcaaagcagacaattgagttaggaacttcattttgtattacaatgattctgggtgacatgcatacagtttatcaacactgttgagtccagttaagtttctatgaaacaagtttctacagcactctgtggaattattacctggaataaattctaacacctttgaagcactttctggctcccattattttaagcactttatacccattatctcatttaaacctgacattaaccctttacagctatacctgctattattactacttttcaaatgaggaaagtaaggcacacagaagttaggtaatttacctaacatacacacctcataatcaagagaatcatgacccaaaataagaaaatttcagaattccaatggtatctggaaagtcacctataccatttctatagtatttatacttctacataaaaataatcaaacatactctaaaacagcaaagcaagctttgctatacttattcataatgaacaacaagcttaaaaccataattagtatacagtatgaatgttaacagtattcctagcccaaagttaacaactctattttatctgtctagaaaagggtatatgtctggtatttacaagtaataaatataacatatattataatcaaattttttaggattatttaataattatgtttaaaataaatgacatctgaagaaatgctttctaatacatggcacaatatttactccctaaattgttatttttcaaaatatattagcagttggcacttctacaaactggtacctgatagcaattaagacctgtgccacacaccagtgagattctgtacattacctcattcgtgatccaatttttttaaattcaaaagcccaaatttcaataaatattaacatcatgccatactatatttacaatatatttatatttttcattgtaaacaaaaatgcacttaaagtacattttgaatttttgccaagtaaatgttttcaaaagattcattgtccattgcccaaatgttaaactctggtaacactaattaatatagtggcagatatgatcatagtaacaccatggctgtgttaagtaattcctttgtgcagggtatgttcctcaagatgccccaaacaatcctcttttgaatttccagaatgaatatatacctgcagaaacaggacctatatttagtagattaatgtggaaatggcaacttatttaattgtaacttctaagaatatagagatatcaataactggaactcactaatacatcttaatatgatgatattctattcctagagccctgagctgagatgataagatttcaccctaaatttctgatggtttcatcttgatgaaattaacaaattaaactaataaatcaaattgtttattatgtgactcagaaacacataacactaactacaaacatatctcaccttagtccctacaatcaaaacacagagagaaaataatggaaggtaacaacaaactattaagatttgttacttgagtgtgagggatggagagggtaaagaacataactagtcttccccacattgtgttgtgtctttgcagaggacatgtatgatttttacttttgtattttatatgcttatataaatgtataccagttagaaaaattgcatatgatattgtttggctatgtccccactgaaatctcatcttgaattcccaggtgttgtgggaggcacccagtgaaaggtaactgaatcatggggtcaggtctttcccatactcttcttgtgataactaatgagtctcacgagatctgatgtattttaagggggagtttccctgcacaagctctcttctcttgtctgcctccatgtaatatgtgcctttcaccttcttgcatgattgagagggctctccaaccacacggaactgtaagtccaagtctttctttataaatttcccagtcttgggtatgtctttatcagcagtgtgaaaacagactaataccataaattgataccggtagagtggggcactgctgaacagatacccaaaaatgtggaagtgactttggaactgggtaacagcacggggtagaattgtttggaggggtcagaagaagacagaaaaatgtgggaaagtttggaacttcctagagacttgttgaatggctttgtccaaaatgctgatagcaatatagacaataaagtccaggctgaggtggtctcagatggagatgaggaacttgttgggaactggagcaaaggtgatgcttgttatgttttagcaaagggactggtggcattttgcccctgccctagagatttgtggaactttgaacttgagagagatgatttagggtaactggtggaagaaaatgctaagcagcaaagccttcaagaggtgacttgggtgctgttaaaggcattcagttttataagggaagcagagcataaaagtttgcaaaatttgtagcctgataatgcgatagaaaagaaaatcccattctctgaggagaaattcaagccagctgcagaaatttccataagtaacaaggagccaaatgttaatccccaaaacaatggcgaaaatatctccagggcatgtcagacgtcttcatagcaggacctcccattacaggccaggaggtctaggaggaaaaagtggttttgtgggctgggcccaggttcctcatgctgtgtgcagcctagggacttggtgtactgtgtcccagctgctccagccgtggctgaaatgcgccaatgtaaagctcaggccatggtttcagagggtgcaagcctcaagccttggcaacttccatgtggtgttgagcctgagaatgcacagacgtcaagaattgaagtttgggaacctctgcctagatttcagaagatgtacggaagtgcctggatgtccaggcagaggtttactgctgggctggggctcttatggagaacctctgctagggcagtgtgggagggaaacatgaggtcagaacccccacacagagtccctactggggcaccacctaatggagctgtgagatgagggccaccatcctccataccctagaatggtagatccactgataacttgcactgtgcacctggaaaagtcacagacactcaacactagcccatgaaagcagccaggaaggaggctgtaccttgcaaagccacaggagtggagcttcccaagaccatgggaacccacctcttgcatcggcgtgacctggatatgagacatggagtcaaaggagatcattttggagctttaagatttgaccgccccactggatttcggacttgcatggggcctgtagcccctttgttttggccaatttctcacatttggaatggctatatttacccaatgcctgtaaccccattgtatctaggaagtaactaacttgcttttgattttacaggctcataggcagaagggacttgccttgtctcagatgagaacttggactatggatatctgagttaatgctgaaattagttaagactttggaggactattgggaaggcaagattggttttcaaatgaaaaaggatgtgagacttggaaggggccaggggcagaatgatatggtttgtctgtgttcccactgaaatctcatcttgaattcccacgttgtgggagggacccagtgaaaggtaattgaatcatggaggcaggtctttcccatgctgttcttgtgacagtgaatgagtctcatgagatctgatgatattataagggtgagtttccctgcacaagctctcttctcttgtctgccaccatgtgagacatgcctttcaccttctgccatgattatgaggcctccgcaccaaatggtcaataaacctcttttctgtaagtccaataaaccttttttctttgtaaatttcccagtctcgggtatgtctttatcagcagcatgaaaatggactaatacagtacataattgtacatgtgtgtatgtggtacatcccccacctcatagaaaatacctgtagtaactccatgggaaaactaaccttaaaatatgattaggatttagataagctgatgagcaaaacaaggtgtgaggaaaatggaggtagaaatgagaaaaaagtcatgtagtttagcaggaagttacggttgggtccatgtttttaaaagcctttaagtttagacagaaaagcttagcttttcaggatgaaagtaacattgaaggacttggtctgaaagtagtaatgcaagatgggttacagaagggaaagactggaattaacgagatcaatgttgtcacagtagccttatatctttgcacagtgcctgcagcgcatacggaatcagcaaatgtttattaaatgcaggcacaaatgaattaacaactatatcaaatctgttactaattgtgttatctaaattgtattattaaatgtattatctattacatctattacataaaggtgactgctgtaataacacctaagcgaatgtgactcatctattgtccataaccaccatttctaagtctagaaatagacttttttttctaagtctagaaatagatgagtcacagatgacacccaagtttgaagtatgtgaaagcacatagcttgaaagtgtgtgtgcgtgcatgtgcacgtgtgtgcataaaacaatgcctataaatgagcagaaagcatagggttcaacgtgcaatctctaaagtcaggcttcctggatcatatcacagccttaatactcactgattagctaacctcaggcaaaattattgagccattatgaacctcagttttctcatatttaaaatagttataaagcatcttccttatatttaggatgacattaaaacagtacttattgtgtaagtttaattgggaaaataaataaactgttttaaaaatagtgagtatcaataaatgttagttattattcttgagttttgaactttactttttcactaagttaccttcctgctgagattgttctttccaccagatgtggttcagaagtagttgaccaagtcttagggcatttgtcataataaaaatatgtcatacatagctctttactgaaagaacagaacaggcactgattattaactaatccatgattccaaaagaatcatgatttagagcatttttaatttaaaaaaaagcattacccctacattttgactaatgatactactgggttttcttccagactttatgtcttagtttttttactataagggaaaaccaatttttacttatggttgagggtagaaaagcttattctaaagtttccttgtgaacctacttcaccctgttgtcttcaatatgaagaatcaagtccttctcagctttaacagccacccctaacatcgaaagggaaatctcaatacctccatgcacagtgatgtgtttgagaccatcaatgtgccaacatttccaggtggtgatttctaatttctaattaggcaacttcctaaccccacaatgttttctgaagacatagctgaccacccctccacatctgccagggaatcataggagttgttaaagtccttttgggaaccacatttccttctctcatgatctttgccatctgaatgaagtcttcccttgtgtaaaaataaatacaagtttcctgttactattcctgtataatttacagttttcccaaatactgataaatgcataccataacatttttcttcaaaataaaccatgcccaacattttaagaaattctgcctctatggtttttgatatatcaaacttaaacccagcttcctaaaatgagttatactctttctctaatgggggaaaattgtttttaagaaggcttagccattactttgttttttttttttaaggaatatctgtaactttagatcatgactcttgtgtttttaagtatagatatttccacttattaagtacacttaaagagattaaatgtagccttaaataaagaagacaatatgaggaaaagcagtgctggcaattgagggcagatcagacttattgttttacacaatgatttctattacttaaaggtgactgctgtaataacatccaagtattaataaagtttaaataatgtggcagaaatagctatctatctcgcaaagatttatagtcttttccatgtttgagagttgttgctagaaagcagctgcccagatagagactacatttcccagcttcccttgtgtcttggtggggtcatgtgattaatttcaggccagtagaataaaggtaaaagtgaagtgttgcacttccaggcttgggtcataagaatctgctgtacaatcctcagtgatctctttcttcctcccattttggcagttggaagtacttgcccaaggtgaccttataaatcatgtgtggaagaaaaaagagttcagtcaatttgtgtttttgaagatcaggtagaactgagaccaacctaccaccattcctgccactgccaagtgggtgggaataaactgtttacattgggttaatctatcgagaattgatgattttttttttctttacagaagctagagtaatcttaattaatacatgtagacaaatcactacacagtaaagaaaaactatattaatgttatataacttatatctaaataaaaataagcgttccttaaaaagggaagtttttaaacggcaatgtccacagagtaacacacaaatattagttattagtagtaataatgcatatgagcattatttttataatttggctaacatttattgagtgcttacaatgttcaattcttcatgtattatcacatttaattcagaaaagccctacagttgaagaatataaagcacagagatattaagttgcccaagattatatagtattagttggcagagaagggatttaaaatactccatatattggaagattattgtgtgattagtgaattaaagaaactattaagaaaccagcaagagaacggcaaacttgtaagttcacggttcattaaattaggaagtttttatttgcaaggcatgatgacattcaaagactgtgggaaatagaaatacgtaaaggacatgaactatgacacaagcatattaaaatctagttgggaacatgagccatatacaaaaataaccactatatatctgtatatagtaagtatcctataatattgcagagtattgtgagactttaggtgaaaagggtcacttttagcagggagtcagagcatactcttcgtagaaaattacaattaatattggccctgcctgaatgggtagaattcaataggcagaagcaattaaaagccctttcaagtggacacataaatatctataatcaagaacaggaaacggattaacaaagaggtagaaagacaatttgggatcagttgattgtggatcttgaatatcaagctaaggttttgactttatgaagcagataacagaagtcattagcagagttatacactaggtagataaatctaatgatcaagtatagattgaactagtttataatgagactgaaaagccctatcctctttcccctatgtggtatattgtaagagatgtattgtggctatgtgattaatgatagtgagaaggcctactcaaaaatctcatggggccaaaactatgtgacacttagcagcatgatgcaacctggcctgggagtttccaggagacaagaccacctcagcacagatgcaattcctagaaaccttaaaacaaagcttactcttacaagaataacttaaactccctctgaaggaaactcctagtaactgacctggactgaagacataataagaaagggggaaagatcccttaaactctgggaatggtgtctccaagtcaagaccctcccagtcagatggccatctgatgtcctgattgtatctggcccatgccattgctctgctcccaacatctgccttgtaaaagtactgccagaataaactgcttcagggtcagatggtgtctgagattcatcattgacgtgaataggactaaacaggagaactcactcctgaggaagctagtgacctaggacaacctaagacccccaaacatgacatcccccgaacatgaacaataaaattatatatgttcccatcttttttttttttttttggacacagagtctcactctgtaacccaggctggagcgcagtggcacaatcttagctcactacaacctctgactccaggattcaagtgattctcctacctcagcctcatgagtagctgggattacaggcgccccctgccacgcccggataacttttgtatttttagtagggacagggttttaccatgttggtcaggctggtcttgaactgctgacctcaggtgatccacccacctcagcctctcaaaatgctgggattacaggcatgagccaccacgcccagccaacttttcttttcaataaatgtttactgaagacagttcagaaaatacaggtaaatataaaataaaaaatatcctcttgtttgctattatctccttccctaattttcccttgaaaatataaacaaaaaatgctttgcaaaaatagtttcaaacaatacttaaagttgtgtaacccactgtttaaactctatcatcatcatgattgtgtagcattccatcaattggctagatcataatatatctaaaaatgcccgattactagaaaattagattgtatttatgtttactatcattatatgacaaatagcccatttttaaactttgacaattttatgttcaaaaataatctcattgctttaatttgcactccttggattatcagtagtaagttgagctttttccatacttttcatagtatgtcttcctagtgaattgcctactcatgtatctgctgcttataaaattatgtatctttttcttacttattttttgaagacttaatctatatagtaagaatattaacttttttctgtcatatatactgcaaaacatcttagccatttgcctctaaattaatttttggcatttctgtcatacaagatctctcaatattcagataagcaaatctaccaattctctcttttaggattttttcctttctaaaagattttcccaataacaaaagtatggtgaatattagcctgcaatttgtacaagtattttaattattgatttgtatttttaacattcctcctccaagctaaaactatatattcttcatgtttatttccatcaacaccaattttactggctgaaactactagtgtaatatagaaattaagaatatggactctacagtcatacttcctgagttaaattctggttttacttactagctgtgactctgagaaaattattttactttttggtgtctcagtcttttcatctacaaaatgcaggtaagaaatgtacctatctcatactgttgtgaagcttagacaaattaaatcacataaagtatataatacactctcaataggagttacttttattattattgagacattcatttgcaatacaccaacaaatccaggccttgtgctaaatatcggagcacatcaatatagtaacagttgagcaatctgtcctacagaagtttacattcgagaaaaggcacacactgtatgcaaacaataagcagaatcattgcagttgtgactatttcaataagggaaataaatgcagtaataatatctcttttgcagtagagagccaaagagcttcaccaagagaaatggggaaagaggcagccagctgagaaatttgaagaagagcatttgtgccagagggagtaaaaagtgctaggcctcatggtgagggaaggtattggtatatttaatcaacataaagaaaactaactagagagctatagtgagcaagctagggaatggggcaagacgaagttgtggaggtaacaggagccccatgattcagggccttgtgaaccaacttaaggagttgagatttattctaagttaaatgggcagacattgaaggatcttaaccagggaacggtgtggttaaactctctctgaatctggtcaagatctgattcaggtttttaaaaggctgtatgggctgcttgaggaagaacagtttagaaaagggcaagagtaggagcaagaaacacatttagaaggtggggtacacagaatagtaccccttgcctataaagatttcctcactgtgattccaaggacctgtgagtatgttacctcacatgccaaaagggactttgcagatatttttcagcaaaggatcttgagatggaagattattctggattatctcagtgggtccaatgtaatcacaaggactcttataagagcaaaataggagggtcagagtccgaaaaggcaatatgacagtggaagcagagaaagagattgaaagatgctatgctgctggctttgaagatgaagggtgaagccacaagccaagtaatgtcagtggcttctaaaagctaaaaaggacaaatagatttttccctagagcctccagaaggaacaaagccctgctaacatcttgattgcagcccaattcattttgaatctctgaccttcagaaatgtaagataattaacttgtgttgttctaagtcacctagtgtgtggtaatttgttacagcagcaatagaaaatacagaagagttttgcattaagtaattcaggtgaaatatgttactatttcatggagtagagtagtcatggcagaaatagtagagaggaggacatatatctactatatattttctaggaagataggcattggattggatctataaattttaacttgaacaggtaggtagataatgaaaacatttattaaactgggtagattgtagagtaaaccagtttggcatgggaggaaaaaagaaaatcaagaattatgttttgaaagtgttaagtttcagatgcctattagacattcaaaaggaaataaaaagtaggcaattgaggctgggcgtggtggctcacgcctgtaatcccagcactttgggaggccgagctgggcggatcacgaggtcaggtgatcgagaccatcctgtgaatggtgaaaccccgtctctactaaaaatacaaaaaattagctgggcatggtggtgggcacctgtagtctcagctactcgggaggctgaggcgggagaatggcgtgaacccaggaggtggagcttgcagtgagccgagatcgtgccactgcactccagcctgggagacagagcaagactccgtctaaaaaaaaaaaaaaagtaggcaattgaatctatttattgggggctcaatataaaggtaagagttggagacatgaatttgagagacagaatttgagaatcgcagtatttagatggcatttacagctagaggctagataaaattttttctctatgcactaaatgtttattgtgcatctgcttttctaaaagctgggcatacaacagtgaacaagacaaaattgtcgctgttctcatggagcttctattctagtggaaggagatagataataaaccaaggggataaattataatataggaagggagaagcactatagggaaaataaaaaaaagatggtgtgggtctcagagctattttattaattttatttttaaacttttaggcttgagggtgcatgtgaacatctgatacataggtaaactcatgtcatgggggtttgttgtacagattatttcatactcaggtattaaacctagttcccaatagttgtcttttcctgctcctctccctcctctcaccctccaccatcaagtagaccccagtgtctgttgctcccttctttgtattcatgagttctcatcattagctcccacttgtaagtggaaacatgcaatatttggttttctgttcctgtgctagtttgctaaggataatagactccagctccatccatgttcctgcaaaagacatgatctttttctttttatggctgcatagtattccatggtgtatatgtaccacattttctttatccagctgtcattgatgggcatttaggttgattccatgtctttgctgttttgaatagtgctgcaatgaacatttgcatgcatgtgtctttattgtagaataatttatattcccctgagtatatacccagtaatggaattgctgggtcaaatggtagttctgctttcagctctttgaggcatcaccatactgctttcaacaatggttgaactaatttacactcccaccaacagtatttaagcgttcctagggctattttaagtagagcattgggataagttatttttcagaaattgacaagatgtattagagtttagggtaaagaagcatccttagactgggagtcagagaagtctttattgaggaggtatttaagctgagacttgaatgacaaggaggcagccatacttattgctggatttattgtccttctcacatctgactgaacacttggaggacaaagatattgtctaactttttttgtatgcatagggtctggcactaagacagccagattattatatatattgtaatagtatgcctttgagaaattgtaagtaaataataagtatttactgtctaccaggttggaagcccaaaagaaataaaagaattttgttgctacttccatagctcgcagtctatttgaagagactacacataagcacagtaattgagatggcaatatatgaagcagcatgacatgtactgctatcttatatgctacatgaggacatcctgatatagtgactggaaagtgggcttatattaagaagacaagattgttaaacctacccttgtgtgtaatcagatggggaatcttcacaagtaacttaacttctatgtatttatttcctaatctgtaaataaaaataaacatattttcctaacctaccttcatgtgacaaggcctagtctgtcacaaagcaaaaagaataataatcatagttattattattatagtgaaactaatacatattaaaataatacatcctaattattattaggataatatttaagtgtcaaaatatgccatagagatatagactatatgataaggaacttatatggctttgacttactggaaatcttacacatacatgatcaattcctagacaagaattttttctcccaagagagagctttttattttttcaactccaaaggttatcttaaagttagtgttttaaagaggttctttttgtgttaagtggcagctaggtacgccctgggtcttaaagacagatgccatatctcttcccaattctgatgcagattagtgctgcacagagcagccataaaaaggccacaatgagtgaattttagcaaaaagcaataacagtgatatgtaaaaatggccaaaataaacataaatcagctacctcaaaatgacatattgacacaattcagtggtctcctcaaccaacctctacctaccttcaggcattttttttccccaagtgctccaaacctcattctcagaaactttaaatcacagggatggctctagggagcctctgctattcagttaccttcactccttgcttccatcatccttcagcaacacccaaggctgccaactagccaaagcagactctccccagtgtccaacatcagctgtatcattcctcctcataattcagagcaggatgcctgccatcctcaccgggagaacagaatccacatctccctctattgggactttcagctgatcgacttggatcatttttctaaagcctcgactttctctttaccctccttactcttcattaaatcttcaactcattctgtctgttctatattgtcacgtctgtctttttctttatcaaatagaatctgtcaaaccccattctataaaaattgttcacttcagtgcttattttttttaacctacactgaataggtaaatgtgccacaataattatttgcttgggataagtaacataacttctcaggtcctcaatcttctcatcagtaaaattgggatgaaatggactacaattagtggattttaaacttttgttaaatactgagattccctacagcctaggtgacagatcgagaccctgtctcaaaaaaatacacacacacacacacacacacacacacacacacactaggatccttcaagtgctattgtatacccatgtatagagcaaagccctccaatggagcaccactctgaggcaggtggtaatggaactctggagctctcccacgtgatgcagcatcactcttccttactggggtccctgagatagttccaactcacaaaacccaaaggaacacatgatagtcttaataagctgcattctaactttaatatccaaagactctattcaaaatgcttgtatagtgagagactgagtagcaaggaagctataattttgttgtatgtcaacttttattttattgaaatgcccataagcagtttaattcatttaattccctacaataatgctattatgcttatggctaccaatgaaaagactgagactcagagagtaaaacttaaatttccatattttataaaaggctgtaaggcgattcaaacacttgcttcttccattgttgcacattacctctagacccgatcatgacttcctaacctagtccccatccagccattattactgattaattagattcccttccatattttattgtgaatatgtttagtatatatcacctactgttgatgtttatatttacttgtctagtaaaaatagaacaataggatggagtaggtttgtgtagagcactaagaaataataatttgacttaaagagagaaacagagaaggtagcattgataaattgatagttaaatgttttcaaaatctgatacttacttctaaatgtactataaaaatcgtgactacccagaaacagcattacttcaaagaatgtatttttaattcctataatcatatccaaagcagttcatagcatgcactgaatttctcacttttaaaaagtctttccaatgataaaatgtgaagataagcaaatgtaatatcttataatcagctgaattccatatccttagaatacctcttatgcaaatctaaatatctctggataattacagaaatagtattaattgtggaaaacaggctaggatgtgaagtcaaaaacttgttagatactgcattatcattccctatttatcagcttatatttttcctcagattctatattatctttgctcgtttttcctctggcaggtgttcaagggtgaattatgcaattaagaatccaaaattccactgcatccagatgcctaatttgctaactattcatttgccaaaaatgcatgtttactatctattacataatgactacagaaacaacttctggtttccatttcatgaattgatactgagaatatgacaaatgtcctggaaggcatttttcagtgcccattcccatgcaattttattaatttcataaatttaccaacatctggggagaaaaactctcccctcaacagttttaagttccaaagtcattgttatttttcttttcaaaatccatggacaagtttgtagaataataatgaaattttagtctctaaattttgttaaacgtttagctgatcttgaaaggagccactctaccttatccagaaacattttttaatatgtttccacaagtctttatagtcattgtgaattcttaaagaaaactgcatttacatcagtttgtcccaccccaacagttaccaatactcctcagtacatcaaagatttcatgacattatagatcaatggtgatgtagtgatggtgaatctatgtcatttacattaacaagacaagtttataaaatggtggtgtggggatggaagggagaggtagttgaaataacaggaaaacaataattaacattgtattgtgttccaaccctaaatctgtctcaacatatccaaaataatgtggtaaatataagttgatgttcactacaatgtctacattcatgtcctctctgatttttacttaactctaataagcagtaatagtgtggtacgtatgtaactatctatctgcctcactctctttttaggaattcccaatattcagaataatatctctcagagtaaggaatataaaaagaagagaaggaggagaaagaaaggaaggagaaagaaaggaaggaaaaaaaggaaggaagaggaaaaaaagaaataaaaaaagataattcgatcttaattatactaccttttgtttcagccctgctaaacaaggcactcattgagtatttgatgactggataaataaatgaaaaaacaaagtgaaaagaactctactggaaaaaggatatgaatttcagtacaagcttttttccccagctagaatactgtaaaactcacctgacctcttaggatttcatatgttaaatgaagaagtgtgactagataaactgcaattctaacactaatgttctatacaattgttttaacaaagaaataagtatatggagattcttattctttgttttgaaaatatttgattacattggacaggtgtatccataatcaatggacagatgtatttattcaccaaactttgagaggatgtctgtaccttccctaattgttggtgggagtggaagctttttttcttgtttgcacacattaggcattcattcaataattagctcctttttactcttttctaaaaactacctacctatagtgttgacacttcatttgataggggtacacacacacacacacacacacacacacacacacacaattatttggagggtgctgaaacatcttattaccatctacactaattgctgtacataacttacttcctctagttaaaaggtaaaatacttcatactgatgattaagtatttgtaatataggttaatgatttgaaaattctcacatttttaccacatggcatctatttttattggttccttttcatagctaatctaggaagaggttagaaaaccaagacacacctacaattaaataaaagttctcttccagaacctaagtaggagttttcatctttagacagcctactgagtgttatcttttaataaactggattgcaagcaaaaaagggaaaaagaaaataagcagggaaggaagagagggaggaagtggtaaagagacagacagacccttagaaacaagagctatttcagagctgtcctaggaaactgtctctgcatcatttggactatgactcatattaacatgaatttgcaagtaagaactctaataaaaacatatttatcctctatccagcacatcttcaagagaacattaattgtaacaatgtataattgactttatggaatttaagtttacagaaaaatgtttttaaaaaatttctgctgtgcctcaaaacttgttccaaaaacttaagaaatgagaatgcttcagacagtttgccaaattttaaatgcattttattcctgtagagtttttagtttataagtcattttcctaggcattatcacctttgagttttacaatctacttctggagtaaactgaaataattagccccactttttagataattacagtttaagtattgaattaattaatttaaatatgagctaagacagaaaaccaattataatataaagccagaaatgcaagaaatgttatgataggcatcatggaaagtctatttttgaatatattttgcaaatgttatttttctcattgattctgaagggttcatttacattaaaagatacaattaatttatgtactaattcaatctgtggctactataggttaaaaaatactcatttttctcttcactgaagatgaaagaacatgaattcaaaatattgagaagtagttctctcacgtctaaatcttgtaacctgagcaccgcaggttcaaaataaatcatctattttgacactcatcaatgcatatgtccattttctatgacattttaaatagcataaaatttggagcagtatccagtagtaaaggaaacaaatgatgttgctttcagtcctgctcctattccaatctactaaaagttcaaaatcacctaaatattctgtcagaatagaaacgcaactgtgaagtatcaaaatgcatagaaagtaaaattgctaccaaactaagaaaacagtaagtagagaaaatgttcattcactgtgcaccttcctggtgttaaatgtcacttcctctgaaggtgtccccatctcttcagacacaggaattatttttttcccatggatttgttccagagttagtttatataaccatgctcctagaacataatatgatggtttttgtttatgtttcctgctttccagagactaggaaatacttaaaactaagccttgacttttgtatttttggtgccagcatactgtctaatatacagtatatgcataatatcacatgtatcaatatgtaaataagtaaatgaatgagtgattcatgttgaaagaaatactaacatattctttaagaagtagacctcaaccaggaaaggaaaaagagtcaagcctctagccaaggtttattttaaaagtgtttcatgtcttcatgattgattattttgactgctcattcattccatatgcattctctacagagttttatcaaacataggaaatactcttttagttatttttttattctctataaataaattaatggctagcatatacattaaaaaatctcatttagaaactttttaaaagaatcttttagttttattcttcatacaccaaaataagtaaaatatcattataatttactctgtttctgttttcttttttttgaaatagggtctcactctgttgtccaggctggagtgcagtggcatgatcatagctcactgcagcctgaaactcctggcctcaagcagtcctcccaccttggcctcccaaaatgctggaattacagccacgagccaccgcacccagccctaacgtttactctgtgatatcaattttaaatgttgtaaaaaaaaattccaaaacctgcatctttggatcaaagccaatgtcagtatactatatttagctgaataaattacaggcacccattaactttgctaagagctcagggtctccaggtaggccacaaataccccttcaatcctgggcaagttactccgtctcggcattgctgtttgcaaatcagtaaaataagtagttgtaccacatagcaggccaggtcctgtcctggtcatcgcattctgcattggtgtaactccttgttaggaatcttagtatgaactctgccatagtttcagcccttgaaacaaccagcaaataaatgtagccttccttccccctccaaacccaccatgttctttaatgtctatatcctatcagtgagaattcagacatgaatgtttaaggaaaatgggaggagagtgcccatagaataatactcacaccagaatctgagataagactcacgcatgatcaaataggaaccacacaccaaaagtctttgtggggagactttaggtaagcccctaagatacccaacaccaacacctggtgtctatagtcttatagaatgccctctttttgagtgtgagtgtgagaccggtgatttgataatagtcagcagaaaacagcaaaagtgacaggatgtcacttcacaattcatgctatgttatataatactgtcttgctaacaaactagctttagattctcccttgtcagctgtgacgaagcaagtagaaatggacactacaggaactgatagtaacctccaggagctgagagaaatctcagtcctaccacttcaaggaaataaattctgccaataacatgaatgagcttagaaacaaattcttacccagttgagcctctgatgagactgcagacccagccaacatgtgagttgcagactggtaagaccctgaagcattgaatccagcaatgccatacctggactcctgacccacagaaaccatgagataataaatgtgtgttgtttaagctgctaaaattatggtaagttgctatatggcaataggtaactaatatagctgtgaaggtaatgttggtctcttcattcccacattttgtatagagtatgtattagtgccatacacttaggcagtaaaaatcatactgacccatttttatctcctttagcaaaataattgtagatatatctattttatttccaaaaaaagtcataatgttttattgtctcagaatactgaaataaagcacatcttagataatgaataaagaatttatgctaaaagaaactggctggttctttggccattccttgcatctagagtttaccaatacttatagtaagaagtcttaaattcatttatttattcactatatatttgatgtactcctgttttataaaaactgcagaaagtgctctgggggattcagagataaataagacatggttactgccccaagaaaaattataactttgtcgcactaagttttgtgaatgtgttgtcaatgcaagagtttaaattgtttgtaatactgtatgtcttaaaggatcacagtttcagaacagaagaaaataaatgcaatgcatcaaagtgaaattgcctatatgagcccatctatgatgtttgtattaaatggtttcagataaattcccatgggaataatattgactcttatggatgggtaatatctcaataaccagatacatggaggagaatattttattggagaaacttaaaggtaagaatgatgggcatattcagagaacaagtgatttgggcttgaaagccatcatggtttattggaaaaagcaaaagtacagaacatagtgtcaattaaaaaataatgagggcctgaactaggctggaatggaaaggaggatccaaacagaaaatgaagacactgcggatgtggaccctagaataagcacagcaactgattgtgtgagacagttgatagagagaaacagaaacgactttgaagtttaaaacctggattaaagggaatagaattatcattaacaacattaggagggttaagaggcagtattggtttgtggggagaaaatagctgggtgtgatacacattggatttaaagggctagtgaaacagggtatttgaggaggagaaaggtaagggcaataagatcaagaatatttggcaataaggaaaccgctaaaactgcactttcagatgagtgttgggtttatgatgggtaaaaaagtaggttagtagaaaaaatggagtcaaacgacaaagcaacaaggatcttgaatgacaacctaagaaaaattaaagggagatgggtgtttctaatgcttttcagggtgcagcaccgtcttactacaagtcaaaagaggagctctagtctaagtattttcaaaatgtgaaaagaaatgttttttgaaagacgccatagaaaaagataaagcacaaattttaaatataatttcattatttttggcacacatgcccctttgaatatagcacatctcttttctcttagggaaaattaatggaataaaaaagacctcctatccctatttaagtcattggatctgtaaaaatggaacataaccaaaactgtgatgaatgaaacaactgatgaaagttcaaaaaaatcaaaagttattttatatatatcctttgagcaattttctgacatactttccatttcttaatacagtaccctgagttgaagcaatgacaactagaagcaggattataacacctatgttttcagttatgaaaagtgagttatttctgatgatgagtgtgagctgccaacaagcacataacaccatgcccactagtcctataatttgcttttgttttagaaaattttcttgttttctgcagtttccattttcagagtacgtgtagcacacaacctgacagtactaccctttaaaaaaatatttccagagcatttaacaaagttctatgcagagaggatgttcaaaacttctaattagttcatctgtgtgtgtgtgtgtgtgtgtgtgtatttgtaaatttgaaattctatatgtgagaaaattgatgtaaaatagctggcaaagtgattgcttaataaatgcttaaaagaaacatgaaatctgagaaatgcagaatgacaaaaactgttgaaataaaagaaaattggggaacagttatcagcttagaatctatgtcattcaaaaatataaagtgttaataccaccacaaagcaaataatttatgaatatttgaatgccaatgtgtcatatgggctttttggctcaggagatactaatttcccagtgaccagagtatctcaccttaaatgcaaagtgtaatcctcagatttgactcacagcaagatgcattatgcatggcccagcctgtgttcctctcatttattcatactctctgaactctgtctctctctctctctctctcactttctctcatttagagctactattaacattttgtacttttttcttgggttttatgatatatatgtaagaaaatgacagaagatcagtaaagaaatactgctttaatttctagaggcaatatttcattacaaatatcagaaaaaaattacactgacaaaatgacctatacagcaaggactgcaggttgttctctactatgcatgccctccttctataataatagaacttcccaatctttagctgggcatataaccacttacaatacaccaagcccattcctttgcaattgcaggtagatatatgattcagttttggtcaaagtgatgccaatagaagtctgatgtgggttgtgcccttaaaaggaagcagtttaccttctccttcccctgcatttttgccatctgggatgatggagatgaggagatcacactaaggggcttgagcaacaagagagaattcttcacacttgaattcttgcagcagagcactagtatcattctagaattttatgagaaagcaataaccttctgtcttgtttaaagaagtattactttggatcttaagtcatgttgctgaacttatagccatgtgattccaaaaagctagtgtatattactgaggaaacaggaggttctctaccattacttgttcctagatatcattttaattttatcttcctttcaaatttttagttctactttgaaaagatgcattatattcaaatcatctcagagccggaaaagggttttttgtaacatttagtctggcgttccctgatgtgtatttaactgaataagcagtagtcatcagtagtcatgaataaaggagatataaataaatggcaataaagtaaaacatgtttagaaaacagctaaaattcattctcttcgtgaagagtcacaatgcatattagcatataaatatatgaatagtcctaaaatagagggaaatatttaacattttattttcctatcaatagaccatagaaacatttttaaaacagtatagattaacctactttgtaactactgctctgtggaacattctttggggaagtttgaatttctagatagtgcataaatcctccatgtgttcaaaaaatgactctttagtccttgcttgaatgccttccaataacagaagtcactacttcaaaagatgatccatttcatctacttctcacttttaaaaataaagacattaatgaagatggatattaattatttctattaaatgtgagaatgtttttgacctcagtaacatttgccacaatgcattgttttatttaccaggttagtaatggcaacagaaagttcaatgatctcattttaaacaacctgtgtactcagcctacctaacatttcaatttcccttcagcagcatttgatcaatcctttttagtgtatcatgtattctacatgtgagagaggaaggaggaaattgaatacatttttctttaactcaataatctgataacacagcaaatatcactgaaataaagtcaattattttctgatgaccaaaacgaccattttgttacttgctgttttgttacaaattcaagaatcgtaaaacaaaagaattctataactaaaatgcccatttagtctttcttcagattccatttcctaatcaataattgttgcctcaacacatggtcataaatccacatgtgtgtaggccacattaaatactcattagtcatggtaataaagtgtggtctatttgaattttaaaaataatatgaacctatgaaaatgggagaatgtatagtagggccaactttctaagtgtacacagtaatacacttggcattagtaactgatggactataaaatgaaatatggttttaccaagattaccaatatttgggagaaaaaatttatttacattatttttgaccaatttttgaatcaaactgttatcttgaccaatacatttgttatcaagttgcttttaatcagatcatttactatcttttcatgaagtcaccaaatacatagttcaagaattttttagagctgcattcaataaatttaacgaatcaaattgattttaatcaaatctcttggccttcaccaacagtagctttcagcattaaattttaaaactttaattagagaattagcagtgattccactgagctctgagtaatatgtaaacttttgaatagccatctgatgactccacatagacagtatgacctgaataccaatatattcttgaataaattaataatgttctagtttattttcccaattataatttcaaattgaatttatttaaatgtcacattagtaagatatttgtgagtattaagtaattatatttaaaactacaaaagtctcaggacacatttggctcctgagctgtctattggacacttataagaatataagaaggtagatattttatagtactgcactgaagtttggctccaaccttgattttaagcctaaatctgcttttaggtttgagtgttagccatggatttgagaagcttgaacagttaaaattctattttaatgccgtatcaggcattattgaactcgtatatgattaatgatcatgtaatggatagattatcatcatttcttatcacaatatgaacaaaaataaaataaaaacagcaaatcacttgcatcaattgttaatacatgaataggtaacttggagaaaatcttatatactttatatattgaacaattatttttcactaatgcaaatttacttttctaagagtaaaatgccacaataatttatatttaatagtgaaaggtgttaatttcacatcagaaaatgatttaaaacagccaaaaagttaaatatatgacagcatatgaatttaataaatatcaagaaaaaacatatcagctagataaatttttaaaatatctttatcttttgtgccaaaaatatttataaaatataaatagtaattaagttagaataatagaagtaatgtcataatgctaatctctgtaggattatttactttataagcattgataagatttaaaaatctttatttcaaatcatctttagcctaaatataaagaacacaaagtacaaaaagaagccttaagagaaaaatgtcctacctcaaaatatctccctcctccatctatttagtggacagtaagcaattattttatatcacaaacaatgcaatagcatgtcttcaagaacattgtagacaataagaatgcagagaagttattgttcctgtgctataatgtcaacaatgtaaactttgtataaaaaaatacttgtactggtatatttatcacagcactactcataatagcaaagatatggaacccacctgtatctaccaatggttgactggatgattggataaatgttatgatccaatggatccaatgaatgattggataaatgctatatatatatgtatatggtatgtatatgtatatgtatatattatatatgtatatataacattttatgtatctagtcatccactgatcaacacaggtttattccatatcttttatatcatatatcaataaatgttataaatgctatatatatgtatacatacacacatatatatacatatacatacatatatacatatatgtatgatacacacacaatggaatactagtctgccataaaaagaataaaatcatgtcttttgcagcaataaggatataactggaggccattatcttaagtgaaataactcacacagaaacaccaaaaccacatgttctgacttataagtggaagctaaataacgtgtacacatgggcatagaggggaaataatagtcatgggagactcagaaaaatgggaatgagatgggggaatgggagatgagaaattacttaatgaatacaatgtatactattcgagtgatggttgcactaaatgcccagacttatgggcttcttgccacttaaatttataccaataaaataaaataaactttgagtacttgatattgtaataatgaaatttaatattaactaaaaatcttatcaaattttagattcattcccatacctcagaatttaattctacgatgaagatatttcacttcggccttggttcagctgaatattttttttaacagcgggccaaatatgtatttagtgaaactttaccaaacatatcagaatttttacaactaaacaagcattttattcatatcaattccaataaatacatattttttctagattttacttttaaaagtttttgaactccattttgtcagaacattgtctttgtagactaacaatttagttttgaattagtgggtcaccctagacaaatgatttaaattatttgagccttcagtttctgtcatggatagtaacatctactttgcagcagtgtaaggatttaattggatcacatatataaggaccttagctcaatgcttggtatgtaaagatttgcaaaaatgagtaattttcactttcttcttccttggtgcctatgcctttaatctttgaaattgctgtcattaacagtttatggaccatacaggaaattaaaataatagaaacacggaaagttggaaagagatggaaactctgagaacatttactctattattttcaacttcttgagtagtaaaattctttcttaaaataaaatcctatatctaaccccaatatataaaactgatcaaatcaaagctactttgattgaagcagagacaaagggccctgaatccaccaattttcttctcctttaccctaagcacagtgggttctagatcacctcactcctatggaatttcagccttttgtaatgaaacaacagaaagtgtgaagcattaaaaatactgtttttctggaagactggctttcccccaaattgtgtgccttgtgcaggtcactaaaactcttcgattaaactctttagcttgttttaatttttaattttttttattttttattacactttaagttctagggtacatgtgcacaacgtgcaggtttgttacatatgtatacatgtgccatgttggtgtgctgcacccattaactcatcgtttacattaggtatatctcctaatgctatccctctcccctcccgctaccccacgacaggccccggtgtgtgatgatcccctttggaaatgagcggtctgaaatattccgttctaaatctaattcattccatctattttctttcttttgtcatcaaacttcttgaagaaaaatatataaataattttatcaaaatttaccaattatggcaacttgtaatttcaaagatggtagcaatgaaatcttccttcacgcttgctcttcttcaatgtgatcttgccactcaatcaagagacagacactaactttcctccccttaagcctaattaccctttcttagatcagtgctgcccttagtaactcacttgtacccaacaccataaagccgcagaatagcactgtatggatttcctagactaaatcaggaacggccatgcaacgtttacctgcttcccttgcaaagctcacctgccagatgttccctctggacactttctctaagaaacaaccctgccaccacgttgtggtgaacccaagccagaagagaaatcacttgcaggtgccctggtccatactcccagctgaacccagacttcaagctatgccagaccaggcactagacatgtgaacgaccttcagatgattccaggcagtcattcaagtcactccaagccaataaagtgttcccagctgagaccccaaacaagccacccccactaggctttgtccaaattcctgattgaaataattcattaacataataaaatggttgtgcttttgccactaagtttaaggtggtttgtaatgcaggaatgttacaccagaacattaacagccctactgctggccatatccagtgtccttgactcatgtttcatcctcttcaaccttgcaagcactctttaaaactctgtctaaatattacattcatgacataggacttatgattctcttcctatcataatcttttttaagtaaaaatccttattggatttctcatttcctctagcaaactcttaaaagaaggtgtttgtagagatcacttcctcagctctcttccctgccattctctcttgaccagctcatccaatactaggatttaaattatcacttgatttattcgtcaattcactcaatacatctttgttgagcatctacaatgtgtcattgtagggactgatgtgggagacattatataatatataaatatatataatatataaatttataaatatataatgtataaataaatatatatacatatataaatatatatatattatatatatgattctccagttctcctctccttttaggccataagaaatacacttctcagtttggtaaaaactattccactagatgaagccaaagaaatatgaatggaaataacatgtcatgaaccagaaccatgaatttaaagtgagacaaagcatcattattttccccacctccttcccccagaaacattcaaatttatattcctgattctcgagtccaaacatatcactctttgtccccattcaatcttcaatgaatatctatggcctagtcagtagagtcaactaacaaagccccaagatcacttatagagtagccccaaactatctttatgaatttatctccatctatggtgtaagaactctcagttcttgctctctcagttgattttatcatttgactggattcttattttttcttaattaaatgacagccatttctctgttattctctattcaataatattgataatatataatttatttaagccacactaattattcttcaacttaaatcgtgtaacttctatcatggttctagttgcttcaaatttaattcttggaacatgatcgtttttctgtcattttcttaatttttcttcctctgtgactataatcctcagtaattgcttttgttgtctataagaactctcttgcccacccagataaacaagggtgattccctattcaaagatgccataaacatcctcattcccttcatttcattatgcttttgtactccatctatagccccagatttgattatctcaaacctgactgtgcatcagaataatttagggagttttaaaacacacataatcaagcccaactccaagagctggtatagagcctggagatgctctattattagtaaatttcctgcatggttcaagccaaggttggtctctaaacaaaggatagaatcactatacctcctgatcccatcaaaattctacttttccttcaagatccatgacaatagtagtaacaactattgcttacattgtgtttattccatgtaccaggcacttatctaaatgcttttatatacactaggtcacttaatcctcacaagcaccataaatcaacaaagtttagacatagcttctgccccaatctccaccgttttgctcttgggcccagttgtggacatgcattcagcttatagggatctcctacttcttcccactcaggagaaataaaaatctggccgcataagcaggaagtcagaaagatcaatagcatcaggctgtctgctgttgccacttgctgttggattccttacctgcatatcggctcttatttctgctatgaataactccactgattcacaatattgaacttagcctgacccagtgactttggcttctaccgagggaaatctggaagcctgatagttccttcaggccagtctgcagctccatttccaatagagaacacctgcaggttataagtctccatacagcagagtactgacctagtgtatgaaactttgtacaatgttttgctaaagggtcaacacatgctttcccaggtcccttcctgggaaagatgtcaactcatgggagactatcctaattagataacttcaaacagtgacaaccttgcagataaaaataagtgggaaaaaaactgtaagacatatctagctagaatcctatcaacagttgattttattattggactggattatttttcttgattaaatgacaaccatttatctttaatatcatttcttatttgataaaattgataatattgcataacttattgaagccacaccaattattctttaccttaaattatataatttatatctttcatggtttttgtcacttcaaacttaattcttggaacatgttcttttttctgtcattttcttaatttttcttcctctgtgactatgatactccagaattgcttttgttgtctcagctgctctgtctggactgctttctgctcttctaactaaatgctaatcaatttccactcattgcctgaggggaaaaaaacatttcgattttaaactttcctttcttcttctgactataaaataatacataaaatttggaggcaagaaaataaaaatcatacacaacccagaggattactgctaacagtaatgctattctttccagcatttgatatatgtagatataaataacgatactcactttcaaatttgggataatgctatagataatttttactatacttacaaaaattaataccaaattttgagcactttccatgttctttgaaaaagatattttggggggcctggcttatttttttactttagattcaaggggtgcatttgcaggtttgctacatgagtatattaactgatgctgaggtttgggctgccactgatcccatcactcagatagtgaacatagtagtacccaataggtagtttgaaaaagataattttaacatttgggaagactagggtttttaatgattttataatacttttccacacatgaccatgattaatttttttgtattgttgtaatgagttttactattacaaatcgattgctatttttgcttcaatgaacaatcatattgctatttttaaactgtcataaagaactttgagtaaatatccttaaacatagatcttggacatacataggtcgaatttttccccatgtagatttctaaagtaaaatattactgaataaaatggtgcaaacattttgttccttccttcattcaataaatatttgtttcgtacctattttgtgttagactctattttaaaccctggaaatacagccatggataagagacagcacccacacttaagcagccttcagttcagcaggggatatagtaattacacaattgcccttatcatcttaagtatggaaataatggtaaatacagtagaagttcccttaatcaacttacaattatacaattctggaatatctaatgtcctccagtcctagccttagactaatggattcccccaacaccacatactcttggttggttaactacttgctcctactggttaaattgtgtagttaccgagaaaaagttttatgtgcccccaaacctatttatatcagttgtacatgttactgtgatcacataattaactatataaaaactgatgctatttgaatgtgaaatgcttgagtaagagtcaacaaagacaagttactaaaaatagatttctgaagagttagatgtgagtgaaaaaatataaaagatttttaaaatggtgagtgtaaagaatctgctaaagaatctgcattcagattattctgcaagtgtcttagattcttgaatcccaacttggaaatttagaggatacattataaactctattcaaagggcccatctcagacaaaaggccttagccttccataacagttgggtgaattcatatattttgtgtgtgttttaaattttacaatttccttcttaaagccacctggggactaactaatcactgctaatctcaattacactgagtaacttattccttaacaaaatcaaagctcttataaaatagttccaaactgcttctttgaaagcagttcaaaacagcttatttgaaagcattatatatctctttttgccataaaatagctagcacttagtatttagaattgttgccaatttgatatatatatatatatatatatatacacacacacacacaaatacatatatatcattgttataatatacttttaggaaattaatagtgaaattgaaccagtgtttacatgtttattgagaatttgtatttctttgtgaattccctgctgacctttattccttattgatttgaaaaagatttttaacatatgaaggctattattttattatctgtcataaatacttttgaagcctatttctaccattttaattttatttataatgttttttaagtgaccaaagtttttaatttttacattaaaatttagaaagttttttaattttcacattaaaacttcagaaagtttttaatttttatttttatataatcagatccaacactccatatctttcttttctaaacttgtctatgtcttgtgacttatataacaaccaacaaatttgatggggattgcaatgtattgatggcaatagaatcaaaaattctatatgaaaaccacatttatttgtttttattttcttttcttttatgctctttctctgagtttgtaaaaatcaaaaattatgtggtgcacctttgttatttccatatgcgattccttctccactctttaacacctctccttacaagaataaaaatgaatgttgttctttagagacatcataactcttaatctacaggtaaaaagcacttctaatatataactatcttattggcagtatttacatatgacagacatgcccttggtgtagacagcatgtgtattatataagatctattaatattcccttaaattaaatcattttgaatctttgaacttcatctcaaacatatcacttatatatctgaactgctgtttgaaattttgtgactgggtccatacattcaggccttcttcaataattactaatcagatacccactcttactgagacttggtgttcagtgctgaagatcacacagaacaagagaaatatagctgctgcgttcctgaaacttacattctagcagggggtggggtaggagtgcggggaagagatggcgaacaaattataccaatgaaaagtgattataattttaataagcattatgaagaagtgcaaagtgctacaaaagcttgtaattagggttctttaagaaaattatattagagctgagcactgaaggatgggaaataatgagccagtagaatagacatttgagttggcagtgtggctcacagaactcattgaaaattctatgctgccacatctattttatgtgaactcagctcccagacagagttgattaatgtgggcatgggcatttgatccaaggtgagacattttaggggactaaatctaagagaagagaatcaatgcctttctggtggtagaacagtcaatgtaggaagtagactctgcacattcctatggatctgttctctgaatgtgaggaaggaaattgcaggaggaaaaaataaaattgatatcagagaggcatggagataaaggcatagacagaaggggaatccaggcagcatttcagttcttgttccagttgatccaaggcctggatcactcctgcccttaatacagttatgtgaaatactggaatttgcttccaataaatcccgcttttcccaaagctaattgaatatgagtttctgtaactctcaacccaaagcatgcttactcacataagcaggcaaaagggaagaatcacattccagacagagaagacaatgtatgtcaaggctaaaagcagacagaagacactgaaagaatccttcgggatggaaagaaaaatcatccaagatgaagtagtcaggcagggagagctaggatcatgtggggccttttgcgcatgtacaggatttgggatttagcctaggagcaattttcatattcatcctactgaagcacaaagagaagcaaacaaacaaacaaaggcaactcaatgattgaaaaatgtgctctttccaggcatttattaaaagttcgacaaatatttttgagcacctattgtatgccaggtcttgcagaagtagagtggagtgaggggcagcagaagaaagaataaacatttgactttccagaaaacgttattaaaaggtatgtttttcaataattttcaaataatttttgtttttcacaactagagtaggtggctgctggcatctaattggttgaaaccagggatgctaccaaaatctccctccaacaaaaagttatctggccccaaatatcaatagtgccaaggttgagaaaccctgccttagggggaaaaagaaataatgcaggactattagacatgaatagaaagtgcgcaaacggtggagtatttcctcagacttgctttctcagatattaaaacttggctatgcctctgggacactaaagcagacaattttttgttctccaggaacttacagtctggtgaggaagatgggcaagaaagatgtaaacagcaatgctctacgtgctgagatgcaaagatgcagatgaacttgtttttcagtgggcagacaaagaaggaatatccaacccagtctcaggctattaggaaggctatttctctagtggagaaatgtctcagttgctacataagaaggaagaaagcaatttggagagttctccaagaactaaaaatagaactaccatttgatccagcaattccattactgggcatatactcaaaggataatacattgttctactgaaaaaacacacatgcccttgcatgtttatcataacactactcacgatagcaaagacagggaatcaatctaggtgcccatcaacagtggattggataaagaaaatgtggtacatacacacgatggaatactaggcagcctgaaaatatgaaatcaggtcctttgcaggaacaggagtgcatctagaagccattattctaggcatattaatgcagaaacagaaaaccaaatacagcatgttctcacttacaaatgggagctaaacatttggtacacacagacacaaagaacaataacactggaaggaaggatgaaagagttgaaaactacctatcaggtactatgttcactacttgggcaaagggatcattagaagtccaaacgcaatatacccaagtaaaaaatctctacatgtaccccctgaacctaaaataaaagtttaaattaaaaaaataaggcataagagaaggatcagagtcaatataagaatactgagaaaaaattagccaggcaaagttgacatagacatgaggaaaagatttcagacagaaggagcctcatatgcaaagatctggagccacgagagtgtacggaatgtccatggagctcagcttctcaggatgtctggagcagagagcccacaaaaggccaaggctaggagatacggttggagcagtaggtccttgctgtctttagaggggcagttattcaaaactgaatccagtgcttcaggagtcaagttaatagagtagagttgtgtcttggtgtattatgaagtgggaagcagtggcatttttaggttaattctgacttaatatgcttcaagtctatttttatattatgtgcctgacgtgcctcagttctgtatttcactgtgcctggatatttatatcgagagtgtgataaatcagtgataatcttatttggcatgtttcacaaccagtcagtttgactgacacaaggaagcaaattattatattttaaaacttcttaaactcacttttgttataaggcagcttatatattaaatatccacctccattgtttcttgacaaatcttcttttaattttatgtacatgttaattttcaatgatatactcttcaaccagagaatagacaatatgccacacagattctaggaatatagtctcaaccagggaactgcttgagagatggcagaataaatgagccagcccaaaaatctcagatatagctctttcactctctggatattaaagacctccagttaaatcaagagtttactgttttcatgaccagcctattaaaggaacaacgaaaacaatggtctgctgcttttctagaggggttgaattcaatttctcttcaacacagtgggaaagtgaggatggtggtagacaggtagatatttgggagaccaataagagggtcatgagggaaatttagaatttaagtaaagtcaagaccaacagttagatgccaaaaattatagcagtacctgaaaccaaggtaaagcaaggtcaaccatcaacataaaagtgtcaagatcccagttgtaaaagaaacctaatactggcacaaagcctattcaaatgaattcatcaaagacatagagtctttactacacacaggacactatgttcatccatgtgtcctgctggagcaggaggcaatactagcaagaggccggacaatggtctgcttgtaccagtaggtgaatctcagtataaatgtagtctatgaacactatatccaccatggacaatgtgcaatcacaatgagcacaaccctggcaggacagctgtattatattatgtcaaagtctttctcctttcattcaaaacttgaataacagtgaaaatgggacttctactcacccctgcctcaaaataaggtatttgggaataacctgtctcaaaccagtacatttcacataaggccagttcaaacaattgaaggatacaaagttaaccaggtaccatttattgaagagactggtctttctctattgtgtgttcttgacacctctgttaaaaatcaataggctgtaaacatgtgcattaattcctgggatctccattctattggtctatacgtctgtttttatgccaataccatgctgttttggttactatagctttgcagtatattttgaaatcagatagtgcaatgcctccaggtttgttctttttgcctggaatttcttggaatatttggagacttttgtgttttcatacaaatttcaggatttttttaaatttctgggaagaatgtcattggtattttgataggaattgcattgtattatatatttcaaaatagaaaagggaatttttaatgttctcatcgcaacaaagacacatgtatgaggtgaataatatgctgaaaaccctgatttgatttttacatagtgtatcaaaacatcacattgtatcacataaatatgtacaattattatgtgtccataaaacaaagtttaaaggtcaactgtctgataaatggtgtattcaaattggtcaagaaagaagatggagaaagatggaagaccaaatagagcccagacaaaccgtcatgattggagttccttgccactccacttaatgactagtcagtatcagaaaaatattactctataagaaaaatacgaggggattctaatggcactgtctccataaggacatttttttttcgctcaagattcaaagcggtatagaaaacagccacgtttaacactagatcatgagtcttctcagccacataaataggtttattatgcacacgggaaaaaataggagaagaaagaagagaacaaaaatatggtatatggtatagtttgctcaattaaacagcttcccccacatgacagaacttgccctttatattaggaaggtcaaatggctaatatcaagtgcaactaagcgcccttgttctaaaggcagatgctatttcagatcagcatgtttttttattttttttttaagttgaactctgttgtccttgaaaatgtcaggtacaaatcctttgaaatgtctgacattttcaaattccaagcaatgaattgtctaaatctgtatggagaataagaagcaaagttaagaacctaagtttattcaggtttgtgagtttttataatgatcccatttaaaagattctcatgtcaaagtccagtgaactcattaaaatacttcctagaaatcaaactaaagcatacattctagatcagaacaaatccaatgatacttactcttttaaaaatctcaaaggcatgaaaagccctaaatatttgatggcattttaatttaataaaaaatgaaaaatacaaaagagtaaccacagaccgaaacactgggataaaaccaagagctatttaacattgaagtagacatctttctctttgaaatgctctgtacatgtcacatgtaaacttaaaccacatttagtagggcaatcaaatcctctctctgagaaatctttacttaatattgaaattcacgtctcagatttagtgtatgactgcaactgatcactgtatatgcttaagagaagatgggtgggcatattcatggagacacaaagctggcccacacaaggaagaagaaacccgacatgcagaggggaagttgagatgaatcaccgtatggagagagagactaagggaatagctaccttgggtctcagaaaatgttcagtaggcctttaggcaggagaattgagacaaactttaaaacaaatttacctccctaaaagcatatggggaaaaagagggcaatcatgaaaagttatttcagatggtcctttctatataaaactagagatctgggacccctgagccagataaagaaattatttccgagtttgctgaacggctctgccacactctgttcttaaaacaaagctggtgtactgctagggaagcagtgggactccagatattggaaaaaaaactgcatttaagagaaacaaaaaatgaggctgaccaaacaaccacagaaaaaacaacaggaaaaattcggaacactatttaccattttactttgctttggatagtccatacttaggatagtaatctgtaatacacagagtaagttttcaaagggtcataatgggaaaagtctgtttttgatgattaattgaaagagttggggatgtgaagcctggaaaaaagagatctcaaagatgagaagatgagagtctgcaaatatttaaatgtccattacatagaagaaatagtcatataagccttgctctccattttcaattgattgaaattatgtgccagatgttaccttcaagtttggaagtagattcatatatacacacataaatacgtaaacaaatttataaagatgtgaaacagaactttccaacaagtttgaacaatttgatctctcaaaaaatgtaggtgaacttgtgaagtagcaagctgtgttaacacattcagctgaagactggtcaggagcattgtaaaggggagtcatgcatttattagggcttagagcacatagcttccaagtgtttgttcagtcctgaaactgagtcaatatggttacttggaaagagaaaatgtacagcattaagaaaattatgcacacctggcttataagaggtaatcataaaaatgtttaataatttatgtacaaacctagattattgagagaggtggtattttaaaagatgacagttttgtaaacttgtactttttcattattcatttaataatttctgccctggaacaggcaaatgagacccaatgagaatcccacattaaactatttcaacattttagccaataaagaaatatttcagccttgagcttaagactttgacattaagtggcaaacatctccactttgaataagattgacatatttctaagaggctttctgaaaactatttccaggcactttcagcaagactgaaatctgttcaagtataaattcaatatttcaatactcagaactgaatcatgtgtacggagtcatttgtcaaaatagaataaaaagtttgttttattattattgcaacagtacacgagaaaagcttttctacatattttcaaatgattattaattctttgagatacagaaattaatattgccaagattaaggtcttagttatttaggctaaaatggatcatttttataggaattaggttttaaagctcattacactcaaagatttccattatgatctaatttgaaatgaaagtaaacagaaataacaattttgttctgctaaaataggaagtcactgtgcttcaataaaatatcacagcacagttacaggagaagcaataaataggctaagatgcgtggctcatgaacaattatcagccatgtgagaattcattattagtttctagaaaatcatctttgtttgtgaggcatcactagctgttttcccaaccatagatggtatgttgttgtctgccttgaaaacactcatctggcagtatcacagaacttaaagaatatagacattgtgtgtgtgtatatatatatatgtgaatataatgcaaagcaactatccaaaattcaaggaaatttaccatcatgttgagttcaggaccacctacagaaagatgcctaggtcacaagagatttaacatgatgaaatggtctgcttgaactggtaactgtgggttcctggggaaaaagttagcagagaacaaacaacaaaggtatttcataaatataataaagtcaaatgaaaaactccaagaagtttccaaggcaattagttgagttggcattataaatctctggtgcttgagaaggctccagcctaatcatgcccgtagcagttgtagtactggcaaaaatataagcttttctttattatgacacaggccatccaagaagactattgaactttaaattattcttaatagctttaatgaggttcccctgttttaatttactcaatcagagacacagtctctaagaaaaaaaaaggaaaagtatacagagactctaaatatacccaagtgtttggtcacccccaagttctggtctccaacacaccaagccaagtcttctcattgccttgtggcaccaggacaagtgacacagttaccttgaaacattgcatcatggacgattgtggcttcaggatcaaactttggtttcttaacaagatctttaacacagaaattttccctatgaagagttggtattaggtctttgagagaagttcagatttgagacatttttttaatcccctagaggtaagcatggtagtttagtattcttctggggtgattatccattttccaaagagactatcttagcatttggacttacagccacatattttaatgttccccaatgtgtctagaggcataagcaattatttgataactccaaagtctaaagtgttttgttactaacactcatataaatgatccacaaaataaggttctacaagaatataaagtgtccaaacataccatatggaaggagtccaaaatattcctgatagaatataaaaatggtttcctaatcccattttataagaccataattccttcactaacactacaagggaatagttgtgtttagccacagaattcattttataaaataagcttttattcagctttgcacaatggtattgaaagtcctattggtctatgttttgaaataaaaatactatattttgagccaagattgggaatccagacccactttgaaatatgaaactttagctaaagagcaacaaaagttgatcttgaaaaaatagggattctagaactgatcaatagcaatatcctagagcatcttcataggtgctgtcactgtatgtctggtataccagacggatagacttttttctatatttactaatgcatcaaaaatattgttgttgtgactggacagcccatattcctcagcacaccttcttcaaggtattaagatgttgggctctttcttttctgagcaaacaaagagtcaacaggattttctaaatgattagatttaaaattcaaaaatacctgtgtaagatgagtgataatcattctagtacttctaccaaagtgatacagcattctcactaacaagacaatttcttgtttatgacttatttagggaaagggaaaagtttatcatttatttaggaaacttatactctgataaaataagaccacaatcccaagatagattcaagtaagaaaacctttaccatttttaaatgcttccataaaataaaggttaacttgattataactattgtctttgcttacataacttaaacattatttcaattaaaataaaaacttaattcttgattaaactaaaactctaattgcatccacgaacaactgtccacccaatgatagctctgaaaataatagtcacattttggtagaggtatttaatttcctctaccaaaaaatacaaagcgatttcaataactgtgacattagtgtggtaaaaggtctgcagtttcaaaatccatgctattactccagagaaagtgaaaacttgagttcatctcccaggagtatttcatcaaacaagcgactttgtgatcatagcttgcagtcttcctttcctccttacttcccacacaggttcctcattcttctcttagctgccctccaaccaactacactttccttcccacacaagtcttttacttacccgctacacagcaactatctcttactttcatcgacccactcaggctgacacatatttactcacttcctagtaattttacttttttgttcaacgttaagaagaacttttctgtattatctcttctgctgttgtgattatacacatgcacacattttgtccctctctgcgaatagataagagtttattaaatactcactgtgttcacaattttattaaactaaagtgttttttcttagttgaggagttccttgacagcataataatctattcattttcatagtctcttggtacttaagtagtatctggtacaaataaatgctcaatacatatttgttgaatgaatgaatgataaataaattactgggaaataaaatgtttggaagaaaagaaacccataagaattttatattacttctgaaatttaactgtcctcaattttggacatgtatacattactttgagaaacgcattacatgaaaaatgcgtgagagaattacgttaggatataattatttgcatgtcaacatgattaacctaaaaggagtgaattttcttcaattaaaatgaactttcttacaaaagtttgtctaacaaaaattttaggaaaggaaaaaaaatttaaagcaaagtgcatcacctatctttgacccaaaagtctgcagagcatgagcagtttttgccacagtgtttcataacagtgttagagctgcgtgtctttgtcaggaaaaaaagaccagcagtaagggtgcttttatttaagtaacatctgttttgagatatgacatttgcagagttagaaaataatacataggctataactactatacaaataacccaataactgattaaaagggcatgccaacatgttttcttcctgaattctctattagtgggcttgtcagttttatctacagttgattttcatttctctgtataacgccaatccagtttgtttcaaatcagaaacaattaattcaattgatggattttctcgatattaaccttccagtgagttagctataacttcaaaactcattataaaacagctcactttttttctactaacaggtgacactgagattcctcaaaatactcctacagatacacatttgcaaacgcagatgaattgcatgtatgggcaaataaatcggagctggttattatatgtatgatatcacatttcaaaagagcaaaacaactccccagtatgacccatactttaattttctttcccaagaaatgtctttaaaagtttattaagtgttcattttaaataatgtgctcactgtgtataggaatttgtattttggaggtgcttgatctatctacaaataaaaattaattaggaatgaccttattataaaatgctcctaaaagtcttaattgtacttatttaaaaataaaaagtgaatgctagacttgtgtgcatggaagtaattatggtacattattattgcagtttaaaagttgtacataagatattttgtttttactgtatgtttttactgaatgaactattccccatcccaaggcaatcatgaataaaattaagttaaacatagcgtgtggcatcacagtctcttagaatttgtttcatctattttattgaacactgtatcttcagttatcctgtttgaagaaaaaggacaaataaaacatggccagcaaaaaaaaaaaaataagtttcaatatttataatagtattatcagtaaaattaaaaatttgcatatagcagaaacaataatatgttacattggtaagatattactttggtaagatatttatggtaggtactttttttttttttaatggagtcttgctctgtcacccaggctggagtgcagtggcacgttctcagctcactgcaacctccacctagcaggttcaagcaattctcctgcctcagcctcctgagtagctgggattacaggcacccgccacaacggctggctaattttttgtatttgttagtagagacagggtttcaccatgttggccaggctgctcatgaactcctgacctcaggcgatccaccctcctcggccttccagagtgctggaattacaggcatgagtcactgcgcccggccatggtaggtactttcaaagaattttcatatgcattttcattttaggtctttataccaatccagtgcagaaaaaagagcatctattattcctattttacagataaactaaaatgttcagaggtaatatgtttcacccaagtgcattcagctcaaaccctaaacacttctgactttaaattttctcctagtctttgaatctgtttattctacaaatgtagtcttctgtactcataatgaacttacaaactatttatttagggaagtagacatgttcaccatgagtgatcatctaagcactcattttgcttggtaaatttaattcccagcctagtatcttgcttatttattttcataatatccaaatatcatggctagacttaaatcactaagtacataactttctattacacagatactcaacatattagtgatatagaaaagaaactaaatgtggaaaactagaaactacaggagacacttaaattattttccagtggtcatattattatgagaattgtcaaacagtacgttttagtgacttgataaggaaggcgttcacagagccaagactaaaagcctagtgtgactgaacaaaaatttaggtactttagacggtctcacctttcttttttacacgatgcttgtgaaaaacatctggataaaggaaattataagatatacaaaataacttttccctcaaatattttgctatgtgaattctttaacacatagattgttgatctagttattatattagttcctccaagtccttaagatctgttgaatctatacgctattaggacttttacaaattatcattaatgacaaaaaatagcactatgaaattgctgtcataattacaagaactgactaactctaggtcatgcattttcaacaggggtgatagcatcccccaaaagggtgagaactggttcataaaaggtgaaaaaatcttactctgtataaatcacagatatacatacagcacataaaccaatatatagtatacctgtggtattaaaattttaagggagagggatcagttaggaaaaaaaagtctaaagaagctcctcagagggcaaaattgaaaaaaaagattgacaagcacttctctaagtaagtaagcattagcaagctactctaagttaaataattcaataattttttttacttcctttaaggggatgatcagtcattgtaatatgttaaatatattatcttatctaaatatattatctaacatattattatccattatattttatattatggaatgcttgttatctgtacagtatccactaaatacctggaaacaaatacttttcaattaatgaattgtgcatgatcaaaaaagaataaatgctttattgttttcagctctttttaaggcatacaactatgcaataatggtataacttcattcagtgactataaacccaccaacaccaggaaatctatcttttattttctgaaataggaagatttattctcctcatggtagactggtttggctttgagattttattttttaaaattcttgaatcatctagtataaacaaacatgagagaggaattacagtgaaagattattcatttcatagacgaaattttaaagtatgcaatacctcaccctcaaatatattaaaaactagaaagaaaatctaaacctttaaatgaaaatatagagagatgacatttcttcaatataatggtagagacttttcaaaagtcaacattattcttaatgctggaacaccagcgctatcaacttaaaatagaaaaaacaaagatatctgctatcatgattgatttcttaaattcttctgtaacttctattcaacattttgaaatatgaaatctaaacttcagcatatttaaaggaaaagaccatatcataattatatttattctagacactgttaggaacagcagatgttgaacatgaaagacatgaatctaacctcagagagcttacagttaagtgagaaaaataaacattaacaaataattatacaaatattcaattagttacaattgtgatgagatgtaaagagtgcaaggggccatgggaccatataacagggaaactaacctagagggataataaaggatttctaggggagataatagtcatgaataatggcctgaagttagatggacaaataaagcaataaaacccgaaaagcacacagaggggaatgtggcataaaggggcatagtgccttcaagaaattgccaaaaagaagctctggatcattctgagtaagggagaagctgcccaaaggagggaacaggcacaaatcatgcagggctttgtcatccatgttacaagttttaaatttaagagttctggccgggcgcggtggctcacgcctgcaatcccagcactttgggaggccgaggcgggtggatcacgaggtcaggaaatcgagaccatcctggctaacacggtgaaacctgtctctactaaatatataaaaaattagctgggcgtggcggcgggggcctatagtcccagcaactccggaggctgaggcaggagaatggcatgaacctgggaggcggtgcttgcagtgaaccgagattgtgccaccgcactccagcctgggcgacagagcgagactccatctcaaaaaaaaaaaaaaaaaaaaaaaaaaaaaaaaaaaaaaaaaaaacatgttctaagtagagaaataaaattatcaaacgtttatttttaaaagttcactttagcacctgggtcgacaatggataagagtcaggacattttggataaaagacaagccgggcacggtggctcacgcctgtaatcccagcaatttgggaggccgaggggggcagagcacctgaggtcaggagttcgagaccagcctgaccaacatggagaaaccctgtctctactgaaaatacaaaattagcctggcgttgtggcaagtgtctgtaatcccagctactcaagaggctgaggcaggagaatcgcttgaacccagaagcagaggttgcggtgagctgaggtcgtgccattgcactccagcctgggcaacaagagcgaaacttcgtctcaaaaaaaaaaaaaaaagaattgcaatagttcagagaaaataaaggctatagagatggaggatgatggtcaaatgtgagagataactaggagttaaaaggaactggatttcacaattgactggatggcaagaaaggtgtcagagatgatcccaaagactggcttgcacaacagggaacagagcgagtgagctgtggataggaaaaaatgtggctgagaatgctttctgaaccttcagaattaaacagcagctgctctgagaggtcaaacagaaagccagaaggataatgccattattctttgacttcacagcagcaagatccaggggtaggaatatcctgagaacctggaaaggaagctctatcaagtccaaaattaaatgcacatgtttggtgcctgtcaaatcaactcccataaatactaagaagaaatcagtcagagtagtagttccccagtggaactagctacagctttagaatgtacaatttatattctgagagcaggattccaacaggatatacacgaggagggaaaattcaagtcccacccacccagtttgggacaaataatagaaaacgatgagaaaaataggaagaaaaatcaaaatgaaggcttgtagaaagatattgttaaatgagaggaagatacagtattctaaaagcaatagcataacattacttaaaagtatactacaagagtgtgagaaaaaagaaatactggtcaaagggtacaaacctttagctgtaggaagaataagtactgcagatctaacatacaggatagcaactatagttagcaatgtattttatacttgaaatttgttaagagagtagctctcaagtgtgcttaccatacacaaaaatggtaaccatgtgaggtgatgaataggttaatcagcttgtggtaatcatttcataatgtatacatatatcaaaacattacattgtataccctaaatatatgcaatttttatttgtcagtcatacattaagaaatctggacataattaaaaatacaagaggcaaaaataaagtttacaaagcatctgctttgtactttcatatagttcaggaaacatggacctgatcaatttaatgtttagggatgagctacaatagagggtgaagtaaaaatatgaagttggaaaagagatatgtggaaataagacagagagtgacaagatgaggaagagtataaaaaaaatttaaaacagctaaattaaaaacactattagtgttttaatttttgatggcggattaaaaaaatggatttaagtaggaggaaatggcaacaaaaccttggaactaacttactggactcaagaaagcagaatctctagactggtaacacagaattatcataaggatggcaaaactggaagcatcacgtccatcctggaaggagtgagggctataagtgggagcatttctgaaagctgtctgagaggcaattacatctctagttactatccatcattccacatcagtgtgtggctgcccttccaccaacctggtagcaggttggaagttttttgtttgattggagggtttttttgttttgttttttaagagacacagagttatcctctgaactgggaaacacaagacagagtagagggtatgtaggcactgtactgaaaacaagagaactgaataagctacagaatgctgaacttgtaacacactcccaccctaactgctttcacccctcagctctccaacaacttaagccaagaagtaagcttcttatgtaaagaacctgaacagtccaaaagagaaaacctaaatgtattaacactagtggttctccaacaagagccctactgcatcattctacattgagtctcagtttttacaagagatttcagagtagacagtttggaattatcaattatttgaggaaagcttctagtatagaagacagaagccaaaatagcaaagtcagcacaaaatcttagaaggagagactatgcaataaaaaataattttaaatggaggacatgagaatattcaaaaaacaaaaatgaagagcacttagaaattaaaagtacaataagaagatacaaaatttcacacaggtttggtaaataaagaaatctccccccaaaaaattatagcagaaagatacagatgaaggcaggagaggaaacagcactgctagaagacaagtttaggagatcaaacagcctaacaataggacatccagaaacagagaggggggaagatcctcaaataattcaatacatattttcacaactggaggatatgaattgccagataaaagggtccaaaaatgcacagctcagcagttcataatggatcttcaccaagatatacatcattttaaaattacagaacagagtcaagcagaaaagagagggaggagggaaaaaggtcacaatcaaaggataaagattataaataagaatcatcttagacttttatagcagcaacagtacagtgagaaaataatggagaaatatcttcaatattctacaggtaattattccctccatagaattccatacccagccaaactatcatttaaatatgagggtataataaagatatatttagaaaagcaaggttttaaaaaataaatttcttacttatgtttttcctcaagaaacagctaaatgatatgcttcaccaaaatgaaacagtaaactaaaaaacaatgaagatatatcagaccctggaaatgtatcatcatatgtaagagatgggaaaaggtaattgtcaggatgatagtgaagagagatcccaggatgaagtatgtacaccagatgcagaggaaaaccaatccagaccagagcagtgactcacagggcagacacattgaggactgttctttaacaaatgcctgccatccttgtactgcctttttagcctaaaagagatgcttaggtgaatctggctcagattcttgtctcagtttgtcttggcaataagctgatgacatttttgctttctctccagttattttcccctgagatattctgcctgactcagctgagaacactcatttcagccatagcaaagtatgttgcattcacctactcttaagagctggaagtatgtcttaatgagcttggaaacataaaatgccaagtattttattctctatagccacattcctgtgggacatctacaacctgtactaggctactacttttacatgtcctgactgtagccaccctgtttcatacatgggcttgtctattaagctctgcagaagaatcttaaactattaaggaagctgaattcaaattttgatccagaacaacaggggtgggagaaaggagacagttagctttctatgaaatgcacttaaaatatgctctttatttaacatgtatatttatatttcatctaataatatattatcatttagctatttttttctgtattatgactataggcaaaagagttttgaagtaaaaataaatatatatttttaaatttctgtatcgtgcactctactggatgcttcagaattattttaaaaatcacattagtagaaataaaggttagaatcaaattacagaaatggcttatcattgaggagagtcaacttaatatatgagaaaggcaacgtgaaaaagcattatcaaaaatgagaaacagcttgcctgatacagagaacagaaaataatgatccaacttagatactaaatgctcctgggaagaaataacaccaaaaagataaaagcatcaaagacaaaataaaagtaagattttattagaaagtggaaacctaagtttgaaaggtttcactcaatattaaaagacacaaagacacaaaacccatgtctatctagatatctatctagagatgggttatatgtcttttaatattgatctatctattgatagatatgcatgtttattttttgaattcaagggtaaagaaactatcttaaaagtatcaatattgccatccccctcccctcaaaaaaaattacctacagctagtaaagagataaacctggattaaaattcaaattgtctgtgtctctgaaactgtgctactatactatatgctaattgactgaatgtaaaatttaaactactgactgttaattatttataaagagctcttataaagccataataaaaacagtgtctactaatacaatgaataaaatatatgaaaagatgattaaaaaatattaatggtcaataaaccaatagaagttttacttatcatctttagtaataaaaaatcacaacttaaaagaggatgaaattggaaaagattaaatagaataataaatctcagtgttggtaagggcttataaatacaggcactcattctctgctaatgagaacataaattgagaggtttacaatttgacaacatatatcaaaatgcatacattttaacatgtataaatgttaataaattaacattctatgaatctagtctagatcatttttgttagtgctattttatactttctaaatatcctgagtacaaatcatttttataattaaaagtgtcattgtcaaaacatagtaacattttagaatttgagtcatttgacctagtaattcccgtactacaaatctagactaagtaaataaacagatatggggaaaaacagttatatatgtgaatgtttattacagcattatttttactaaaaatgaaaggaaatagctcaaacacttaataatatggtatggttaaataattttcaaaggaaatgtaaagaaatgctcacaaaaagtgagaaagtaagacacaaatctataaatacagtatagtcttaatatgaacagtatttgagagttaataatggtgtatgtgtagtagaattacaggtattttaaagtttctgctttacatttttctatatttttcaattttctccaacaatagtttatattttatattctaaaatataaaaacattgttttaaacattacatttgaaaaggatataactgaaaatatacaaatgtaaccaagctttaagagttatataagagtctcaaattaataatagaaacattgagttggcaaataaattgataaattatccaaataatagaaacgaaaatacttcaaaattaactttatccatttattagtattcaaaagtataaattaaaatataaataagacactatgtctagaccttctcatttaataaggatattcaatttaattttttttaaattagtagccagccagtattttcagagtggtgagaggggaagctttatatacttctgcaaggaaatcaaaagtaattagacaatatgtagaaatattcttgtggcaaatatttgtcattttcttctaaaacatttagctttctatatccctctctgtattgaagggagctggaagcttagataagatttcccaggctgctctgccagctggcttctggttagattctaaaggcaaccttttctcagggattcccaattggcctgaacaagactttttcaaaacgattctgaagttctaggctcttcctactcagtcctccttccttccttctcttctttcatgggtgtcagaccctcatagtctgaaggttcaccccctccttctcctgcacctcctctctttatatcaaaggtgtttctacccataaatttctggtgtgttgaattctatcttggagtctgcttcttggaagatggcactttcgttaagaaagacccaggggaaaaaaaagagacccagggaagaaagaagccatctatttttttcctgcttctggcttcagaagtggtaaggtagggtactatggatgcccatgggctttaacagcattagcagagagtctagcagtgttggaagcattcagcctctcaggcagctcttgtagcatcatgagagaattggttcctggtttcctgctcagtggccatggaagtcattcctaaatcacaggagggctttggcagaccctgcagtgtgcacaatcacgagccctgtgaaacattgtgttgctccttgctcttccacctgtaggggcaggaacagctttctgaagctacaagtgtctggtgatactatcatgcttccttatttcttttccagcccattcaacacttttgtcaccaatttcctgttttaaactgccctaccacgattgcaattttcctgactggatgttgaatgacacacctaaccatttcattctttttgatacccaaaattctcatttgtactaaatattgaaaaaaatattattacatgtgaacaaaaattattttttattattattatacttttaagttctagggtacatgtgtgtggcaattcctcaaggatctagaacaaaaattattacacaaagctttttatattagtattaacaaataaaaagtctccaagaactctaaaaatgggaattttgttaagaaacttaggttgcatttatatgtttttccatgccccaatacaatatatgtttctggatatttttagatacatgtaaatactcgttatttactgctaagtgaaaaaaaaaagctgtaaaattgactaagtgtttatcatatgacccatgaaattctacttctaaaaatatatcctggaggaattttgtaagtgtgaaccaaaacaaatgtatagtgatgtccacagcagcattgtcaataacaaccaacaaccagagtgacccaaacatccatcaacagtgaaagagataaatacatctcagtatattaatgtaatgtatactattacatgaaatgctatatcacaatatggatgaatctcaagagaaaaacattgacagtaagaagcaaatcacattttttaaatgcctatagtagaattacatttttacaacattaaaaaccagatatattagtccattttcatactgctataaagaactgcccaagactgggtaatttataaaggaaagaggtttaattgactcacagttaagcatggttaggaaggcctcaggaaacttaaaatcatggcccaaggcaaaagagaagcaggcaccttcttcacagggcggcaggaccaggacggagtgagtgccagcaggggaaattccagacacttataaaaccatcagatctcgtgagactcactcattaccaccagaaaagcatgcgggaaaccgccccatgatccaattacttccatctgctcccaccattgacacgtggggattatccccacccaattcaaggtaatgtttgggtggggacacagagccaaaccatatcaccagacaaagcaatattttgtttttgtttttgtttttgattttgagatggagtctcgctctgtcgcccaggctggagtgcagtggcgtgatctcggctcactgcaacctccgcctacagggctcaagcgattcttctgcctcagcctcccgagtagctgggactacaggcatgcgccaccatgcccagctaatctttgtatttttagtagagacagggtttcgccgtattggccaggctggtctcaaactcctgacctcgtgatccgcccgcctcggtctcccaaagtgctgggattacaggcataagccaccacgccccgcccagaaaaagcaatactctattgttcaaaaataagaagttgggaaagagatacctctgtgggaagaggggttgtattcagcgactctgaggggctgacgacattctaattactgtcctggttgataattgcacactaatttgctttatgtttatttttcataatatgtaggtgttttatttactatgatataagcatgaaacattttaacataaaaaagagaaaagaatcaggttatgaaagcataactcttagaaactagcaactctgcctgcatggtttaaaacagaatcgctaactcagagtaacataatctctcacaactagtctttgtcaataaatgtatgaatacataaaataattaatgaacagcatgctctcaaatatgtataacatgtttatgaattaaaccagatgaaaagatgtccaaatgttgtttaataatttctgcatggaaaaattatgggtaacttgatttctcttctgggtatttttctttctttccaaagtttctcaaataaatatatattactttgaaaattcaatgaaatacataataaaaatgtgtcattaaaagtccagaatacagtcagtttatgttctagctatttttctttctcttaggacattaatccaattgtttttatcaacaagaaaaacactatgaattataaatcagtgctcttaaactttggtgtacatcctaatagctgcaagccagcccaagagatccttctaatatcctaggctaaattggatcaaacaatttaaactgtaagaaaatcagcattctgaatatttccccaaaagatctgtcccagccacctccccaggctaactgtgcatcaccatcctctttgctctttgctctttgctctctgctctccagtcacagcaatcttatttcagctccagtgaattctttgtttcatgtctcagtagcttggcataggctgctgctcttgcctggatgtctagcccttcctctgtcttcattcagatctcagctccaatgtctcctccctagcaaagtcttccctgaaactgtaccctatccattttacagtttatatactcttaacctgaaattttatcttcacagcactttaataccatttgtaattaactatttgtgttattatctgattaatgtttttctccttcaacatactgtaagtgccgctaggacatgagtcatgtctgttttgctcacttctgttttgttttctttgacagagtctccctccatcgctcaggctggagtgcagtggtacaatcttgtctcactgcaacctctgcctcctgggttcaagccattcttccacctcaacctctggagaagctgggattagaggcacatgccaccatgcctggctaatttttttattttttagtagagatgagatttcgccatgttgcccaggctggtcttgaaatcctggccttaagtgatccaccggcttccgcctccctaagtgctgggattacaggcataggccactgtgcctggcctcgcctttttttttttttttttttttaagagaaagggcctggctctgtcactcaggctggagtgcaatggcatgatcctagctcactgcaatcttgaaagcagtcctcccgcctcagcctcccgagtagctgggactacaggcacaggccagcgcacctggataattttttttaatcatttttcttagaaatgggctctcgctttgttgtccaggctggtatcaaactcctggcttcaagtgatcctttcatctccgcttcccaaagtgctgggattataggagtaagccattgtgcccagcctgctcactttcatatctccagaatttgacttaaagcccaacacttaacagacactccccatatatttcacggatagttggttggataaatgaataaactatcaaatgaatcaacaaacaaatgaagatctgtccagaaaaatttatggctatgtctcccaggctttgaactaaaaatcatctttaaaatttggttattaccgtactgtatacacataatgaaacatcacactgtacaccgtaaataagtacaattatcacatatcaattaaaaataaaataaaatttaaaaaattttgtttttctttgaaaaagatccattcaatcaaaagttctcactcagaccagtaattagcttgtattacaatgaagataacatatattcaaccttggctaatcaaactaacttttttaggctcctttttttcgtgggtataactcacctgtgtgtatctttttcaaacaaaataaaaattcttttccaaaccccaaacccaatgatgactcattctccagaaatctagtttggatgtgatgggtaaggaaagaaaagacaagaaaacatattagcctcctaagattaaggactatatttttctgttgggaacttggaatcctaaactaaaatgtttgctctctgatccccaatatcagaagctgcacctaatgtaattgcttccaagggggaaacactgctcattctgactggctgtcacaatactctgacttaatcccttccaaaatgcccagctcaatataattgtaagaattcagggcagaatctttccatggcagtttgagcagtaaacttatttgtttgtatgtaagggactgttagttctcaaagcacagaggttttattaagaagatgacaacaatttctgatttttagatacccattttttcaaatccaaatattctggatttctacagtgttcctacatcatgttcagaaaacggagtaatacagttatccattggtggctcttaagagcaggatattattgtacttgtatttcggtagaggtatttatttatttggttctttcatcttctacatttacttgttccataatgacctatctaccactctctcccttaaatattctctctatgcacaccatcctccttgctatttctaattctctatggcatgcttgaaagcattcatacctattgctgctttgcctggagcatcctttccctgaatactccactggctgactctactggaaactttagatcttacccaaagggctatttaaaaattatattccctcctgaatacttcctatatgctttcttccttcatatattttccagagcatttatatcataaaacatcccattttatgtatttttcttattacctatttttccacttctagaataaacattccatgaaaacaaagatgtttgtctcttttctgtacctgctatattctcaggccttaatgtagctactcaacaatcattaagtaaacaagcaacttttccatgagaaatatccaactgaaatgaccaatttactatgctctgggtctagcatatcccagaaaggggatacgtttaccagaggaaacagtagcagtgacactaaacacagagctacagctgttgcctgatcatcaatcagtctgtgctccttacactgatagaccagagagagagagaaaaggagttcaatgttgatggggtaaatgtaaaggtccctgatgaccatgaggaagaagacagccgctgtgcactagaggcagagaggaatatattaggtatacagatgatccacaggggcatcttgtggcattcctgtgcccagttataactaccaatgtataagtacagcagcaagagaatggtaacccagggctcagaactcttagtaaaacattaggaaagcctcctacatgagtagaagtgctagcaaaaagagaggaaaatctagaatggctgggggtagggtggacagaccatgagcaccaactgcattagtgggactcttactattcctcttcaagtaagtcttcttggaaattctgaccaaccaaaatcctgaataagctttgcctggatggattgaccttcagtgagaagcaggtggatctgagggctgtgaggagtagactgcagtagaacgtagctgctgatacactaccaaaatctttcagggctgtgcacctttcctccacttgctgtgaatgttctgtgatcacagttcacaggtgcccccttctttagagacttaccttctgctaaagatgagccacttccccagagaggccactccttgccatggggaacaggccagtagctaatggccaatggacacaagggtagacgaggccatctatcttgcctcaaggagggaccatctctgtggagcaattcatgcctcggagattccccataggagcagactgggcgattctccagctgagactctatttgtgcttagtttttatctcctgctctagcctgcttcacttgctctcattctcctgagagcactctttcaataaatcacgtaaacaagaattcctgacttggctccgcttccaaaaaaccctgcctaagactcatgtcatacgcaaattgcctctgaaataatacattataatgacaggcctttaaaattcttacaaatacaattctgatgaacatcagctcacaaaatttttcttaaaagtcagaagccctaaaataaataaattaccatgagtgaaagtcaccaggaggaaaacataaaattgcataaaataggatcatcagatagaaatatatagaaatatatggtatatatttctatatatatatacctatatataccatatagaaatatatggtgtgtatatatatatttctatatatacacaccatatatttctataactatatatgtagtaagatataaaaagagaaacccaaaaacatgagtgaaaacaaaaagctatcaaaagcttgcagattcccagcactttgggaggccgaggcgggcggatcacgaggtcaggagatcgagaccatcctggctaacacggtgaaaccccgtctctactaaaaatacaaaaaattagtcgggcgtggtggtgggcacctgtagtcccagctattcgggagactgaggcacgagaatggcgtgaacccgggaggcggagctttcagtgagctgagatcacgccactgcactctagcctaggcgacagagtgagactccgtctcaaaaaaaaaaaaaaaaaaaaaagtaccacatagatggttaagagattaaatgagttgacatctgtaatgctctttagtgctgttgagtttctaatattcatctgtattatttttatcttgaatgctcaccaaggtgttctgggtcagaaactgatatcttactaattaattcacaataaatagaaagtgaactggcctgccttgccctaagccttaaccctgatgaaagccaagccaaatgtcccacattggtagccaaacattccatagatgactgacagtgaacaatggattcttttcatttatatatagaagagagacaaccattcccctccccctcctgaaaggaaagaaaaatcttttgctcctttgaaatgaggtggaaaggatcctaggttcttaccttaaccatttagaatgtaactatatccttccacaggtcagatacaccaaaggggtctccaaagtctgggctttgtacctagggagatagcagcccagcctttcttggatggtgagcacactagtaatcattttatgaacatgcgctacaacttacatatacacaacccttattattttatgtgtaaaatagctcaaaacaaaaaggatattttgtacagaaaataaaaagaaaagaaagaaaaaagaacaaaaggaagaaagatggaggaggggagaaaactttcataaaatcttcatccaaaatattggtggcagtgtggaaagggaaaagcaaaaccacaaaaaaactctatcttctgtaatgtaccagctctgaccatttgagttttctgacacgatgtgtaatttattatgttcaaggactattttcttggcaaaaagaaaagatcttagtttcagagttagcatagaacataacactatttaaatgtcttaaagtagctttaacaatagtatgcaatatacagtgtgagcagtctttatgagtgattctctaagagaccccatcatttggctttggacaggggaaagtatctttatcatgaacacttgctgtgctaggctgaagcccacaatttctatgatcccccactcctccaattcttctttcataagctgggaaggggcactaaggtgaccaacagaataatgaggatggggagtgttttcttgttaagtccacggcagggcttggccctactggattgcagctctttaaaagatgagtatttaatactacttcgttctttggtcttgttggttgctgccaatttgagaccacagggaatgtcctcctcatcatctttttaattttacactgataaaaatattaaagagaatttaaagtctgatttgtggatcagtgtgctgtattaaagaaaaggagaagaaaaaatatatgaatatatatattcacacacacgaaaacatactgtgggtagaaaacaggataacgaaatatgaagaaactcttcataaaattttattttgcaagatgtccctttttgattttaaatacagggggaagagattagtcttataagtgtcagtcccacacaccatgtcttttctctccctggtgttaatgttccatgtaatgctaattaaacggacatgtgtaactaatttaagtgttacagaattcaaaccagtcttaattcccccttctcccaaaaatagaatgagaaacttagttgttagtctctagactttatagtgggcagagaactaaattataaaatcatattttacagaaaaatctaaattgatttctcaggttatgaatacttaattataatagggacagttcagaaatagccccatggaaaaagtagttgttcattatattgagtcttatggccaagaaagagggcagaaagaatgtaattgtgagttgtcaagcttaacacatatgtatagagcaaatattctcactctgttcagtggcagaattgagcctgctgaatactgggcagtgtccaagtggtggtcaaagtggtcctctgacataaagaatcatgacccacaaaaaacattgaaagaaaatttacatatagacatattattgagatacatatcattacagacactttctttaccaggataagtgcaatctgaaacttatctttattatataccaactcaatttttattttattttatttttttatttttttttcctttaaaagccagggtaaattttattttattttattatactttaagttttagggtacatgtgcacaacgtgcaggtttgttacgtatgtatacatgtgtcatgttggtgtgcttcactcattaactcatcatttagcattaggtaaaaattgaaggaaaggtagagttctatttccatattctttgaacactatttacagaaatggcattagtcctgaaaatatcatctttctctatcaaagccatcttaaagataacactgcattattacttaaagaaaactgccagggggagaatctatacctagtaaaatttaacagaccagtggaggcaaaacataacagtctgtgttaagggtagtcatcatccacatttagttgaaaaaaaaaacagaaaagcttacctttatgatggtttgcactggatacaactttcccccacaaggttacaataaatattattattagcagttttccttttgttgctttctgtaagtatctcttactcatcctgcaaataaaaaaataataaaaatcataagtatgcaaattcatagcttttcccttatgattgtgctacatgtaaagccttccactatactttaaccccttcaacttctgaaaactgtatttcttgtatttaaaatgctgttcactgtatacaaacgatgatcagagaaaataaaggttttccaaagtaccttgatatgatgcaagaaataagcaaagccctgcctcagtcttcatccacttaaccacagcctaaatcagtttggaaatattatcatatttctctccatataaacatagatttagtttattaacaaaacccaaggcatggtcatttggataatctttaaataaatgccttattattttacttttttcctaacaattgccaagtcaaatggacagtgtaacagtttatatagaattgcttagatgaattcctgcacagaatatggtcacttcaaatctattattcctaatgtgctttttaaaaatcacctggttatatacatttcttactgcaaagtaacctgatcctcctaatgtgcacaactccactacaggtgacacaatattgttggactccaccttgatgtaagttcccagaggtaggagaaaaatgaaaaagcagaatgaaaaataccaaatcaacattttcatattgaactcataaaactagaaaaagcaaaaaatgttataacaaaataatagctacctataataaaagttcagaacttactttctccagcactttctacagcattctttcatttgttctgaagaacaaatttggcctgtaggtatatccatccccattttgtagatgaggaaatttggatatttgcctgggccacatttaatgacagagtaaaaatacaaacccagaattgtctaattctaaaattcttgcattaatcactgggggataagcaaaactgatatgaaatcaagtccatctccatttatttatgagggcgattaaatatatgtctgtcaccctgtgactttccgattcagatcctatactgaactccactgtgcttgacctgaagattcttgcctgccctgcttttaaagcaatttcctggggtcacttcctgatgtagcctgattccttttcctcttgtattttctaggttacccttttttgtacatttttacctccaaaacattctatctccaaaaatgtgactcaaaggtagaacaggtggctatacaatttcaaagaggagtccttgacattttttcatgtatgactaaatgcatgaaaaaataaattatatattatgtattttaatacagatatatgttaacatttcttagcttgaggaggttatagggattacttcaaatgtttagatggcaatattttaagaataaaaacatgaacttctaagtcagaatgccggggtttgagtccaaactttaatggcttctaattatttggcctttacctgactttactttttttgggtctcctgcttcagtttcctctgcaaatttctggatctcctgctgcactgtcttctactgtagcataggataatgtatgtgaaattcctggcccactgacaaacatgtactaaggattcaatggctatgatattagagaatagtgagtcatttgtatatgtttgatccttaagtgtttgggaggcttgtccattcgtgagatgattgaagggagtttcagtagcaccaacagctgtaaactctctgtggaccttagcctcatgacatgtcaaagataacatacaagaagataggtatttgagcttttagatcagactgttggggtttaaaaccaggcttcctgctgactatgtgactttgaacaaattacttaataattcagattattttcattgtcagtaagacgaagataataatatgtacctaacagtgttgttggtatgaagattaaatgaaatagtctgtgtaaaaggtttaacactatgcatagcaaataataaatgctcaataaacgctagccattactgtaatcattactcagtcagactagcattttcctaaattcactctgtgaggcaccagttccacagactgttattaaagtattcgtgaaaaataaaggggggatatatatttgtaacattgtgagttcaaccaatttaactagatttttttaacaagaggcatattgccaaatatgccttttagaaacattttccaagaacctcctccacagtgtaacagagcacactagtgtcctcaggaagcctcttagagaaatattgagctataacaataacctggtttggaacttattctcagtaaaccaaatgtcattttaaatcttccgttctattgcctttgtttcctctctcagcactcctactatttgttttaagaatcttctctttttttctacattttttcaaccatcctgactcccctctgcatctaatccctgcaacattattgtactgcatatcatataacagaatgaacagcaaaactcatctgacaggaagagctgcttagcataattcttgataatagcttctccttagcacatggcctctgctacaagggcaatgacccatcatttttccataccattgtacacccacccaatgggatgacagaactgacagatggtcaaactgataactagacatatggaaacagaagcacccacaaagttgccaggctgtcaaagtaaagaaagaaaggagaatgcaggtcaacatttggaaggctgtaaggactggtattttcttcttttcgtaacatcgtcactcctgtccagttaattaccatgttccgtcaatactacctccagaatatctctcaaatgtatatttgtatacctattactactgcaacactgcaatacagaccaccaaactttctcactggccacagcatcctaactggacatctgccaccaaattgccctcctatgtctgtctttttcacaactatatttgcagtatttagtaagtgcctgataaattttgttgactaaatgtaatgcattctctatgctatggccaaatatgtctttatgagcatgaaacatacttggttaaaaccttaacatgattcccttctctgttcagaacagaaggccatcattcttagtagggtatgaaaatccttcagcagaatatttttttaagctttgatcctttctttatgtctctaatctcattttatgtcattttgtcccatctttttctccacacacactcacagtctatttttaaccctagaaaatttctccaatgacttccagctaaatcttacccaccatgccacctgaaatatgttagctattccctccattcccacctactcttcaaaatgggtaacttctactcactagtagaagggcaggttagaattcctcctataggatttgcccaagaccgtgttgagtgcccttcattctgcacaacagccacttgccataccatattataatccacctacttatattcaaccattattctcatataagattcctaaagacagcaactgtgccccatacatttgtgaatctgtaggattcatccaaagtccagcttaatagctggtaaataagtacttattgaatgttggtggtgccttacagacaaatatattgcatagtggttaacatgagaggaaggaagtgtgtgtcatctctctagatgacaaacaggaagtgaaaaagagtcgggggggcatgcaacaagacagagcaaactgagaaggaaaagagaaaaatgaaatccaatcttcaatgtgttttattctgatttttaaataacaatcaagtttgaacaaagtgaaacataatagagtgatcaaggatttttgacaaaggggcaataccagagaaaaacacctaaaggaaaaaaagctgaatgtacatttcttctttaccttgcaggacagcacaaaaggagggacattgccttctttctctatttgctaaccaccaggtctcagtataaaatttcccagcacagaaatactgaatgtggtcctggctccaacacaaaaagaaaaaagaactgccacattcatttgtgaaaacggcaaaatttaagtgaattttgcaaaaagcaaaaacagtgaaaagaaactggaaactaaaggaaaatacacatagaggaggaaaccttgaaatcgctcccaggcagcagcagcttgcaaggagcacaagggaaaagaggaaactgagaaatggtaaccctggcagtgaaggatgttgaagtgaaaagttgtcgaagtggaggactgacgattaaatctcctggactttctcccactcttctcttctgttacatatttcacttatgtacacggaactttagacttttggattatttgaaacgcttctcatcccactaatgttaaaagtacatttaattggccagatgcggttgttcatgcctgtaatcccagcactttgggaggccgaggtgggtggatcacaaggtcaggagatcgagaccatcctggctaacacagtgaaaccctgtctctactaaaaataccaaaaattagccaggcgtggtggcgggcgcctgtagtcctagctactcgggaggctgaggcaggagaatggcacgaacccgggaggtagagcttgcagtgagctcatactgcgccaccgcactccatttaattgttaaaagcaagaaataaaaaactgttatgctatgagaaaaatcatttccccatgaaaacagaaagtaagtttaactggtctataaacaaaaacctggaaggaaaaagggggggaataaaggagatagtataaaggagatgtataaaaaagataaaagtggaggcttagaatccaaccacctgacctccccttgagcctaagacacttctgtggaaatagagatcacataagggaatatttttttaagtctttttaggaaaattctttacattgatctaaataccggacaaacttggtgttaactagttacaatggcatggaccttaacagacaaatctcgaaaaaaattcgcccttagggtagaatgcgcggtggattagtcacgtgccccttctcctcataggaaccagaatgatcattataaaatgtaaatcaaatcacattgccccactggccttataccttgcttaaaatcccggaatttacctattcattgaaattagaataaaatataaatctcttactggagaaaaaaaccaacatcatcttccctctcaaccactctgacttcatttcacatccctgtaccccaggttccctacgcttcaagcacactggctctcccactatcccctctgccaagctaaatctagaccttaccctaaacgttaattctgccatgaaggttctcccacctgtctttgtgtagtggtctgcttttcataatcaccttcacagagattattatgaccatcctgccctccagagtccagagagacccaccctgcagtttctctctctctctctctctccaaatagcctgtagcattttctctatttattctaatctaaaattattctattcactattttatacatttgtataagtgtctattttctccttcttcccattaaaatgtaatttccatgagagcagagatcctgcctgtaagtcactgctctagcacatagaacatcacctggatcatggaacatcaagagatgtagaatgaagaaataggtgtattatataatcagaataaaagatgtgagttttttaatggagaagttttattacttcttttatattaacaactagaaatggagatgtgaagaacagtacatattggtggagcaatagaagtgagaagaatgagtgggagatgaggaaatggaaacaaagactagattactcttttttttgaggttgcacaagttttatttattaatttttattattattattatactttaagttttagggtacatgtgcacaatgtgcaggttagttacatatgtatacatgtgccatgctggtgtgctgctctttcaagaaacatgcagagaaggaaagtaaagatggagtggtggctagagagatttaaacaagtcaacagagccaaaagaaagggaggagttaaagataccaaagtgagcgtagattatgaaagttaattttcaaatgaggtcaaaaaataagtaacagttttgtaaatgtaaagcattctacaagtataaactattattgttattattcctttagtttccttatttttatagaaattaaatgtatcctccaaaactaaaccattctttgttcttactaatagattaatacaaataacctactaaatagggcatcgagagctacaagtttgactacactgttgcttttatccaaaatcatgtctaacctgactagaattttatgacactatgcctgaatatagaatatccaagttattactgaaatagcaattgtctttgaggtggatggtgccatcggtattcatagagattaaataggtatatatggatattaaagcacaagagactcatgtaagttgtatatataaagggtatacagtaacaaattaggagataataatgtaactcatacatataatcatgtatgttgtgtgttatatcatccagaaactgaggtggttgattttaatcattttaattactacagtttttcttttcacttcatatcatatatcaagtattatcacatgatggcattttaagccacattcactaggcacattatgtgtgtcagaactttcctattgaagaactagtatttacatttcctatattgtaagttataatcaaaaatttatagagttgtatttttacaagctagtcatatgattagcctaactaggtcatattttcttagacaacttcaaaacacagactttgaaactttaatcggtttctaaactttgtctgaactgaaacacttgttttaaaatgctcattaagtttgatgtatcagtgttttgtaatgaatccagctcttaattctgttcagtaaagaagtcaaccctggagatttacccaagaaagctgcattggtttctaaggattttctggcaacaaacacaagcctcatttaagaaccacaattatctgcttccttcacccaaattttatactttcattcatttccccacaatactgcaattctggtgggcacaaaaattcaggagcactattgctttatgcctagccatgtatagtcaaattgttggatttgtgcaaatacctttaccacccacagattgaaatgatatggaatagaaatgtattatcatttaaatgatttctccagaaacacaatattccaatgtgccaagctctaacatccaaaacagaagacaatgctgtaaggcaaaaataaagcaatcatttacgatttttcagagccctagaaagacacctgaaatgatcaaggctaagctacatcaccatgcatctattattacaagtgaatcacttgccctcctttctgtctataaaatgggaatgttgtctattttttttttcgaacaggaatgccattagagtaaacaagaaatcacgggagagtttgaacttaaagaaagatgtgaaaaatcagaggtgttactgtttcttcaaaggtccttctctcagagcatgggcttataagtcagaaaaaccaaatgtgatcctggattccaacaaataatagttaaataaatttgtcaactttacttaacatcgagtctcaatgcacacataaagaatgtacaaatattattacatataatattgtaatgtatgtaacgaaagctaaaggtatgtctttcattctcacgtgccctgttgaggcattttactcttttctcagtgactgtagatagtttgaggagggtgcatccataatatttaaattttgtatctctttccacttcagtcttaaccctaaactactttctttctctgcatttctgttttttattcagtgctcctctccttatcaattgcttattgttttatagtattatctatctcctccagggtccaaatctgtttttcccaaagaaaaagattaaggaaaataaggtacggttatatagtatgaccaaaagtgagatttcatactgaaccactgtaacaagatatatattatatcaaaaaataagccatcaaaaatttgagtctaacaaagctaaaatataaaatatgttagagctactaaattgaaaataaatctaatttttgcaatttaatatgaaatgtatgtgtccaccaaatcatgatgatgtttgtaaaggacagggctggataattgagatctagacaacactaaaccttgttttatatttgccctctgctcctacaaaaacttcagacaaaagtagtaacaattagaaaaaattggattaccttctcctaccgttttaacacaatggcactatgtcacactatgaattgaaacaggtggtaggagacaagcagttgacttgtagatctgtaaacaattcacaaagcttccactcctgcatgatctggagatgactacatttcacaactgctaggtggaggaccattatatagaataagaaaggaaaattccaattatatgtagccttttatagatggctaaatcataagccttatatttaattttgtgattatatatggtaaaaagagagatagctctgcacataatatctaattctgtatataatattcataataaaacattttctttcttttttaataagacttttataatgcaaataataaggcttttatcaatgcaaataagctatggtaatggaaccagttctaaatatttcttcagtctattatcattgggactagttaagactttcattcctttagttctggtgtacctgttctcttgggaaatgaggcacagaagaaatccacttcacctcagctctttctcctgcatgctggcaaaggagtgaaaaagtgagtgagaacaacgaaaacaatctttaagagttctttgttaggataaagtttgtggtccaagaacatttattctcaccatagtaacacctacatatatgaaggattctccattttatgcatttaaccatccagtatggtcaatatgccagccagcactagctagttaacagcacgcattcaagagagcaaaacagcttaaccagcaaaccattaaaacatggaacctcctcctcaacacagattgttctcaaaggtaggtgaactgaagagctaaagttgcatatccgaaggcctctgctcatataaccatcccttctaaagcaccaacatcaacatatttcaaccataccatcaaaaattacaaaagcaaacaaaccattaaaaaaaaaagatagtagttatgtgtcaaaaagaatgctattctatgttctcaaaagaagccaaaagaaaagagtccaagaatagactgtttaatcaacttcacttgaattcacacttctctctgagaataatagtttaagcaaaatttttggacaattatgtgcactagcgttaaatccctgagcacagcaacgtcacaatgaaagagacagcgatgctgggacccacacacttttataactacattctattcacactccttatatgtgtttgatagttgtacattacttcatatactttaacgagctgtctttgagggaaaggtagaacattaccagattttaatataacaaagtaccatactcagctttcagctaacagcttaagcaactgagaactcaactgattaagaatcaaagcagcaaccactctgtgctacaaacctcagtctacagtaagcctctataacatattgctttctgacttgctctttttgcaataagatttcagtagcttttagaatctcacttttttactctttccctttatgaataaaattggtcacataatacacactactctaacttctatttgccatcagccgctttgttccacccctaacattttccttatggatgaatttggtttcctcagtcatgatgcaggtattttcctgcagtatgcaatcatatggcaaagcagcagtcaagtggttaaatgtgcaatcgtgagaaattttcccactggtgagatgtattctattgtgaaattatgccccaaggtggtggtggaagcctattacctgggtctattttcaaaaaattctccaaagaacaccctgaggaaagccctacattatggggatatgaagaactagtccaaactacagccatcgtcatttcatattggcttaaaacctactgaccttatttcttctcaatttgtatcccattacttcaattgctaggaagaaggattcaggacacatcagatataatactacacaaaacaagtaccagatatcactacagtttagcaagaatttaaccagtaatccctgagttaacactcttcttgcaatgtacaatggacatgagagtactctgtaaactgtatagtagtgtataaattagacttattaccaaatcatactaaattaggtaatagggtgaatggataaacaaattgtgatttttatatatatatatatatatatacacacacacacacacatacatatacatatatatacacacacagtggaatattattcagccttaaaaagaaattacaacatagatgaatttggaaacatgttaagtgaaataagccagacacaaaagtacaaatactgtgtggtcctacttacatgagagatacctagaatagtcaaattcgttgagacagaaagtagaatagagattaccaggagctgaagggagggagaaatagagagttactatttaatgaatatggagtttttgtacaggatgacttttaaaagagttctggaatagataagtggtaatgtacaacattgtgaatgtacttaatgctgctgaattgtacaaaaaatggctacaatggtaaactttatgttatgtctattttacaacaataaaaatgaagaaaaacagataaaatggcaagagtcgtaatgggaacagctctgctcattggctctaccatataacctacatttattttcttcgtggcactgaacagtatttgaaatagtattaacctatttgcttacttgtttattgtctctctcttcccctactagaatacaatctactataagagcacaaacctatgccttctatttcactactttatttccagcatttatgtttcttatcacagagtgtgtgcagaataaatatttgttgaataaataaatagatggaagaaacactacatatgtccttttaattttgagcttggttgctctgcatgatcacacacattttcttatgcccaataacatttaatgtctctacctcttgtaggcagtagaatactttcaattgttgtttatattatatgtaagtcttgtatctgtaaatagaagctaagctccttgacaaaccatacagtatagttctatttccccacaaagtatcttacttttgcatagtgccatatggtatactaagaacttttacatctgtgaccatccttggttcacatgatcatgaggctggcagatggaatcacccctcttgcagagatgagggagcaggcttaaagaaggtaagtgacttgttcaaagtcaaagttagtaattagcacagccagaactcaaaaccagttatccaccaggcacagtggttcatgctgtggctcaacgctttggaaggctgaagcatgaggatcacataaggacagaagttggaggctgcagggaaacgtgatggcaccactacactccagcctgggcaacagagccaagaccctgtctcaaaaaaatgtttaaaacattcttccagcttcaggcccaaagttctttccattaaaagtctgataatgaagaagcagcagcttctccactccttctcgaatctccgcctggttggggcccacctgcttccactcctgcctccaccatgtccatcaaggtgatccagaagtcctacaaggtatccacctctggcccccgggccttcagcagccgcttcctacacgagtggtcccggtgcccccatcagctcctcaagcttctcccgagtgggcagcagcagcttccagggtggcctgggtggaggctttggcggggccagcggtattggagggatcactgctgtcatggtcaaccagagcctgctgaggccccttaacctggaggtggaccccaacatccaggccaggttctgcacacccaggagaaggagcagatcaagacattcaaaacaagtttgcctccttcatcgacaaggtacggttcctggagcagcagaacaggatgctggaggccaagtggagcctcctgcagcagcagaagatggctcagagcaacatggacaacatgttccagagctacatcaacaaccttaggtggcagctggagactctgggccaggagaagctgaagctggaggcagagcttggcaacatgcaggagctggtggaggacttcaagaagaagtaccatgatgagatcaataagcatacagagatggagaatgaatttgtcctcatcgagaaggatgtggatgaagcttacaagaacaaggtagagctggagtctcacctggaagggctgactgatgagatcaacttcctcaggcagctgcatgaagaggagatctgggagctgcagtccctgatctcggacacgtctgtggtgctgtccatagacagcagccactccctggacatggacaacatcatcactgaggtcaaggcccagtataaggagatcgccaactgcagctgggctaaggctgacagcatgtaccagatcaagtatgaggacctgcagatgctggccaggaagcacggggataacctgaggtgtacaaagactgacatctccgagatgaaccagaatgtcagctggctccaggctgagatcaagggcctcaaaggccagagggcttccctggaggccaccatcacagatgccgagaagcgcagggagctggccattaaggatgccaacaccaagctgttggagctggaggccgccctgcagtgggccaagcaggacatggcacagcagctgcgtgtataccaggagctgatgaatgtcaagctggccctggacatcaagactgccacctacaagaagctgctggagggtgaagagagctggcaagagtctaggatgcagaacatgagtatctactcaaagaccaccagtggctacgcaggagggctgagctcggcctatgggggcctcacaagcccccctcctcagctatggcctgagctctagctttggctctgttgcaggctccagctacttcagccataccagctccaccagggctatggttgtgaagatcgagacccgcgatgggaagcttgtgtctgagtcctctgacgtcctgcctgagtgaactgccatggcagcccctcccaccctactcccccctgcagctgccccagagcccatgagagaggccactgtgcaggggagcacagggaacaggagacccacctgagactcagccctagccctcagcccacccgcggcgggagtttactgccgggggaccccccttccccatacctccagctacaaaacaattcatttttttttccaaaataaaccctcagctagctctgccaactatcaaaaagaaaaaagagtttgataatgaaaacaattctaatgtcatatttccataatataaaatagaatatgttaaaataattcctactaaatttttttttctgggcctatgaaaaaagatgccttggccatgggtttgttttaaatgctaaacaagagaggaattacacatggctagaaataaatttagctgattatttgccaatataatattatatatacagttatgcattgctcagtaatcaggatacattctgagaaatgcatcattgggcaattttaatgtgtgaacctcatagagtgtactgacacaaacccatatggtacagcctactacacacctaggctatttaggataatctattgctcctaggtcacaaacttgtaggcaactgtaacacaatggtacttgtgtgtctgagcatatctaattacatagaaaaggtgcagtaaaaatagcatattaaatcttatgggaccactattgtacggacagttcatcattggccaaaacattgtatgcagcctatgactgtacagaaaaaactgactacaaatatatgatggggctggtaggagccatacagcccagtcagtgaagtgagggctcaatcatctcactgtccaattcacctccaggaaactttctgcttcagcccattgaggacacatgggaaggagagcctcataccacccccaccctcccttttcccttcaggagccagaaatccagaatcatatctgaaattcatcatttttaaatgttatcaattaatctcattttaaagaacattctgcatgtcaaatacagcctgggggccaccagggtgtggcttcagttcgaagccatcttatttctgagtaggtagcactttctactcatggactgtgtaaactctgacttgaatcagaaaaaaaaaagcaagaagggaacatatgaatacaaaaaaaaaatcttggttatcttctctgtgcttcttatttacccacattgaaaattttgcctagacctatggacttcaaatgagtgccattatatgaaataactgtgcttataagagtgctttaaagtccttagatttgaagacgtttaatgtactaatccaacttaaaaactgccttccatgggagaatccagaggctaaaacacaggctaaaaacagagtatttattcttgaaaggacaggatctgatgtttctactctacactttagcagtggcacataaagattataattgggaatgaaagaaagaaaaggacctactgaaaaacagatgtcttgagctagaagtagcaatcacagcatctgcactttggcgtcgggagaaaaacactggaggaaaacaataaagcacaaggtataaaaataccaaagaagtcagctggttttctcagttgattggggggaaaatagagtacaaaaggatatttagaatactttggtaaaattctgaagacttaaatagcttatggttcacataagctgagaaatggaggtaaaaggagaataaaatggctgtgcttagtttttctgttactgtaaggcttaaaagacaattcagaactggctcaaattcagactctttcaccaagatcagtaccattgcttctttcttggtatcgtctttcaaatgtcaaattcactccaatttattacatataactttccagaaagcaccttaaaaaaccgcctcactttatttccttgtgaatactctatgctatatttatatattctacctactacataacacagaaagaatgcaggatttggagtaagaatacttggattcaagacttggtcacctgtttaggtagatgatttctggaatcctttaattcctctgagcctcagttgatcattttgtacaataaaggtaatatgacttgccttaactacctcacaaggttgttgcaaggattaaaaaagtgtctctcaagttttaatcttaaaaatatattatctacaaagccaaaggttcatcctccaaggaaactacaacctaactgatcatttaacaaacgttattaaacatctactgttactttaaacactggcaatatagctgtgaaaatgacaaggtccctgcctgcacacatggagcccataatctgattacagttgtaaatttttaatttggggtttgatgataacatagtaaacaaaaaaaattcatctttcagctagtaagtagattacaagtttgtgataatgtattgtttttcattaattttcataaagaaaagaatataatggcattaccttaattaaattcaaagaggcacttagcctgaaaccacagagtaaaggcattatttactacacatgtgtcattggaatatagtaattattagtcaccacagacacacttgcaatcatgcaaacataaggaaaatgcggctgcttactcaaagtttgatttgtggaaacatggtatattcatccaaaacagctattacgaagttcttattttatgcaaggccccacagtggacactataagggataggtcagcaagccccagtttcttgcttccttcaaaggacttgtaataaaggaataaaagatttgtgagctcatgcaagtaagagaatgatgtatgaatattgaagaagggattatagtggcttagaaagagataccaaatttaaggagtcaaaaggtgacttcatgaaattttgaccaataatgcaaagcaccagaccagtagtcaaaactccaagtttgagtctaatgatgtattcacccaaatcaggttctatgaactgaagcaaattactttaactcagtttttccatctatgaaataaaaaaatagaaaactaccaatattctgaccttctcaaatccttgagttggaaaaactcatgactgaatgaacagatttttctgaataccagttactccacagttttgattgttgcattagataacatatgtgaagtactctatttcttacactaagtaggtcctcaataaatgttgaaccctgatctgaagtaggaaatagttgaactaaaccttaacatattggtaagattttaatatagagagatatgaagaaagtaatgtcaagccaaaagagcaggctggggaaagacacagaatttagaacatgcaaagagtatgaatggcaagtaatctcatttggctccacgctaaagtgtattaagcggaggaataagaggtaagcttgaaacgatggcgctgacccagaatatttagaatgctgacggcgacatggaagtgttttcccttaatgtagtaggtaccagcgaggcactgggggactgcaaaggacatcagcctaaacatgtaaaatctatacaaaccctttgcatcatttgatgatcaaacatctccaaagaaagcccatcaacgagctctttgggtaatatatttgacagtagctcatatgacaccactaccatttccagttaacataaatagaaagaaactctttgatgattatttgtagtcgctcttttttagtaggacaccggtgaatgcctctctcaatattaggtgcattgcatttctcagaatttatcgttaatccagctatcttaaaaactagagatgctaaatggaaagatttgtatcaataaagtacagagtttataatttgtttcagaaagaccttcactatacatttatgaatcactatggtactccatataaatacaaaagaaagcatgacaaaaatatgttctctaggctaccaatttgcactgtgtcttaaaactactatgcaatatgtttgtactatgatgagggttacaataaaatgaagaataatttgagggagagaaaaagaaaaaagaagctaaaagataattaatatctaagctaaataaaataagaaaaacaaaagcatttcaaatgtggaagcctgccttcttttatgagtttttcactccattccattattaaaattcagccaaatttcttaactgaagtaagacaatacttgctaaataaacttctttgtttctactgtaggaagcatctaaatttagagtttcttatttttacaaacctctttcaaatggatgaaatattttcacagtcataattcaatacagtgagtaagatgtttttccctgtattataaaaataagaaaactgaggctcagagggatgaagtgacttgctcagtcagagcacacccaaaagggacagctttaagacccatatccaggtcctctgattacaaatctcttgttccttctagcatatcatcctacagcaatactagtgggcatgctatgcgtcagataaaagagtagagaaggagttcttggcattcacaatagttgctcttttgcacaaagggagaagaatgacatagtgccagggtgcagggcagcttcattcctttttcatttatctaacatagtcccacactttccatactgagaattgtataaaaataatcaagttcacagaacccttgacaccatctgctgacaccacactgtacaaacatcaaatgtagatgataatacaattaagttttaatctactttgggacactatccaatttgtggaccatctggggagcatgtgtcctccacctcagttcacctttgctgtttgcctgattctggactaactctttctgtgtgaagaatgaaaactgatcactgcattaaaatataattcagaaggcaatggtatgctggaaaactacataattgtccccaatggtaaacagaaataatttgaagttctctgctattagaacttataagcattgctcttttcctccattcacgccagtgacgtgagtgtcggtgttacatcatggctgaacaggcttcattccactttctgattaaagagaatactatgacagatcctccaagaaagatggaataggagaaaaaatgattctcttctccttccaggttttttattcctgtgcacattagacagcatgtctaagggtactatcttcactccatcacaagaaccaatcagaaaggaaaatagagtgtacaatcaatggcacgcactcaactctggaaataatccccatagttatgtcaaataattggttaataggctatgctttgggtaaggcctccctttgcacagaagaaagcatttttaccaaagccagagctttcttctcctcttttaggctcagacctccctcttgtcattaggttcatacctaaaattcagaataaaaaatttaaggagacctgacccattaccatgggagttacatcacactggtcagtctggctctaatgtgttgccccagttctggaaattgagcttctaccattttcccaggcctgactccttttcttgggtacctgtaaaagacctcactttgttctcgctaccacccccctgcccccactgccactgccccatggaatgctgctcctgaaacttagtcctgctctttgctacctccagacaacgtttcttcacactgatttcccacttgtatccctcctgccctccataagaatactctgggctgtattgcttttgccttatccctaaatgtcacgctttgcctaccagaatggatcctgagaacacaagttaggcctgattccagcactgggtccgcagagtggcaagttctcgtgtgggtcccagtggtccacatctgtgtccacttgctggagttgatcactaagggcttacagtctaattgaaaggatgtacattaacaaaaggattggtttttgacttttgttgtcttatactgttacctcttacaggcacttaaggatgaaatagtatggttcatgaattggggggctattggcataattcagctataattataaccaacttataattgacgatgtaatgatagtactgaatagtgggaaacttgggaaccagacttcctggactcaaaccccagctttgacatttaccaactttgggccattgggcaaaattaacgagtgcctcaatttattcaactatgaaataaggaaaatcataatgctttctcaaaaggctttgaggatgaaatgtgttaaaatatataaagtgcttagagcaggacctgctcataataaatgctcaactaatagatgtggattaactaggcaggctgccatatctaaaaaataataagaatcacagagaagaccaagtagggaaatcagtcccatattgaaattcactgttaattctttcaagaagacttctctgcccctccccaggacaagctgaatttgactccaatacatcagtaactggcagggaagtctggagtactatgtctaccttgacagcttattacctacattgaagttttttatctgttaaatgtagaaaatattgcttcctacctagtagggttagccttattacaaaattagttaagacagataaagcccttagaatcatgcctgacatacagaaaacacaagtgtgagctaattgctttttttttttattatactttaagttttagggtacatgtgcacattgtgcaggttagttacatacgtatacatgtgccatgctggtgtgctgcacccactaactcgtcatctagcattaggtatatctcccattgctatccctcccccctccccccaccccacaacagtccccagagtgtgatgttccccttcctgtgtccatgtgatctcattgttcaattcccacctaagagtgagaatatgcagtgtttggttttttgttcttgcgatagtttactgagaatgatgatttccaatttcatccatgtccctacaaaggacatgaactcatcattttttatggctgcatagtattccatggtgtatatgtgccacattttcttaatccagtctatcgttgttggacatttgggttggttccaagtctttgctattgtgaataatactgcaataaacatacgtgtgcatgtatctttatagaaggacatgaacagacacttctcaaaagaagacatttatgcagccaaaaaacacatgaaaaaatgctcaccatcactggccatcagagaaatgcaaatcaaaaccacaatgagataccatctcacaccagttagaatggcaatcattaaaaagtcaggaaacaacaggtgctggagaggatgtggagaaacaggaacacttttacactgttggtgggactgtaaactagttcaaccattgtggaagtcaatgtggcgattcctcagggatctagaactagaaataccatttgacccagccatcccattactgggtatatacccaaaggactataaatcatgctgctaattgcttttataagtgtagcctacacaatggtcaggaagatgctatgatgaaaccagaatgtccctaagtgattagagccaggaggatccatgtttctggcaaagggggaaactcattagctctagtcatactcaggacccttcccactgaaagtaaattcaaatcttaactgtaccttaaagaagagaccacatggagaaaaacacaaaacactgagaccagaaggaagcaatcacagccacattctcctacaaacacagaaagtgggcaaaacaaggataacaagtttccaaggataacaactcacattttgcaaagctttaaaagcatgtactctttgaaaaattcagtgagagggtgcgtttaaaagatcaagtagataaaaatactttttgaataaaaattagggtccccaagcaaggatgcaacaatccaacatgtacaggtaggaggcaaaaaggtgtgaacacaaaggaggatcaaaacaatgtaaagaagagaatttcagagtggactgacatgtggtaattgccagattcttagtgaaaaggtcccagaaatgaatacctgagttctgctctagtataaacatatattagtttatttcatggtaaatttcagagcctatttcttattccaaaaggtggactcagttattttcaacaaaagcttttttaatgctacccctctccattggaggctaaactcccctggagtggttggagactgtgtttccagcagcaatgggctggccttgattgctaactatctgagtgagcttaggaaagttaccacaactccttctccattcatctcccgtctacagagtggacataatgctggactctacccaatagaagtaacatgattattgatttagctaacacacatgatgcacttaggaaggtccatgacacaccgaaagcattatgtactttctgttgtctcataaggaaccaagttaaagaatgtcaccattattttttatggatatctagactaagctgaccctattgagtattgcagtcaagattctaaaggaaaagatcaaaagggacaaacgtgggcaaataacacctctcttagaatctgttctgcgttgttccctatggctcagtctgcaccactagatttaacagggttcattttctctagatgtattttaccttacaatctggcttactaggaatgagctccctgagaagttggctggtttctttgttctataccttgcatttaatgtagttccagacacaaactaggttctcaaaaaatgagtgatgaataatcaacaaatggatatcaagcaggaaagaattgttctaaatccaagactacttgccaaaatcagcaaacttttaaattcattaatagaacaaaattattattttaatattattttaatagtttacagctaaaagcatcagcagtgctttttaaagtgaattgcgccaaccgctatgttgggaatcttgaaatgtttttgccgaatactactgccatatccttctgtcatttagagactttttaaattgttttgtctgccccaaatgttctgagacacttgtgagttctctatgcattggactgcctacacatagaaaaattatccacttccccatcaaccactgactttttctattaccaaatgagaggttctaaaggcccacaatgactaggataaatcactccatttcttttactctattaaagtagatattttatgttccactgccacaaaatccaaaatgaacaccaaaaatagcctgtgagttgaagactctcattttaaaatggcaccacaatttatcctatttcttactgtaccatgagcattacattattcattagaagatttggtttttaggcagcctttgctgcctttgctgagtgtaggcttcccagtgcaaactggtgatttaaagagatatcttccagagataaggtcactttgtggattcccacctgtgtgaccccaccgtgtttgcataaatataaatttactctatgacattcctgtcatgtctgctcagtgagcaagtaatttgccactctcattactccaggtacaagataccttgtgaaaaatcaatcttctttctgcttcatacatcacagcttcccccagtcacccagtgcattctgactctgaaatgcagctgtgggataaagacacaggtctgtttcagcaggctgcattgtccaaaggggctaatgaatgttacacctcactgggaaaccccatcttggggcaagggaaatgtctatataaaaagcaaatgcgctgttttgtgcaaagcatttcctataccagagggagggaggtcttaatagtagaacaaataagtagctacagggggtttagcacacagtttttcagaaatattaatctgccatctcttcaggctacaaatcattttctctacctcttgacaggttaaattttgactttgaaagacaatccattgcaggatcctgactggctataatatgccagacttctccccggggacagagtcacctccctccagcagatgaaaccattttcagtgttttccttggtgctgattgctgtttttccacccatgtatcctcctcaacatcgtagcataagtgccagtgggagaaaaaaggcagtggaaatattttcattttgtatctattttctgatccaaaaaggggttatatcctggaattttcttgctatatagtagcacagatctgttttagaaaatcaccaattcgaatgtcaggaaatatgttttgagtacctactgtgttctatttctggagctataaataaagtaattaacagaagtaacatagtccttccatcatgtaatttatgttccagaagggagaaaataaatgaatacctaaataaaccaatgtgacaattttaagtattgatcagtgtttggggggctaaaacattagataggatggtgagaaagattcagccaaataaaccagctgtgaggaagaagaaaagcagcagcagaagcagaggcagcagaagcaggagaagcagaagcagtagaagcagcagcagcagaagcagcagaatcaatagaagaatcagaatcagaagaaaaagaagggctgcgcgcagtggctcatgcctgtaatcccaacagtttgggaggccgaggtgggcggatcccctgaagtcaggagttcaagaccagcctgaccaacatggagcaaccttgcctctactaaaaatacaaaaaattagctgggtgtggtggcgcatgcctgtaatcccagctactagggaggctgaggcaggagaatcgcttgaacccgggaggcggaggttgcagtgagctgagatcatgccattgcactccagcctgggcaacaagagcaaaaactctgtcaaaaaaagaaaagaaaagaaaaaagaaggtagagtaggaggaggagaaggaggagggaggttggggagcatataagcatattctgggcaaaataaaaggaatagaaatagtgaaatagagagaaggcagtgtgggaggggcagtatgtatgagtcagcagagtgatcctggcagaagtcagtccacagaagcctgatggccatgagaaagaactgggatttattcaaagtgcagtaggaagccactggaaagtgaaagtggagagggctttgaaacaaccaggcaattgaaatgatctgatttacgttttttaaagatcacattaaaaagtgctgctgcatagacttgtagggggtaaatgtagcagaagtagggggaacatctaggatgctcgggccacagtccaagcaagttatgatgatggcctgacctacaaagctatcagtagagaggaagaaaagtacacatatgtgtgatatactttggatatacagaccttagaacttggtcagagatttgatgagagggtagcaaagaggacaggaatcaaggacatagtcaagatatttggtttaaaaaactagatgaatattggtgtcattactacgatggagagaaagtggaaatgagttaattgtctttggaacatattaagtttgagaagacagatgtccaagatattacgtaggaagttgggaacacaaacctgaagcttagggagaattaacttctagagcacatagacactatttaatgccatgcatgtaaatgagctcactcagggcaggggtgccagctaaaatataagacatccagtcaagtttgaatttccaaagcagtgaacaatgatttaatataagtatgtccaaaacattgcataggacatacctatactaaagtatgtcctggctgggcatggtggctcatgcctataatctcagcactttgtgaggctgaggctggcagatcacttgaggtcaggagtttgagaccagcctggccaacatggaaaaactccgtctctactaaaaatacaacagtattacctgggtatggtggcacatgcctgtagtcccagctacttgggaggctgaggcacgagaatcacttgaacccaggcagcagaggttgcagtgagaaaagatcgttccactgcactccagcctaggtgacagagtgagactccaccttgttaaataataaagtatgtcctaatagtttatagagtgaataagtaaataaataaatgtgtatatgtataaaatataaatgtttgcagtaaaaaaaatctgaaattcaaatttaacttaaatgctatatttttatctcccaacaatctaggcaatcgtaactctgagtgagattataaatagagaagacccaagatctaaaacactcctaactttaaaggtggaacagaggaaaaaagaggtagcagagaagactgagaaggaggtgccagtcagaagaatatggtttcacagagactaacagaaagaaggtatcccaagaaggaaatgctcaaccgagtccaaagttttgactatggcttaggggttgaataggatgagcttaaacaagtaaccattacacttggcagcatgcaagcaaggcttggtgaccttgaaaacagcagctacagtgaagtgggaggaaagtaggaggaacagaagaccctctggagtgagataaagagataaagaagtgaatacaatgaatatagaaacctcttccaataagctttgctatgaaagggagaacaaaaactgggtagcagctatgggagcacgtagggttggggagatacaggacgatgtgtgtgtgaaatggaaatgatctggtagagagggtgaagtggaagattcaggagtgagaggggagaatggcaggacgaaagctcatgagagggaataagatccagaccatgatggatgggttggctttgaatagcagtggagacaactcttccattttaacagaaagaacatagtgaatatgagtctgttggtttcaaatttaataaacaactccaaagatacacgtacataaaaatattccacttataatcaaatattttctatgttttagtttgtgcaaaattaccctgctattatatactcacataaacaaatatagacatattcaaaattagttgtttcaagacattttgatagctaaatgaatgttagataatcacttaggaaaaaaattattcatgttctcttttacattcctagtttactaccatttatattttccaccttcactgtttatgaatagtatttatcttagtttccctatatgaacccaagtcaaactgatactgcttttagaactgataaaatatggatgcagaaaaactcctgattattaaacaaactatcatgtggttatgcatcgatttacactgtccaggctaaacaggcctctttctcagcatgtttactaccatttatattttccaccttcactgcttttgaatagtatttatcttagtttccctatatgaaccctttatttttcatgaatatgggaagtataaaatagttacaacaccaaagttgaggtttttctaaatacaaattagacattcctaaataacatttctcttcactgtgccataacgtacatcattaaatataaaagttttgctaatacaaagtgaaagttaatactgccaaactccagagaaacaaaggtcagttgctgtgggaaccaacctttggacctcttgacctttgcatgtgttgcattaatgtggatatttgcattggatctactccaaaatataaatcaggtattcactaatacagttataaatgcagattagcagcaaagagacagtgctacatttggggagcacaaagacaaacagtaaagacaattgtttaaaaatagatatagtatctttaaaacatttctctcagtgtcatgcagtcatctgtcacttaacctgaagtcctggtgatattcatacatgaacacaattatcccattatacttaatgttcttgttaacaaaagagtgatagtgtggtaaacagaattccctggtttattaaaggataattattgcccacatggttcttgtaattttcaactcaaagctcaaagctaaaacaatcttaaattcttttgaatatttaaaggaatttgtctcttagccatatcctgcatttgaagtcaaactgatactgcttttagaactgataaaatatggatgcagaaaaactcctgattattaaacaaactatcatgtggttatgtatcgatttacactgtccaggctaaacaggcctctttctcagcatgtttactaccatttatattttccaccttcattgtttttgaatagtatttatctcattttcctatatgaacccaaagaacacagacagagcaaaattgaagttccattccatttttacataagccaagggcgttatgtactttcagggtctggtacctagcagtgagccaataaacatgcatggatagaagcacggatggatgtatggatgtccagaaggactatgaggagagtaagctatgaaatgtagtcagacaataaaaatagaatcataaatatatgttttatatcagttgagaaaaatgagacatagccaagattttaaacaatctgctacccttcctaaaactacaagtaggtgacaaatgtcttaattccatggtttttcttaaagaaaaacctatttcttctacatcctttcaccacccataaagcatacactacccctcccctaatctaccgactcacacactaaaaaagtgaaacagttctcccaagtattaactcaatgatactccaggctcttatggctaagtttaaaaactgatacctgagatttactcaaagtttccaaagcaagcacaaatacagtgtggtaaagagttggagagaacagttcacaaagacccatgttcccaagaataacgtccatgcttacttcagaagaccttaacagttcagatgtttggcaattcacacctgtaaatcataaactggggcaatctcttcagagagtgaacgttttagaggctggaaatatgtcattctcatcttcgtatcacaggagtccatgccacacagctaaatagtaggtactcaatatatgtgtttactggatgaacgagtgaatgaaaaaatgaaggcatccatgcctaggtaccctagtaagaagtaaaatataaccagtaatctagtatcctaaagatacgtgtcagaaaacagattataccaactcttcaaatatttggttatatacagaagttagcacccccaaaaacagattgccctgtaaataaggatttcatgaaactacaaatccatcaagcaattagtgagagagaagacagaggagaatgagagagagaaatgagagggaagggaggaggagaggatgtaaagggaggggagaaaaggaatacaactaccaaagggtgatgggtcagcaggatggtacctaaaatctatgctcatcgatgaggcaatggaaagccagttctttatttttgtttcatttctttattttatttaaagcctaaaacttagccaaagctaagtatgaggttcacaaggaaagtaatggctctggggttgagagttaataaaattctggaatgaaaaaaattagcaatggcagtcaaaagcacaaattaagccaagatctaattatattacactttcatgaatgtaaaaaacattacgaaatatttaataatctaccaaactccacacttttcatccacccagggattccatagattgcatacaattatctcttcagttaaatacacagcacttggcaagcacttagattcatgttcacatcattgttcctgatattactaggccacttcaagtgcttgaagctcttcccttgccattctctgtgcttagagagttttaggttataaggatttcaatctgcttgttttaatcagtagttctgcactatttgcctgtaccttacatgtgagccttttggcagatgatttatttgatttactttattcttatcttgccaacacttctaaaattgaataaaggaaaaaagaagagggctcagcaggcactgaacaacatgtcacattgtcaaccaaatgctaaatatatattctgatttctaagagaccctggaacctaaatttttaaaaacagatgtaactgcttgcattatttatgatgtttcctttcttttgcctgccatcaagctatttgtgatacaaatagcaaatgggggatataaaagttatctgataacatgataatctagataatatcttatctctattgagggtccagatgatctcaaaaatgactgatttcatgcaatattacttttccatattatttgatacatataaaataagtaacataggtatatttagaaagcaaaataataagacaaatatgaaccactacctaccaaacccatcaccaatttaataacaataacattaccattggtcttgaaagacaaaccccttgttatctgcaggggattcattttaggacccatgtagagtggatgtgcaaatccttgagacaaaatgatgctgactgtacatccttaatgaatgtattatttcaatttgtttggtttcagcttcataaatatgacattatactatgtgcaatttcctgaaacttgcttttttcactcaacattttacaggatatatctgtaggttccgcaaccatgatatagtagtccattttcacactgctataaagaactgcccaagactgagtaatttataaaaaaaaagaagtttaattgactcacagtgcagcatggcttgggaagcctcaggaaacttactatcatagcagaaggggaagcaggcatgtcttacatggcagcaggtgagagagagaggaatgagtgtgaaggaggaactgtccaacacttataaaatcatcagatctcatgagaactcactcactatcacaagaacagcatagggtaaactttccccatgatccaatcacctcccacctggtccctcccttgacacatggggaatatggggattacaatttgagatgaaatttgggtagggacacagagccaaaccatagcatactgcccctggcctctcccaagtctcacatattttttcatttcaaaacctatcatgccttcccaacagtttcccagagtcttaactcatttcagcattaacccaaaactccaagtcaaaagtctcatctgagacaaggcaagtcccttcctcgtagaagcctgtaaaatcaaaagcaagttagttacttccaagatacaatgggggtgcaggcattggataaatgctctcattccaaatgggagaaattgtccaaaagcaaggggctataggccccaagcaagtccaaaatccagcaggacagtcatcacatcttaaagctccaaaacaatcttcttctaaccatgtctcacatccaggtcacactgatgcaagaggtgggctcccatggccttgggcagttctgaccccatggctttgcagggtacagccccacccaaccaccacccccagctgctttcacagctggtgttgagtgtctgcatcttttccagatgcatggtgtgggttgtcagtggatctacaattctgggctctggaggacagtggccctcttctcacagctccactaggcagtgctccagtggggactctgtgtaggggctccaaccccacatttcccttctgaactgccctagcagaggttctccatgagggctccacccctgcagcacacatctgcctggacatccaggcatttccatacatcctccgaaatctatgcggaggttcccaaaactcaattcttgacttctgtaaacccacaggactaacatcatgtggaagccaccaaggcttggggcttccaccccatgaagcaacactccaagtggtaccctggccccttttagccacagctgagactgaaatagctggaatgcaaggcacagagcagagggaccctgggccctgcccatgaagccattttttcctcctagccctacaggccagtgatgggagggcctgcagggaaggtctctgacatgccctggagtcatgttccccattgacttgatgattaacattcagctcctcattacttatgtaaatttctgtaggtggcttgaatttctccctagaaaatgggtttttcttttctattacatcatcaggctgcaacttttccaaacgttttatgctctctgctcccctttttccaaacgttttatgctctgcttcccttttaaacataagttctaatttgaggtcatctcattcaagttcaaagttccacagatctctagggcaggggcaaaatggcaccagtctctttgctaaagcatagcaagagtcacctttactccagttcccaagaaattcttcatctccatctgagaccaccttagcctggacttcattgtccataccattatcagcattttggtcaaaaccattcagcaggtccccaggaagttccaatctttcctacatcttcctgtcttcttctgagccccccaaactgttccaacctctgtctgtgtgggacagacaactctgtggggacacagagttccaaagtcacttccacattttcaagtatctttatagcagtgccccactcttggtaccaatttattgtactagtccattttcaccctgatataaagaactgcctgagactgggtaatttataaagaaagtaaggttaattgacttatagttccacatggctgaggaggcctcaggaaacttactatcatggcagaaggggaagcaggcacatcttacatggcagcaggcaagagagaggagagagggtgaaaacaaaaactatcaaatacttataaaaccatcagatctcatgagaattcactcactatcacgagaacaacatgggaatctgtctccatgatccaatcaccattaaccaggtgcctttcttgacatgtagggattatgggaattataattcaagatgagatttgggtggggacacagagccaaaccatatcacatggattcatccaaccgtggatcaaaaatattcaaaaaattaaaaacttcacctgtactgaaaatgtatagacttttttgcttgtcattattctctaaacaatacagtatcacaactatttatgtagcgttcatattctattaggtattataagtgatctagagatgatttatagtacacaagatgatttgcataggttataggcaaatactacagccattttatagcagacacctgagcatctgtgggagattctaaaatcaatcctcctcgaatactaagggaagactgtatttcgaagctgggtttgtgttgttgcatccagttgtatttcattcattttcacagttgtataatccattgtatgaatataacaaagtatacacatccatttcttgtcaagggatatttggcatatttccaggtttttgccattgtgaacaatacaactagaagtattcctatacatatctcttggttcacatgtgtaagagtttttctaggacttatgcatgagaaaaaattattggtcatagggaatgcatgtgtttatgtttacaagataagcctaaatagttttccaaagtgattatcctaatttacatccccaccagcaacaatgtgtaagtttccattactccacacattgccaacacttgatgtagaaaagcttatatttctgtggcattctagtggtgtgtcagtccattatcatgctgctaataaaggcatacccaagactgggtaatttataaaggaaaaagatttaattgacttacagttaagcatggctggagaggcctcaggcaacttgcaaacatactggaggggaaagcaaacacgtccttcctccaatggcagcaggaaggagaagtgctgagcaaagggggaaaggccccatataaacccatcagatctcagtgactatcatgagaacagcatgggagaaccactcccatgattcaattaccttccatcagatccctcccatgacatgtggggattatgagaactacaattcaagatgagatttgggtggggatatagccaaaccatatcaagtgggtataaaatgatatccatttttggccttactatgcatttacctgagtgttgctgaagattaatgtttgttttttaatgatgcttgtttttaacctatgactttcattggtatctattaatttctgaacagtgaataatttttcaagtaagcagacagtattatcatttctttgtttccatcaacaagatcatgtcaagtttttttcattaaattggccaatccatgtggagttttgagctgtgtctgtgattacctgttttggtctactttattacaggtatgttggaatctcttttaagaagctagacacttttccatgaactttaccaaatatatgtctttataacaatctttaggaaatgtatttgtacatatgttcacttgactaataatcttttcccaatagtgttttgtatattttctaagaataattattctaatgtcaaacttaatttgctttccaagttttaactcttcaatttcacttttttttttttttttttttttttttttttattatactctaagttttagggtacatgtgcatattgtgcaggttagttacatatgtatacatgtgccatgctggtgcgctgcacccactaatgtgtcatctagcattaggtatatctcccaatgctatccctcccccctcccccgaccaatttcactttttaacaataattttaatcctattcttcaactttgtagttgaaaaacattctataaattatattgttactttccaactctgatgaaacaaatatatggtacttctataacaaaaaaaaagacacacaacataaacaatatctggaacaaaaacttattttctccagaagccatttgaagaaagcattagtacttggcctgtaaaaattatttttttcaggtaagatcagaagaagtactataggagttgaattgaaggcaccacactaatcaaacatttggctccacacaggtttgttacattaattatctgtctcacacaacatcgggaggcaatttttgattgtataccatgccagttactggttattacaatacaaatagatatacatcctgcctctgatctgtcattatataatttctaagaatgggttctgtttctttgaatattttcatgcatacacatcaaatttttcttattcattgcacatgactagaatagcagtataacttctatcaaacacagttttatgactttataggacttagctagctatacctgtggataccacttccatctctgaacctctgccagttaaactattttattaaaatctattgatgtaatcatggtgcaggaatgttaaaaaaaaaaaaaaaaaaaaaacctgtatctttctggtatggtactataggaatccagcctcttggtaacctgttacaccgaggctgtctacaaaatgatgtaattgaagagttctagccaaactataaaaccaaggaaatatatattatctctgtaacagctttacatctaaaagatgaacaactgtcactaactttaaaataagatgtcaatacgtgacttctttccatatttccaaccagttcaaagctggagatggcatacaatcaatgctcagatttaaaaatatcatagaaactatctcctgtgctagagttaactttgctgtctgcctcttcctggcctctctgtaacatgaacacagttgagcatacccttattttttaacactttcctctcttctgggagtgaggctttgaacactctcacaatcttggctctcctattgccttactggcctctcactgtcagggtgttttgctggcatttgctcttccggctgacctctgatggttattgcagcacctcaggccctgttagagccttctctgtttacaattttgacccagatgatctcatgtctttaatacaacctcttcactgttcattcacaacatttttctccagccttgatatcctatctgtgccaaacctgcacattcaattgacaatttggcaccaccagttaggtagctaacaggcatctcaaacctaacatatcctgagtagagtgatgcattttcatccttctaccctgtctacgatccctctcccattcttcattgcaccaccatccaacctagccaaaaatttataagtcacctgtgatttctccctttccctcattcccattttcaacctgtcatcccatcattttaaatattctttaaatccatccgcttttttacacttctattcttgcccaacgctgaccttcacttcaacaatgaactcctatctgatctctctgcttctattcttcaccacacaattctttctactaataacatacagggccaccattttctacttcatgtgtaaatctcaccactgccccacttgaaaaattacagtgtagtaccaatgtactatgacttacaataaaatcccaacctccttaccataacctaatagactactagggatctggcctcattctgcctctcccatttgaccacctatccttctccccctccctcacttcctttgtgaaactgccaaactcaagttctgaagcccattacactgctcattcttcatttctctcttcaagtttaatctctttagagaggctttccaattatgtgtacttcagcactcaattcatttttaccacaatgaacactgctatcaataatttatttataaatgttttggtatattttctgactccagcatctaagttccgtaagagaaaacttttctgtcgtcttcaccactgtgttcccatgtactgagtctagaacactggctggctcaataaatatttattagataaataaatttttaaagcccctctccttaataccaaataaccaccaaaaaacaaggccatgtttttgttaattttcatgtcaaattttaaaatattggataaattgcttgatttgcgtgctattctttaattttaagaagtagtcacttaaaaattctacagtttttttgtatgtcaactactgtatgtgagtcaaaaatgcaattgcactcacaaagtcaaaaagttcacttctatttttccttctgagagaattcaagagtaaaaccctcttctttacaaagtcaattgtaatttacacccattaagttatctgcctttccagacaatggaataataatagtctaagtagtttgagaaaaatgcctggcttttggcaagtcctgctattcttttcaagatctatcatctgaaattactgaagatttctgtatcttcaaagctcttcttttcagacactaagaaactgacacaatattatagaagttaaaagtagaaacctcaaagcatccttctgtatcaactacattattaatctgataaacataaaatatgtttatcagagtcaatacacaccagcagctagtggtggtgttctaaaaaatataacacacacaatgggtcctcagactgtgcagccaccgtaccaggttgaatacaaacaatctccagtatggaatctggacacttggatcaaaaaacactacaggtttttccctagtggtacaaactccccaaaaactcatgtatttaagaggcagagtagaaaagtgagaaggtaaagattttagatttaaattcaaaaatgcagccctgccttttactagtttgtacttaagcatattacatgtttccttcatgaaatattcttggagcaaccactctcccaggtgctgtggtaggtgctagggctctaaaaataaagtaagatttggtctttgatttcaaacagtttacagctttagttttctcctaaataaaatgggaataatactactaatcccattgatgatcaaccaaggtaaagaaggcaacatactcagcaaaaagaaaagactcagtaaataacctgtttttataattctcaactaatggtctatgtgggattccccctagcaacttacggtatacatatgagagaaaaatttagactcattccctttccctcattcggtcccactggaaaaaaatcatactctaattattgatttgggcataaaatgaatgatactaaaaaacagtttatttgcaaattttcagtgtgcctaaaggtttagttaataaatgtttcattgtcctcaagtctttgattcaataaaatgttacaaaaatctactgtgttgattttaccaatgaagatgtttttaaacatagtatcttcaacaggttgccattaaaaaatagatactaaaaagcagtcagaggaaagcttaccttcagtacctactggacattcaaaaggttttgctccttttgatttctggatctctactttataataattaattggttatgtctaggaatatgaccaaacagtattattctattttgtagagaattactatgccaaattcagtagtacattatactcctatggtgtaaaaaagctattttatgactatcttaagaagatagtttcttatcttctcacagcataagagattactgttcaaaagtctaggccattaccaggccctctaattgtgctaattatttgaaataacttaagtaccacaaaagaaagaccagtaaattgtcagttcttttgaaactatagttcaataacccaatgttactattaccctaacatcaagattctaatttagagagttataaataacaatgaggattcaaattaaataaaataaattattagcttaccccctcagaagttaaaatggtcttgatattatttcattagcattgaggattaggtttaatattttttgtaaatgaatgtgtaaactgcaaagttctaaataaatgtacataattagcatgaccagataatctcaatatcaccagatagatcattgttacatatatcaaagacagtgggggtcaccagaaaaaatatcctcatatccaattagtctcaaatgagatttcaatcaaggaaaagctcttgtcctcctcatgtatgaaagcaaaggataatgcagaatttctttttcatacacaggagaaaataactttgaaaattactgaaaaggcaaatactcattttattaaatcccctaacaaaatgcctttgacaactcttgattgccaccaggcacacagacacactcacacacaggccccagagctctctgcttttcaatactttaacaattcatctgagtatacatggagaaagcctgaactcagtaatcatgttgttaacatacatctttactactttaatctctcttttaacaaagaaagtatactaattcagagtaacttcagagacatgaaattggtccttaatggattgtcaagaaaaagtatacctattccaaatattgaatcttcattagcaaatacaaaagagccacatgtagcccaccacactgcagaatatcacactcggtaagttatgaggatgatgtcataaactcttttacaaagtgatatggtttggctgtgtccccacccaaatctcatgttgaattgtagttcccataatccgcaaatgtcatgggagggacccagtgggaggtaactgaatcatgggggtgggtttttcctgtgcagttctcatgatagtgaataagtctcacgagatctgatggttttataaagggcaattcctctgcatatgctctcttgcctgctgccatgtaagacgtgactttgttcctcctttgccttctgccatgattgtgagacctctccagccaggtggaactgtgagtcctttaaacttcctttcctttataaattactcagtcttgggtatgtctttattaacaatatgagaacagactaatacagtaaattggtactgggtagtggggtgcttctgtaaagatacccgaaaatgtggaagtgactttggaactgggtaacaggcagaggtttgaacagtttggaaggcccagaagccaggaagatatgggaaagtttggatcttcctggaaactggttgaatggctttgaccaaaatgctgatagcaatatggacaatgcagtccaggctgaggtggttatcagatggagatgaggaacttgttgggaactggagtaaaggtaatgcttgctacgctttagcaaagagactggcagaattttgcccctgctctagagatctgtgaaagtttgaacttgagagagacgatttagggtatctggcagaagaaatttctaggcagcaaagcattcaagagctgacttgagtgccattaaaagcattcagttttatgtattcacaaagacatggtttggaattggcacttaggtttaaaagggacgcagagcataaaagtttggaaaatttgtagcctgatgatgtgatagaaaagaaaaacccattttctgtggagaaattctagctggctgaacagatttgcataagcaatgaagagccaaatgttaatcaccaagatagtggggaaaatgtctccgggacatgtcagagacattctgcacaggccctcccatcacaggactggaggcctgggagaaaaagataattctgtgggctgggcccagtgccctactcttctatgcagcctcaggacatggtgccctgcatcccagctgcttcaacttcagccatggctaaaaggggtcaatgtacagctcaggccattgcttcagagggtgcaagccccaagtcttggcagcttacatgtggtgttgggcctgttggtgcagagaagttaagaatgaggtttgggaacctccacctagatttcagaagatgtatggaaatgcctggatctccaggcagaagtttgctgcaggggtggggccctcatggagaaccttagctaaagcagtgtagaagagaaatgtggtgttggaaccctcacacggagtgcccactgagacactgccttgtggatctgtgagaagagggccaccatcttccagaccgcataatggtatccaccgacagttgtagcatgcacctgaaaaagctgcagacactcaacacctatgaaagcaggcaggagcgggggatgtaccctgcaaagccacaagggtggagctgcccaaggctatgggagctcaccttttgcatcggtgtgccctggatgtgagacatggactcaaaggagatcattttggaactttaagttttaatgactgccctattgaattttgggcttgcatgaggcctgcaggccctttgttttggccatttctgctatttggaatgggtatattacccaatgtctgtaccccattgtatctaggaagtaaccaacttggcttttgattttatgggctcataggcagaagggactgccttgtctcagatgagactttggactgtggacttttgagctaatgctggaatgaattaagactttgggggactgttgggaaggcataattggttttgaaatgtgaggaaattagatttggaaggggccagggtgaaatgatatggtttgtgtccccacccaaatctcatcttgaattatagctttcataattctcatgtgtcatgggagggacccagtgggaggtaatcaaatgatgggggcagatctttctggtgcttttctcatgatagtgaataaatgccatgaaatctgatggttttataaaagggcactccccggcacacactgtcttgcctgttgccatgtaagacaacaggcaagacaatgtatgactttgctcctccttcacctgcagccgtgattatgaggcctccccagccatgtgtaactgtaagtctattaatctgctttcctttataaattaccccatctctcaggtatgtctttattagcagcatgagaacggactaatacacaaagatacggattccaggtacgctcaaaaaaacacaaagaatatagatttttaaagtttctaacctagtgatatgcagtgctaagatgtctcaaaactgagtctgccaagaaccagacacccaaaatataataccaaattatggtccactaaatataatattaaagaacatgaacctattcggagtaaatttaggcaaacctctttatggagcaacataaacatggtttttgcctgtatctaagaatgacaggagaactatataatatgccatggtctttcccattccaatatttaactgtatgatcagaatgttgtattctcagcaaaactaaaccaaaatgatatcagcttttccccaaaatcagtttattctcctgcctaaagtgtaatttttcatcctagagtgatccagtagtgcaatttcaggaagcaagttttgcgtgaaggagcctgcacttcactgtcggacagttacaagagatgacagtttgtaatcccatggacacagtgaaggatgttcacatatcagaaaatctagagagaaaggcatccagggccctgcacaggatgagaagtcagccacaaattcataaactataacaagcattttgaccttgaagtcacaacattttcaaggttccattattttatgtgtaaaaatggaggtgagtaacaaaagtttgaggaaagccattaaattttggagcatcctaatattgcttaggggtacaaagataaataaggtacagactcttctcaggggcaaagatggcgagcaggacatcgcatataaggctctggacctaggggaagacatctaggttaggaaatacacatttggaacttatcatcatatgggaaaatgtcaagactgaatcctgatgctatcagccaggaaagagtatggtgatagcagagctgtgaaagaaaatcaatctctgtagagatgccaatatttaaggagaagcaaaggaaaagatgcctaccaaagactgagtcgtgagatgtgctaggagagtgtaaggataaggcagccagtagcgatagtcatgtgggaaggaactaactggcagtggcagatgtagtaaagagcactaaagggataggaaattactcactaaatgtttctagaatagggaaaccaggaattgagagtggtcacatctaaaggcctctagtttttccacaaattaagaggcaccacaaacctgtgaaaaattaaattggaaggttttagtagggttttaaagagagtgatcaaagtttggaatattccctgagaagaatctgcttaaggaaaaattttctaggctactaaaaggaacaaataccatactgccttttaaatgtgtacagatggggcatacatttaactaataattattaaaggaggctatgcaaaaggacaaaaatacgtaagacaaatccctgactacaaaaattcaactgtatatgtaactttcaatgcaatgcaaaaaacaaggccccaaaagagagtagtaagatggtgtgcgtgcttgtgtgtgtgtgtgtgtttgtgtgtgtgtgtgtgtgtgtgtgtgtgtgtgtgttttgggggctgcaggttatgctaatccatctaacctccctctttcagctactcaggacacaggcatgaactaacaagacaattcatggattttaggggtacaatccacagtgtagaaggagatgctctcccatgttatgcactgatcgtacaatttcaatgttaagaacataattcatatgttcttagtatgaattataagatataactaaattataagaaataactaaaaactgatggaatgagacactccctcctgacttccacaaagttcagctagctgagcataaccaataacagaagaagctgggtgactgcacggctgtgactttctaccagcctctcaattcagtgaccaacattctccccagaggttgactccaagataaacataatcaacaagcacctactggtcagggctggagttaaagtggtataaacaacagccctgccatcaaggagctcccattttaattggtaagtataacacaaccatgagaaaccttaagtgacaataagattttgtaggctggtcaaaataactaaggaggagctagccccaggtcacacataactatgaaagtggcaggaattgttctgggtcttgaaactacttaaaggtcaaaacttcttgctgcagagcaataaatagccagtcctattctaattaattagtatcccttttgccatcactgctgataaactcaccctgtgcaattccgaaccatctgtgtttcttcaaagctctaacactgccaatgatttggacaactctattttaggaggcattcatttcaaagatcagatgtttgactgtttctttgtttttaggactggcaaaaataagaagtaatttgcctgctcgttccctgcatggctgaagagttacatcatgtacagatgttcacgaaggttgtgttaattggtattttgtcctcacaattttcagaagaaaatagtcatatgcactttaccttacactttctaggccaattatttaagatcagattgaaaagcattttggggtttagattctacattttaccccaaaaaaatagcaatttaccataattagcactcataatcactcagcagcaggaggatcccttccctgattctttactctgtactcctaccttcccttcacccctctagtttcagaatctgggcaacatttcaagcaaataagaattgggattggcccaatccttcgaaaattccagtcaacaaacctgtcatttatcttacactcattattcccgtatcaagccacttccatggaacatgaagctaaatttgtgtttaattctttccatgtataagttaaactatgacattttgaactcacacaaaactttaaattagtttcacctaggctacaaagctaaattccacaaggaattcattgtcaggctgaggaacaggcactgaagatcaccccaaatctttataaaaattcatacttctcatgcatttaataagcagagttttctgtcctagtttgttgtctggggcagagcaaaaacaaaaccaggtttggtaccagagaagcggaaaggaagcatcaggtctggacagagagtcacaaatagaattgagggtgaaatcaggattgattacagggaatctgaatgagagacaccaggagcttgagaaggtgaaacatcacagtaatagccaggaaacaagaatcaagggtcagatgaaggaagtgagcaatcaaaacacaagcaaaacagaaacacaagaaaagatgtagagaacaagaaccaaacaagtgccaaacagaagctgatgcatcatcctcctaagctaacagttctcatccatcccttactgaggaagaacttaaaatttttaccaaactcccagtggaacctaatgatactgatagttgcaatttatcaagtgcctgtgtgctaagcactttacatgttttatgtcacttaaacttcagaacaactctgtagtgtatttattaattccctattttatgcatgagaattccaaggttcagcaaggttaagtaacatccttaatgtgacccagctaataagaaccagggtggggattcaaagtgctcatttatctataacatgctatttatgctgaagtttacacatagaaaaatgcatgcagttctcattctatatttgtgctgttcaatgtggttactattagctatatgtggatattgacacttgagttgtgactagagacacatgttgaaattataatattggagatatatcgagtgaaataaaatacattgtgaaaattagtttcatctattttatttttaaaacatgcctattagaaaatacaaatatatgtggctcatcttatatttttcatcagtcagcactattctagaatagaagttaagtcataacgaatcattttttaaaaaatttagaacctccaaagttttagtagtagaaaaacaatattcatgagagagaagaaagccaaccaaatgcccagacattgttgctcgtttctcttttctcagtggaatcactttgcttaccactgccaccatcgtgtcagcatccaaaagtggaaacacactcctgttcacttccccctggtaaagctaaaaaactgtttgcctcttcaaaaagattttgtgaacaactgtgataaaacacaggtgaatcaaagaaaattcacagaacattaaaataggcctcattacaagccaggggtttcaattctgatcttagttagcttgtgtaagagcttgtaagtttcatcttttctcagaaaagcagcagccctctaggtctgggtcatagagttaaaaatgtatagaatccacactgggtatataaatgagagaagaaggtctggtgaaaaccataaggagtagtaatgagtatggtaaatagatgatttacctatttatctatctaaagacatcacacttgaaatttttttaaacactctacaataattgccaatggggtaaccaagaaaaatcttccctctcagttttgaggctataggttttcaattcactaaaatgagagttaagttaagaaacaacagaaaataaatacatagggaaagaaggtgttaagaaaaaagaatacagagggaaagaaggtgttagaaagaaaattgaccataaaatggccctgattactatacacagtgcccttcctataagactcaaggaatctgcatcttcacctgacatgtataacataaagcctctaacatttgtcaaaatattttatggatatgtgttatgatacccaataatccctgaaggtaacttaaattcaacagcttttaataacacagaaggaaagtggaattgatattggagaagaaacttactccaagttgtgttatttacaatagcactttgacagtctgactatgattctggcctcagtctatgggtcatgttcctctctattttataggctagaagccaggagggtgtgaatcacaggaaacaagtagatagggatcatgattcctgacttccgagtatctctaacattcctaattaatatttgttgtgcaactttgctttcttggtaatttaattactgagaaaatgaatggggtcagcaataatgagagctaatgtccttcatgaaggaaacccacaacctggtccaagaagaacatatgcttcaaaggcaatattcccagcctgaagaagattccaggacagtcagacgacaggagacactgggtgtgatatattcacaatccttcaacagatcacaacacttgagtttcaagggttacagtttagctatattcagaataaaggtgacaaaagaaacaatcagttgaatatgaatttttggaaacggttttgtgataaagtaacagaaacagggcttaaaggggaaaaccccagctatattgccataccgacaccaccccaattgacctaacccagggtgcttaactttgctggagttaaactagatttgaggacaccaggaaatccaccctaatcactatattatctccccacacttgtaggtgatgccctaaggatgaagatccatgggtagaatttcagtcaggataaggagaggacagtgctaaaagttcaaccaggaaggcatcacagtcaaacttcacttacatcataattttttcatgaaacatccttctctcaggatctaatcatgaatttctacttagggtctaaagttagcctcacaccagaaaaaggaagagacccaaaatatgggttgcaccttcaccacactgctcccactgtggcttgcttagaagtcgaatggtatggaagttcaggcaatcaccttgaatgcctataaggttggaaatgcattctgtagaaagcctggttttttgaaactaagagttactgtaaacctaattaaaatgactggtgttattccagttaaagtctctcttggcccatcaatgaataaaaactacctaacagcaaatgttagacatggagactttccttcagaagagagttccaaaaattactctcattgctagatagtagtacctgacattacgtcctcaaaattgtatcctaaaattattacatattatttattcattcatttcacactcatttcagctgtgttttgtgccaggcaagacatctggagttgacaaaaaattagacagataagatttttattctctaaatagcttcctttctaattggaaagataggcttaaaaaaaacctaaagacttattttatatatgtagtagaagagaatgatgtgttggccgggcacagtggctcctgcctgtaatcccagcactttgggaagctaaggcaggcagataacctgaggtcaggagttcaagaccaggctggccaacatggtgaaactctgtctactaaaaatacaaaaattagttgggcttggtggtggacacctgtaatcctagctacccaggaggctgaggcaggagaattgcttgaacccaggaggtggaggttgtggtgagccaagatcgtgccactgctctccagcccgggcaacagagcgagactccatctcaaaataaaaattaaataaaaggaaagaaagtgatgtggcgtagtctagacatgacttgtaactttctttacaattctctttcgattaatagagtttaaggtttggaaggatccacaaaaatacgtaatccatatattcatccaatcatctctacaagctccccaccaaggggccatcccatatattccagaaatcctttgatgacaaggaacactctttctccaatttattggtacaaactctttttcccagtagatcctggttctgagccatgtgtattagccaaagttctcaagagaaactgaaccaataagctatatagagagatatttaaaaacggggatttattatgagtattggcttactcagtcatagcggccaagaggtctcacaatatgtcatctgaaagctgaagaactaggaactagtgttgtaattcagtctgagtccaaaggcctgagaagcagggaagccaattgtgtaactctcagtccaaggccaaaggtctgagaactgtgagaggggaagtttaagtcccagactccgaaagcctgatagtctgcagctctgatgtctgaggagatggatgtcccagctcaagaagagagagcacatctgcccttccttcacctttttgttctatccaggtcctcaatggattggatgatgcccatccacattggtgagcatgagtctgctttactcagtctaccaatcccaattctaatctcttccagaaacagcctcacagacatacccagaaacaatgttttaccaactagctcagtgtgacacataaaatcaaccatcacaccatgtaaatcaagtcagagtttccatccataaaaggtattttcaaatactagaggacatgggttactttgtccctgattgatctaagccaagcctaggatcttcagcctttcgtcataagaaatgtcatgaagccctttgtcactgaggtcattattttcttcaataggttccagttgtctgtgtacctcttgaaatttgagatccaagactaaacaaaattaagaagagaatatatgtaataagagctaagaaataattcttggggtctgatagatctgtgttactacctaagctctaaaactgcagctgactttctgcaagttaattaacctctctgagtctatgtttcctcaactaaacttccacataatagagatcagaatgtttcattacactcctcgacggttgattgtgaggatcaaatgtgacagagcatgtatagtacttggtacagtaaccgacatacagaaaagggttgataaatggtcatcattgttctattgttaatgtttttactctccatcgttaatctgactgccccaaactaacacatcactgttaagtaatctttgaagttgtttaaagtttatttgcagaccctctattgcctgttacgatttttcaccttttggttacaattccatgcttttgctttttcatgtttgatttcttggcttagtaactcacctacctttggcttttgctttcatcccacttttatttagagaaaaaattctgagtagaaatacctgagccacgagtcagagttaatctggagtgtagattcaagataaatatcttattcccatctgatagaatcacagtgaaaatatcaaattaatctaacatgctctccatttttttcttgaaaaataattaaggaaggatatatttcaggttttatgcttccttatccaaattatgtacagatacttcatggaaatgtattcttaatagctacattaactatgataagttcactcacatcattgtcattcatgtctaattaacctaaatgcccagctgggagtagtaagaactcatacacggtaaggagagtgagtcatgtgagatctcccagcccccaatcctgccatttgaatatacaaggataggagagggaaatgaagatgactgttcaagatcaagagggataactgtcaggagagcctggcaggactgccttgacagcacagatctgaagttgttgagcagggaaactttttttgttttttaaaggaaagcatttgtgaaataataaaatactaagaaaaagtacaaaactgtccctatgaatccaagtctacatagcattttgaaagacatatataaaataatttttcataatttttacctgtcagaaattaaatatttagttccctttaataataagttcacagttatatccagctctttgtgtagtattcctaacaactatgcatctaggctctgcttgattatgatcactgatgagaggcttaccacctcacaaggcaacacattccattgattagttacacatttctttcgtttatttgattgaactctgcacccttcataacttcccctcccgtgcccacccaataattagcctgtgctctctcaactgacatatcaggaagcttggcaggcggatattgaagggaaggagttggtggctatttgagggcagtgcattttttcatgttacctgttaaagaagcgtggtcacttattcctactagaaggaaagcagaaagaatgagaatgtatgttacctgggtaaaggtctaccaaagtcacacaactcctacatcagccacagatcttatggcccaagaagccacatagtaaaaaaagtactttggccaacaggctggcagagcctaaccccatgaaacagaatcagtaattaggttctggaaacaaagaatgagactttattcaggagcgctgtgaatcttatgaatgtataaagttctagagaggcagtagtggatagctagggattctcaagttacatgttcatgtgttgggtataagaaccatgcttatttattttttttttcatttgtctgggtacatagtggatgtatatatccatgggttacatgacatattttgatacaggcatgcaatatgtaataatcacatgagggtaaacaggacatccatcacctcaagcatttattctttgtgtttcaaacaatcaaatcatactcttttagttatcttaaaatgaacaattaaattatcatttactctagtcctccctaacaaatactaggtcttatttattgtttttaactactttttgttctcattaaccatccccccttttccccacccgcacaccccaactacccttcccagcctcaggtaaccattcttctatttccatgagttcaattgttttaatttttagataccacaaataagtgagaaaatgtgaagtttgtctttctatgcctagcttatttctcttgacataatgacctccagttccatctacattgttgcaaatgacaggatctcattatttcttatgactgaatggtactccattgtgtatgtgtacattttctttatctactcatctgttgatggacacttaggttgtttccaaattgtggctattgtgaatagtgctgccataaacatggcagtacagatgtctctttgatatattgactacctttattttgggtatatacctaggaatgggattgctggatcatatggtagttctatttttagtttttttgaggaacctccaaaatgaagaaccatgcttatttaaaatgcaggctgttggcttccatccttggagattctaattcagtgcctctggtgcagggcccaggagtctttacatttagcaagggcaacaggtaattctgaggttctttgggaaatactggtgccatatttaaaagctctggtgtcagaaagacctgaattaatacctggcctttgcctgtgctagccgtatttcctctttagtaaaatggagatgagaaccatagttccaatctctttgggttgttgcaaggattaaataagaaagtgtgtgtaagtaaagcatatagcatactgccaacagtggcctgttaagtaattgtagcaattatttttgtttttcatttttacaatgtactgatttcaactttcccccaaggaattatttacattaatgacaacctttccttcttggccttcccctatttctgattttgtttaaaattcatcatatatattttggaaatagagcatagaggaatcaaccaaaagacttgctaatttagtattcattatgtctttcacatccaaccctttccagttccaacttcccgcccctggccactaccccctgcattctcactgccatttctcttgcttagtccctctcatatgttactctttttgcctagaaaacccttccaattctctttctgaatatctgtttcacagatggaagcttcagtgattttgtggaagtttatagtacaaggattgggaaattagtcaatttaggtaaaatacacacacccaagttcatggctcctaagttccatgtctatatccagagccctgtaagccactatctatctagctgatccaaggtaacttagtgtgaaacactcagatcaaccatcaatacaatcttcctgatcattgtattttattgtactgtatatctattttatattttattatatattatatacgtttattttatacttatgttttatttcattatctgttattatattgtatcactgtatttttagtttaattgtataattgtcaatttctacatttatctcatttaatcactgaagctaaatttctaataagagtaagaaggaagtagaaaatggtgcaatgaatcatagttaatcactcaaccaaaaacagtaagttctgattcaattgcctaattcaggcaaatgcatttttgcctcgtcagtataatatcttaaatttttcacttcactttcttgatgtgaagctaaaatttctcagtctcattaccaatatgcaattattatatgcaaattttaaaaataaagtaatgactctaatggcaatttttgaagtacttgaaacatcaaacactgcaaataaaatatttatagtgtcaatataaatataactgatgtaacaaatcagcactaacttagatggtaaatgagacagtgactgtgaaagaatattcacttcttcaattgacagttaaataaatcataaataagtatactattgtaagagatcagcttatgccaccccaaaatattccactttggcataaagaggcaaatgagaattaatagatgcagaaagaagccatcttggagcatcctttatctcactaaaagcagaaacttgaaacttctgggaaatgaggactgccacaaatctcctctcccagggaagttttaaggccatgaaaaagatggaaagttggcaccaaatggatcagcaaacaaaccttactaaaataaaccttatcttccattagtttgccccatatatttaccttcccacagtttgctgcttctaaaagcctaaaacccttttcctttgtcatgtcacttttctacaaatgtattgttccttgttacgatgatatatagacacaagttctagccagttctctgagtaagtcttcactgtttcttgcacacgtatgtgtgctgtgcatgttcataaactctgttttttgcttgttaaccttccttctgtcagtttaatttcaagatccctagccaaacaacctaggagggtaatggaaaaaaaaattcctcccctatgctacatacaatgtacaattttctaataatataataaataaactatatagaatatcatatggtaatgctaagatgctctggggagaaaaaaaaaaggaacaagtagggagttgtcaaagaagcccttatggaagagattcagacttaaagaagatgagtgagtacccaagcgaatatttgggaaaaaattctccctggatgaaccactgaaaacgccaagaggttagagtgcgattggtgggttcagaggccagtgtggctggagtagaacagaagagaaaagcagtgggaaccaacatcagaaagaaaatggtaggccaagacataatgggaatgattggccattatgaggaattggctttgactctgaatggcaaagagaaccacagaagtgttaaagcagaagtatgacaagataagacttaggttttaattaatcatcctgccaggtacattgagatattctgtggggtaggaagagtgcaagtgagccacttaggagacgatgaactaacccaggtaagagatattgctggcttaggccagagtggtagcagtggaagtgatgagaagtgtccacttacaggatgtaaggtgaggtagagcaagaagactccctgatagattgaattctgtttttaagaaatagaagattcaaggaggaccttaaaattttggcgtttgtgcaatggaagaatagaattgcccctgtgtgaaatggaaaaggctatggctgaaacaggagactttttgttgtttggtgtggtgtggtggggtatggtgtggtgtggtggggtatgatttggtatgggtttttttgtgtgcagtgggatcaagatttccattttgtacacatcagatttgagctgtctattaattctgcaattagaattgttcaataaagtaactggatacataaatgaggaattgaaaataatctgaatacaaacactagtttgcatactgatgttatttaaaggcatataactacacagtatgactatgcatcaatgtatacagaaaagacaacaggaataaataatgaactcagggtctcactaacattaagatgtgagggaaaagaggaggaaccagtaaatgacaatgagacaaaaacgaggtggtacaaaaattgagaatgtggtgtccttcaagtcaaataaagaaagtttatcaaaaagaagtatgtgattaactatttcaaatgctgttaatagatcaagtaaaatgaggactaagaactgaatgttcgatttagcaatgcagaagtttcagtcgtcttgacaagagcaagtttagagaagaagtaccacaaagaccagattcgattttgtgtagaagaggagagcaagtgctgcaaaataatggagcagttggaaggagcagtcaaaagaactttaaaaaaattgaagaaacaatgcatgtttgtatactactgaaaatgatccaataaaaagtaaataactgaagatgaaaggaaaaggcagagtcactgaagttatctcctcggggtgaaaggaaataggatccaatgctgggcaagatggctgaataggaacagctccggtctgcagctcccagcgagaccaacacagaaggtgggtgatttctgcatttccaactgaggtacccagttcatctcattaggactggttaaaaagtgggtgcagcctatggagggcgagcaggagcagggtagggtcacctcacccaagaagtgcaaggggtcggggaaccccctcccctagccaagggaaacagtgaaggactgtgctgtgagggacggtgctatccggaccagaaactacttttcccatggtctttgcaacccgcagaccaggagattcccttgggtgccaacaccaccagggccctgggtttcaagcacaaaacagggcgaccatttgggcagacacctagctagctgcaggagtttcttttcttaccccagtggcacctggaacaccagagagacagaaccattcactcccatggaaagggagatgaagccagggagctgagtggtctagctcagcagatccacccccatggagcccagcaagctaagatccactggcttgaaattctcgctgccaacacagcaatctgaagtcaacctgggacgctcgagcttggtggggagaggggcatctactattcccgaggcttcagtaggggatcttccccgacagcgtaaacaaagccaccaggaagttcaaacagggtgcaaaacccaccatgcagcaaagccactgtagccacactgcttctttagattcctcctctctgggcagggcatctctgaaagaaaggcagcagccccagtcaggggcatatagataaaactctcacctccctgggatacagcacctgggggaagaggcggctgtaggtgcagcttcagcagatgttcctgcctgtcggctctaaagagagcagtagatctcccagcacaaagctgaagatctgttaagcaacagactgcctcctcaagtgagtccctgatccccatacttcctgactgggagacacctcccagcaggggtcaacaaatacctcatgcaggagagctctggctggcatatggcaggtccccctctgggatgaaagttcgagaggaaggaacaggtagcaatctttgctgttctgcagcctctgctggtgatatccaggaaaacagtctctggagtggacctccagcaaactccagcagacctgcagcagaggtgcctgactgctagaaggaaaactaacaaacaaaaatagtatcagcatcaacaaaaaggatgcccacacaaaaatgccatctgaaggtcaccaacatcaaagaccaaaggtagataaatctacaaagatgaagaaaagtcagcacaaaaaggctgagaattccaaaacccagaatgcctattctcctccaaaggatcataactcttcaccagaaagggaacaaaactggatggagaatgagtttgacgaactgacagaagtaggcttcagaaggtgggtaataacaaactcctccgagctaaaggagcatgttctaacccaatgcaaggaagctaagaaccttgataaaaggttacaggaactgctaactagaataagcaatttagagaacatagatgacctgatggagctcaaaaacacagcacaagaacttcatgaaacatacacaagtatcaatagccaaactgatcaagcagaagaaaggatatcagagattgaagatcaacataatgaaataaaacatgaagacaagattagagagaaaaaaaaaagaaaaggaacgaacaaagcctccaagaaatatggggctatgtgaaaagaccaaccctacgtttcattggtgtacctgaaagtgacagggagaaaggaaccaagttggaaaacgcacttcaagatattatccaggagaacttccccaacctagcaagacaggccaacattcaaattcaggaaatacagagaacaccacaaagatactcctcaaggagagcaaccccaagacacgtaatcgtcagattctccaaggttgaaatgaagaaaaaaatgttaagggcagccagagagaaaggtcgggttacccacaaagggaagcccatcagactaacagcagatctctctgcagaaatcctacaagccagaagagagtgggggccaatattcaacattcttaaagaaaagaattttcaacacataatttcatatccagtcaaactaagcttcataagcaaaagagaaataaaatccttcacaggcaagcaaatgctgagagattttgtcaccaccaggcctgcctcacaagagttcttgaaggaagtactaaatatgtaaaggaaaaaccagtaccagccactgtaaaaacataccaaaatgtaaagaccatcgacactatgaagaaagtgtatgaacgaatgggtaaaataaccagctaccatcataatgacaggatcaaattcacacataacaatattaatctcaaaagtaaatgggctaaatgccctagttaaaagacacagactggcaaattcaatagagtcaagatccgtcagtgtgctgtattcaggagacccatctcacatgcaaagacacacataggctcaaaataatgggatggaggagtatttaccaaacaaatggaaagcaaaaaacccacggggtgcaatcctagtctctgatgaaacagattttaaaccaagaaaggtcaaaaaagacaaagaagggaattatctaatggtaaaggaaccaatgcaacaagaagacgtaactatactaaatatatatgcacccaatacaggagcacccatattcaaaaagcaacctttagacacctacaaagacacttagaatcccacacaataatagtgggagacattaacaccccactgtcaatattagacagatcaacaagatgtaaaattaacaagaatattcaggacttgaactcagctctggaccaagcagacctaatagacatctacagaactctccaccccaaatcaacagaatatacattcttctcagcaccatatagcacttattataaaattgaccacatgattggaagtaaaacactcctctgcaaatgtaaaagaatggaaatcataacaaacagtctcccaaaccacagtgcaatcaaattagaactcaggatttaaaaactcattcaaaactgcacaactacttggaaactgaacaacctactcctgaatgactactgggtaaataatgaaattaaggcagaaataaataagttctttgaaaccattgagaacaaagacacaatgtaccagaatctctgaaaccagaatctcttaaatctgtaccagataaagcagtgtttagagggaaatttatagcactaagtgcccacaggagaaagcagggaagatctgaaattgacaccagaatctctgtgacacagctaaagtagtgtgtagagggaaatttataacactaaatgcccacaaaagaaagcaggaaagatctaaaatcgacaccctaacatcacaattaaaagaactagagaagaagagcaaacgaattcaaaagctagcagaagacaagaaataactaagatcagagcagaactgaaggagatacagacacgaaaagcccttcaaaaaatcagtgaatccaggagctggttttttgaaaagattaacaaaatatatagaccactagccagactaataaagaagaaaaaagagaagaatcaaatagacacaataaaaaatgataaagtggataccaccactgatcccacagaaatacaaactaccatcagagaatactataaacaactctacacaaataaactagaaaatctagaagaaatggataaattcctggtcacatatacccttccaagactaaacaagtcaaatccctgaatagaccaaaaacaagttctgaaattgaggcagtaattaatagcctaccaaccaacaaaagcccaggaccagatggattcacagccaaattctaccagaggtacaaagaggagctggtaccattccttctgaaactattccaaacaatagaaaaagagggactcctccgtaactcattttatgaggccagtatcatcctgataccaaaacctggcagagacacaacaaaataaagaaaatttcaggccaatatccctgatgaacatcaatgtgaaaaatcctcaataaaatacgggcaaaccaaatccagtagcacatcaaaaagcttatccaccatgatcaactcagcttcatccctggaatgcaaggctggtccaacatatgcaaatcaataaatggaatccattacataaattgaaccaattacaaaaaccacaggattatatcaatagatgcagaaaaggccttcgataaaatccaacactccttcatgctaaaaactctcaataaattaggtattgatggaatgtatctgaaaataataagagctatttataacaaaaccacagccaatatcatactgaatgggcaaaagctggaagcattccctttgaaaatgggcacaagagggcaggtgcagtggttcacgcctgtaatcccagcactttaggaggctgaggcgggtggatcacaaggtcaagagatcaagaccatcctggcaaacatggtgaaatcctgtctctactttaaaaaagtaccaaaattagctgggcatggtggcacatgcctgtagtcccagctactcgggaggctgaggcaggagaattggttgaacccagggggcggaggttgcagtaagccgagatcgcaccactatactccaacctggtgacagagtgagactctgaaaaaaaaaaaaaaaaaaaaaaaaatacaggcacaagacaaggatgccctctttcaccactcctattctacacagtattggaaattctgggcagggcaatcaggcaacagaaagaaataaagcgtattcaaataggaagagaggaagtcaaatagtctctgtttgcagatgacatgattgtatatttagaaaaacccatcgtctcagcccaaaatcgccttaagctgataagcaacttcagcaaagtctcaggatacaaaatgaatgtgtaaaaatcacagcattcctatacagcaataacagataaacagagagccaaatcatgagtaaactgccattcacaatagctacaaagagaataaaatacctaggaatacaacttacaagggatatgaaggaccccatcaaggagaactacaaaactgctcaaggaaataagagaagacacaaacaaatgggaaaacattccatgctcatggataggaagaatcaatatcttgaaaatggccctactacccaaagtaatttacagattcaatgctatccccatcaagctaccattgactttcttcacagaattagaagaactactttaaatttcatatggaatcaaaaaagagtccgtatagccaagacaatcctaaccaaaaagaacaaagctggaggcatcatgccacttgacttcaaactattctacaaggctacagtaaccaaaacagcatagtactggtaccaaaacagatatacagaccaatgaaacagaacagaggcctcagaaataacaccacacatctacaaccatctgacctttgacaaacctgacaaaaacaagcaatggggaaagcattccctatttaataaatggcgttgggaaaactggctagccatatgcagaaaactaaaactggaccccttccttataccttatacaaaaattaactcaagatgaattcaagacttaaacataaaacctaaaaccataaaaatcctagaagaaaacctaggcaataccattcacgacataggcatggccaaagacttcatgactaaaacatcaaaatcaatggcaacgaagccaaaattgacgaatgggatctaattaaactaaagagcttctgcacagcaaaagaaaatatcatcagagtgtataggcaacctacagaatgggagaaaatttttgcaatctatccatctgacaaggggctgatagccagaatgtacaaggaacttaaacaaatttacaaacaaacaaacaaataaacaaccctatcaaaaagtgggcaaaagatatgagcagacacttctcaaaagaagacgtttatgtggccaaaaaatgtatgataaagagctcatcatcagtggtcattagagaaatccaaatcaaaaacacaatgagataccatctcatgccagttagaatggcgatcattaaaaagtcaggaaacaacagctgctggggaggatatggagaaataagaatgcttttacactgttgtgggaacgtaaattagttcaaccattgtggaagatagtgtggcaatttctcaagtatctagaaccagaaataccacttgacccagcaatcccattactgggtacatacccaaaggattataaatcattctactaaaaagacacatgcacatgtatgtttattacagcactatttacaatagcaaagacttgaaaccaacccaaatggccatcaatgatagactggataatgaaaatgtgacacatatacaccatagaatgctatgcagccaaaaaaaacatgagtctgttgcagggacatggaagaagctggaaatcatcattctcagcaaactaacacaggaacagaaaaccaaacatcacatgttctcactcaaaagtgggagttgaacaatgagaacacatggacacagggaggggaacatcacacactgaggcctgttggggggtgaggaacaagggaaggaatagcattaggagaaatatctaatgtaaataatgggttgatgggtgccgcaaaccactacagcacatgtatacctatgtaacaaacctgcacgttctgcacatgtatccccaaacttaaagtataatttaaaaaaaaaaaaaaaggagaaaggatccaatgcacaagtggagggattggtgttagataggaagggacacatattctacagcaatgattgtcagtgttggccagcagaaatgttccctggggagtctttttaaaaacacaatacccaagaaaaaaacaaacaaccccatcaacaagtgggcgaaggatatgaacagacacttctcaaaagaagacatttatgcagccaaaagacacatgaaaaaatgctcatcatcactggccatcagaaaaatgcaaatcaaaaccacaatgagataccatctcacaccagttagaatggcaatcattaaaaagtcaggaaacaacaggtgctggagaggatggggagaaataggaacgtttttacactgttggtgggactgtaaactagttcaaccattgtggaagtcgatgtggcgattcctcagggatctagaactagaaataccatttgacccagccatcccattaccgggtatatacccaaaggattataaatcatgctgctataaagacacatgcacatgtatgtttattgcggcactattcacaatagcaaagacttggaaccaacccaaatgtccaacaatgatagcctggattaagaaaatgtggcacatatacaccatggaatactatgcagccataaaaaaggatgagttcatgtcctttgtagggacatggatgaagctggaaaccatcattctcagcaaactatcacaaggacaaaaagccaaacactgcatgttctcactcataggtgggaattgaacaatgacaacacatggacacaggaaggggaacatcacactctggggactgttgtggggtgggggtaggggggagggatagcattaggaggtctacctaatgctaaatgacgagttgatgggcgcagcacaccaacatggcacatgtatacatatgtaacaagcctacacgttgtgcacatgtaccctagaactttaataataataaaaaaataaataaataaaaagaaaacgggaagagaagggcaattgagaaaccttgaatctgtttacacaaaatagacttaagtttcaaaccaaaagggactgcataaccataaattggcaagattaagccttgtttcccagagcacaaatgaagttttaagagctaaactaagttgagataaaaaattataaggaagtttacatctttgtactcctgaatgctaagaaaccacttcaataatagtagaagacatgcattcaacacttcgtagttggctctgtgcttaaaaactttacatggattgtcacattcctcttcacaacaaccttaaaagtaaacactatttttcactttgctttgcagacaagaaagctgaaacctcacacctacacaagggcaaaagccaagattcaagctgctagattcaaagctgctgaccctaatcactctaatcatcacgctctatactgctccatttaatagagcaaccatttatatattactttaggacattagactcggtgaatatcccaacagacttacttccacgccagattcatgttcctcaaggccttggaacatattttcagaattttttgtcttcctcttacatcactctgcatgaggaagagaataaataattcccatgaatagcaatgtctgtaatccaatttgtcaggtgccatgaggcacaatggtacacacgggattagcacttcctttgatagccttgatgttaaatcctaagaggatccatggcagaagtaatttggtgccaacatctctataaatacagtcagaagttgtcttccattcaagcctggtgatagttggtttcataaaataaatgactagacagacagatgagagatcatttatttccttatatgacatgccatatagctaaagaaattgcgctgttcaagttcttgcttctcatgccaccatcagttgaaccgtaatcataaataattttagtttttcataaggtattctgtgattaaagtgtattacctgcttttttcaattttaggattattggaaactctaatccatttcatgtgttatctttcagcactcataattaatctctgctatgagcacccaaaaattaaacctcatgctgtatgcttatattagattggaaatctcaggtaccttggttcatatgacacatgaaaataattttagatgaaaatattgtaatattccaattcaaatagatataataaaaaaggcacagtgtctgatcttatgctgtgtgagcacttggcactggccagctgctgtgaaattggataccttttaatgtctttctgtaataagcatattctacggaaacagtgaatgagaaaaccacacacctatcgtggaatttttattgcagcttacctgtggtcttttgtgaaactctatataatacaaaaaatcctgtatctgttctgcttctcccagtagtttcaaaaactgaagggcaataagctactttaatctctagtttggaaggtacagtttaactctagttccatgcatccctggtggtcattgccattttgtaatgttacaaaggcttctgttttaaaatgtgctgtgggcttatatagcaactttatcagattaattatcttctttgggaaatcttctggaacacaaaaagtaatatacagcagaccaatttttgtatcagctatgtgccaggatagttctaaagataatcaaaattctatatacagggctcttacctgcctacaaaaatgtatttgaagataattctacgtcatcaatgtttttatcccttacaaattttatacctaagtataaatttccccctttgcctcatacctttttcacctgagccacatcaaataacattataaatcattgaatcatttaaaattaaattttatatcagaaaattaatttcctcctccaaattactaaaataatgtatattactagtattcataaatgaaaagcagccaaatggtattttaaagggagaaaaccagattttagattttcctatttgaagaatagtctccaaaacgtcaccacaaatgcagcccattgattccagctgactggtgccatttatggcaaaaagataaggtgagatgatgcacattcctttttgaatgtgttcagattttgaaaagaaactttaaggtagtaacccttcagtgacagtgataaatagatgcctcccaagactgagaaaagaaatcactcgagaagtgaaaagtgaaaagtggaaggtgaaacagcaaggagaggcataatatcatccacacccataactctctgcagagttttgctgtttcatccaggctggagtgcagtggtgctatctcagctcactgcaagctctgccttcctgtttcaagtgattctcctgcctcagcctcccaagtagctgggattacaggcacccccctccaccacgcccagctaatttttgtatttttagtaaagatggggtttcaccatgttgccaggctggtcttgaactcttgacctcgtgatctgtcctcctcgacctcccaaagtgctgggattacaggtgtgagccaccgcgcccagccccataactcttgtaatggcccaggacaggcccgcaaagtacttctttgctattccacaagtttccggctttctgcacctaaccagctcccttaacctttccagagctgccttcttcctggcagagagttgattccttaatatgttaggaagatccattggaaattattctgcatggtagactctctgctgttagatcctagcaggcttatccagctgctgtctcctggaagtacggaactaagaaagccaagctaggttaaaggcaacatgaaagccagcagaaaattgaattgacccagctgaggttattatccagttttcccccaaactacatctacatagtgaaaaaagaccaaaggagttcagggtaaaggaggttcttgtactgaatcaggaaggaaactttgtatgaaaacctgaatgtgtctcatttctagatttatttctgaacctccatagtatcaaggaaggaacacagaatttgccatcaatcagactgagctcaaatcctagttcaatctgttaaagattctttaaaaacatctttaacagctatgagatatagtttccacctttatgtaatggataggaaacacctacctcatttgcttgtcatgaggattaaataagataacataataaagttactggtgcagaactcgaaaccagggctaaaagatatgtttcctggatgggtacagtctctcacacctgtattcccagcactttgggaggcaaaggcaagaaaactgcttgagaccacaaatttgaaaccagcctgggcaattatagcaagaccccatctctacaaaaaaattaaaaaattagccaggagtggtggtgcacacctgtagtcccagctaatgggaagctgaggccgacaggagactaaggatcttttgagcccaggagtttgaggctacagtgagccattatcacaccactgcactccagcctgggtgacagagacagaccctgtctctttatatatctaaggagcagctgttgtaatggtaattgatatagtaagaacaataatgaccttttgttgaaggctttataagctaggcattgtgctaagcacatagacataatgtttctaaatctcattttaaaactccacaacatagatggtatttaacagaaaagtatccctgttaagtggtaaaagcagcaaggagaaaactggacaggtagattaaattccatcacttgctttgagttgcagttctgacaaataaattagcatcgaattttatttcagaaaggttaagtgacttccccaaagtcacacagccagaaactgcctaatgcctcattttcgttgtatatcttaggtgtaattgttttcctagtttatacaacatatcgcaaaacctaaaaataaaagagatatttgagacccaagtaaatccatacaaactcactatcctgaatcctgttgctgcacagcacaagactgtcagataaatactgttctccaaaacttccctaaccagaaaccaggggagtggcctaaggtaatacttatcagagagaagagaatactagcacccctagtctgcccacaaagtccccaggagctgggctaacagtgacccaggatcacaaaattccagaagaactcagaaattcaaaattgggaaataaagcctaatcttcaccaccagtaatgacacaaattaaagttaagtactgggagaaagccgacaactaactcaccaggaattaatgttgagtccaaacatcaactgaaatcaagataagatccttcctgtaattctttattatgctaaactgaactctgatatttaaaaactctgggaccatcaaacacataccaagattattgtttgcctgggaaaaccctgcttaaacgcagaagataaaatgacttcaacttctccagatgtttctccatgctgtctatgacacttgaaagagatgctcttctgcatctcagaagctgtgtttcaaacactgagcagagtgagtttctctagagaggacctttcacactgtctctctctatgtttatcacatagtgaatccaatggctaactcaggaaaagaataagtaaatagaccaaagtctaaatatataaaattgattgattttgcaatattctctacttcttgaaagtatatatgactccacagttagtactttttgagaaatatttttaatgtataaagtgaagaacacatatatctcagatcggatatgatttattaaaaagtaggttcacttgactgagtttataagcattgaccaagcctggcacgagtacatgaaattactaattattgactgtacagcaccatcaactgaatcaggatgagaaaaagaactgtgaagtgctatatgcaaagtgctaggctttactaatatatccttacactaagaatgttaattctatgatggtatattttatttttagaatgtctggttctgactacattttccaaaaataagtattcaatagtaaatggcaagaaacccaagcaccaaaatgataataaatatttcaagctacctttcccagaaacacaatctgtttctcaactgatagaaattcatcataagccactgtctatatctttggaaaattttactgtgcaataattcatcaaaagccactagaccaaattgccatttaatccttgaaccaaggaaacaattcatatagctataagtttataaacatcttaccaagagttgatgtgctacaccacagcaatttcaaagtccatccaatataccatcaactctaattcttggtacagtatatacttaccttcattatggaatttatacaagcttaacaagaatcacagttttaagaaaaaataatatgaaattcttcagtatgtttatcacatagaatagaaaaatagtgaatatttctcattttttgaaagatcaacttttgaacaaaacacaaagagaaacagagattttaaacatctgaattctaacctctacacaaacaaattagaaaatctaaaggaaatagataaatttctggaaacacacaagcccccaagattgaactaggaagaaagtgaaaacctgaacaggccaatagtaagttctgaaattgaatcagtaattaaaaaaaaaacttaccaaacaaaaagatctctggaccagagcaattcacagctgaattcttccagacatacaaaaaagaactgatatcaatcctactgaaactatcctaaaagattaataaagagagaatcctccctaaatcattctatgaagccagcatcaccctgataccaaaaccaggaaaggacataatgaaaaaagaaaatcacagtccaatatcctcatcaaaatactagctagcctaaaccaataacacataaaaaagataatatactatgatctaatgggtttcatctcaggaatacaggaatggcttaacatatgcaagtcaataaatgcaatacatcacataaacagaattaaaaacaaaaatcatatgatcatctcaatagatgcagaaaaagcattcaacaaaatccagcatcccttggccgggcacagttgctaatgcctgtaatcccagcactttgggaggctgaggtgggtggatcacctgaggtcaggagtttgagaccagcctcaccaacatggtgaaaccctgtctctaactaaaaatacaaaacttagccaggtgtggtggtgggcacctgtagtcccagctacacaggaggctgaggcaggagaatcacttgaacccaggagatgaaggttgcagtgagctgagatcatgccactgcactccagcctgggtgacagaatgagactccgtctcaaaaaaacataaaaatacaaataaataaataaataaataaataaatccagcatccctttataataaaaaccctcaacaaactaggcagagatggaaaatacctgaaaattataaaagccctatatgaaaatccacagccaatacactgaataaagaaaagttgaaactatttcccctgagaattggtacaagacaaggatgcccactttcaccacttctattcaacatagtactagaagtcctagccagagcaaccatgcaagagaaagaaatgaagggcatccaaattggaaaataggaaatcaaactatcactgttcaccaatgatataaccatatacctaggacaccctaaagactcctccaaatgactactagatttaataaacaatgtctcaggttacaaaaatcaaagtacacaaatcagtagcactgctatcaccaacaataaccaagctgagaagcaagtcaataactcaatcctttttaccatagctgcaaataaaataaaatatcttggaatatactttaaaaagaaggtgaaagatctctacaaggaactaaaaaacactgctgaaagaaatcatatgacacgaacaaatggaaatgcatcccaggttcatgaattggaagaataaatatcatgaaaatgaccatactgttcaaagcaacctacagattctaagtgcaattcctatcaaaatatcaacatcatttttcacaaaattagaaaaaaacattaaaattcatatggaaccaaaaaagagcccaaatagtcaaagcaatcctaacctaaaagaacaaatctggaggcatcacattacctgacttcaaattatactacaaggctacagttaccaaaacagtataacactggtataaaagtggacacatagactagtgcaacagaatagagaacccagaaaaaaagccaaatacctacagacaactgatctttgaccaagcatacaaaaacataaattggcaaaaggacacaccctatttaataaatgatgctgggaaaatggatagccacatgtagaagaatgaacctggatccctatctttcaccttatacaaaaatcaactgaagatggagcaaagacttaaatctcagacccgaaaccataaacattctaaaagaaaacttagaaaaaattcttctggacgttggcctaagcaaataatttatgactaagaccacaaaagcaaatgtaacaaaaacaaaactaaataaatgggacctaattaaacaaaaagcttttgtacagcaaaagaaacaatcatcagagtaaacaacccacaaaatgggaaagaatattaacaaactatgcctctgacaaagaattgatatccagaatctacaaggaactcaaacaaatcagcaagaaaaaaaacaaataatcccatcaaaaagtgggcaaatggcatgaatagaatttctcaaaagaaaatatgcaagtggccaataaatatatgaataaatgctcaccatcactaatcatcagggaaatacaaattaaaaccacagtgagataccaccttaccctgtatgaatggccattattgcaaagataaaatacaatagatgttggcaaaaagatttcaccactatacaattcatccatgtaatcaacaacaacttgtaccacaatagatatggtaaaaaaaaaaaaaaaaaaaaagggaaaacttatatattgctggtgggaacataaattagtaaaacctccttagaaaacagtatggagacttctttttttaaaacctttattttagattctagggtacatttgcagatttgttatgcaggtaaactgcacatcacaggggtttggtttacagattattttgtcacccaggtacacagagagggaaacaacagacactggagcctacttgagggtggagaataagaggagggagaggatcagagatttctaaagaactaaaagtaaatctactatttgatccagcaatcccactcctgggtatctacccaaagaaaagtcattgtatcaaaaagacacctgcatgcatatgtttattgcatcaaaattcacaattgcaaagatatggaaccaacctaagtgcccattgaccaatgagtgaataaagaaaatgtggtatgtatatacatcgtggaatactactcagcaatgaaaaagaatgaaataatgtcttttgcagcaacttggatagagctagaggccattattctaggtgaagtaactcaggaaggcaaaaccaaataccttatgcttacacttataagtgggagctcagcttttggtatgcaaaggcatacagagtgacataatggactttggagactcagaaggaggagggtgggaggtgggtgagggattaaaaaaaaaactacaaatagggtacaatgtacactactcaggtggcgggtgcaccaaaatcttagacttcaccactatataattcatccatgtaatcaaaaacaacttgtaccccaaaagctactgaattctttttaaaaaagtatacctatcgttactgagcattgtgagtccaggcacaccctactagaagttaaactgccaaagaatagtagatgcatttaagtttttcaatggtatctggaaagtaatttgaatttaccatttaatccataaattaatttaaaaagacattaatgagatttgtgtgtggctagatgttacttgttgattacaatattactcttaatttatattgtcattttagttgcctagaaaatatgactggttagatttctactcttttgaaattaatgacattattaaggctaaaatcttgctatttaattttttcctctggtatttgaatacaatgtgtatctttggtttattggcaaaaaatactatccatttttctctatgtggaattagtcaaactttctaataaagttattcaacattaaaaataaaaataaaaaaaccttgagttctggcagttctacccttaactacttgcatgatcttacctgatttggatttcaaattccgcatctataaagtaggaaaaagtacagtctctgtctacttcatatgcttgttttgtggagcaaatgtgataatttatgatacacataaaatatgtaatgttattatcaagagcattttcaaatgaaagaaaacaggacaatacatttgatggctgcctctcttcacgtgacttttcttttcacccactcaaagcacaagtgccaaaaataagttattgcctaaagtaagatccagagaaaaagagcaatatcctggcaatgaaatctctaatcttggagcagttactcaattacactgagccttagttttgccttctttaaaatagaacagcttacctgcttccacctacagagaaacatgacaatagatttaacagtgttgtcttactcagcttcctcatatgtaaaattggctttctggataatgtatttaaagccaatagcctggtacttagcatattcattcattcaacaaataatctgttctggctgctacaaatataacagagaacagaacagaaaagccccaggccccactgtggttaccttatagtatgggaagatagataataaacagactaagtcaaatagatagtggcagtgccagcttcatagacatgtaatgtgtgcaattgcataaggtcccaagcccagacacccagtgcttggtttaatgccctgctattgccatcttgaaattcttaatagtttgtgaacaaggggacccacattttcagctcctggatggtggtagatggtggtatggagaaaataaagtgcaaagggattaggaaacgtgtgttggcaggtaggaggagtggccatcagggcttcaacatgacattacacatttcggcactacacaaaggtgcccaggtggggaagacagtgagggctgaaaactgcctagagggagaggccttactctgcacaaatctgattccaggtaactctccaagcacctggctttagaggtaacaatcacatagattacaatgggcctcagatatctttagatgcagtcaacccaaagcctgcctgcttgtccagctgtgaaccgcagagtgatacccccagaatgggcatccttttctcatctacgcagaggtgcaggtgaagctagcaatgggcatgctggtcagtaaatgccacttgaggaaaggtctgaagaggtgagcaagtaagttgtgtagaatggaggaagaaggagttaggcaaaaggaacagtgaatgccgctgaatgccactagaatactatggttatgagcttttcatttggctgcattgagggaaacggtagtaatttatttaaggggaaaataatttaatactagattatccaagataggagccactagctatatgtggctactgaatacttgaaatatagcatgtgtgaatgagaaagttaatttttaattttaattttaaaacatatctgattcagttatttcaaaactttcatatatgttttaaacaatatgggcatgtaaatctattttctaactgtaattttataaaatttaaatacagatcatatatttgtgatgaaaatccagactctgaactagatatattgttaccataaacagcacaccaaattttgaaaacagtaccaaaacaaaaacttatattactaataacttttatatagactacatggtaaaaaagtattttcgatatgttagatacataaaatatatcattagaattaatctgcactctttttaattttctaatgtggctactagaaaatttaaaattacacattagctcacataactttattcgaaagtactggtctagtgaattaatagggtaggcaaaacaagatcttgccaaaattaagaattttgttggggaggagccaagatggccgaataggaacagctccagtctacagctcccagcttgagcgaagcagaagacgggtgatttctgcatttccatctgaggtaccgggttcatctcactagggagtgccagacagtgggcgcaggccagtgggtgcgtgcaccgtgcgtgagccgaagcagggcgaggcattgcctcacctgggaagcgcaaggggtcagggagttccctttccgagtcaaagaaaggggtgacagatgcacctggaaaatggggtcactcccacccgaatattgcgcttttcagaccggcttaaaaaacggcacaccacgagactatatcccacacctggctcggagggtcctatgcccacggaatctcgctgattgctagcacagcagtctgagatcaaactgcaaggcggcagcgaggctgggggaggggcgcccgccattgcccaggcttgattaggtaaacaaagcagcctggaagctcaaactgggtggagcccaccacagctcaaggaggcctgcctgcctctgtaggctccacctctgggggcagggcacagacaaacaaaaagacagcagtaacctctgaagacttaaatgtccctgtctgaaagccttgaagagagcagtggttctcccagcacgcagctggagatctgagaacgggcagactgcctcctcaagtgggtccctgacccctgacccccgagcagcctaactgggaggcaccccccagcaggggcacactgacacctcacacggcagggtattccaacagacctgcagctgagggtcctgtctgttagaaggaaaactaacaaacagaaaggacatccacaccgaaaacccatctgtacatcaccatcatcaaagaccaaaagtagataaaaccacaaagatggggaaaaaacagaacagaaaaactggaaactctaaaacgcagagagcctctcctcctccaaaggaacgcagttcctcaccagcaatggaacaaagctggatggagaatgattttgacgagctgagagaagaaggcttcagacgatcaaattactctgagctatgggaggacattcaaaccaaaggcaaagaagttgaaaactttgaaaaaaatttagaagaatgtataactagaataaccaatacagagaagtgcttaaaggagctgatggagctgaaaaccaaggctcgagaactacgtgaagaatgcagaagcctcaggagccaatgcgatcaactggaagaaagggtatcagcaatggaagatgaaatgaatgaaatgaagcaagaagggaagtttagagaaaaaagaataaaaagaaatgagcaaagcctccaagaaatatgggactatgtgaaaagaccaaatctacgtctgattggtgtacctgaaagtgatgtggagaatggaaccaagttggaaaacactctgcaggatattatccaggagaacttccccaatctagcaaggcaggccaacgttcagattcaggaaatacagagaacgccacaaagatactcctcgagaagagcaactccaagacacataattgtcagattcaccaaagttgaaatgaaggaaaaaatgttaagggcagccagagagaaaggtcgggttaccctcaaagggaagcccatcagactaacagcggatctctcggcagaaaccctacaagccagaagagagtgggggccaatattcaacattcttaaagaaaagaattttcaacccagaatttcatatccagccaaactaagcttcataagtgaaggagaaataaaatcctttacagacaagcaaatgctgagagattttgtcaccaccaggcctgccctaaaagagctcctgaaggaagcactaaacatggaaaggaacaaccggtaccagccgctgcaaaatcatgccaaaatgtaaagatcatcgagactaggaagaaactgcatcaactaacgagcaaaatcaccagctaacatcataatgacaggatcaaattcacacataacaatattaactttaaatgtaaatggactaaatgctccaattaaaagacacagactggcaagttggataaagagtcaagacccatcagtgtgctgtattcaggaaacccatctcacgtgcagagacacacataggctcaaaataaaaggatggaggaagatctaccaagccaatggaaaacaaaaaaaggcagggattgcaatccgagtctctgataaaacagactttaaatcaacaaagatcagaagagacaaagaaggccattacataatggtaaagggatcaattcaacaagaggagctaactatcctaaatatatatgcacccaatacaggagcacccagattcataaagcaagtcctgagtgacctacaaagagacttagactcccacacattaataatgggagactttaacaccccactgtcaacattagacagatcaacgagacagaaagtcaacaaggatacccaggaattaaactcagctctgcaccaagcggacctaatagacatctacagaactctccaccccaaatcaacagaatatacatttttttcagcaccacaccacacctattccaaaattgaccacatacttggaagtaaagctctcctcagcaaatgtaaaagaacagaaattataacaaactatctctcagaccacagtgcaatcaaactagaactcaggattaagaatctcactcaaagccgctcaactacctggaaactgaacaacctgctcctgaatgactactgggtacataacgaaatgaaggcagaaataaagatgttctttgaaaccaacgagaacaaagacacaacataccagactctctgggacacattcaaagcagtgtgtagagggaaatttatagcactaaatgctcacaagagaaagcaggaaagatccaaaattgacaccctaacatcacaattaaaagaactagaaaagcaagagcaaacacattcaaaagctagcagaaggcaagaaataactaaaatcagagcagaactgaaggaaatagagacacaaaaaacccttcaaaaaatcaatgaatccaggagctggttttttgaaaggatcaacaaaattgatagaccgctagcaagactaataaagaaaaaaagagagaagaatcaaatagacacaataaaaaatgataaaggggatatcaccaccgatcccacagaaatacaaactaccatcagagaatactacaaacacctctatgcaaataaactagaaaatctagaagaaatggataaattcctggacacatacactctcccaagactaaaccaggaagaagttgaatctctgaatagaccaataacaggagctgaaattgtggcaataatcaatagtttaccaaccaaaaagagtccaggaccagatggattcacagccgaattctaccagaggtacaaggaggaactggtaccattccttctgaaactattccaatcaatagaaaaagagggaatcctccctaactcattttatgaggccagcatcattctgataccaaagactggcagagacacaaccaaaaaagagaattttagaccaatatccttgatgaacactgatgcaaaaatcctcaataaaatactggcaaaccgaatccagcagcacatcaaaaagcttatccaccatgatcaagtgggcttcatccctgggatgcaaggctggttcaatatatgcaaatcaataaatgtaatccagcatataaacagagccaaagacaaaaaccacatgatcatctcaatagatgcagaaaaagcctttgacaaaattcaacaacccttcatgctaaaaactctcaataaattaggtattgatgggacgtatttcaaaataataagagctatctatgacaaacccacagccaatatcatactgaatgtgcaaaaactggaagcattccctttgaaaactggcacaagacagggatgccctctctcaccgctcctattcaacatagtgttggaagttctggccagggcaatcaggcaggagaaggaaataaagggtattcaattaggaaaagaggaagtcaaattgtccctgtttgcagacgacatgattgtttatctagaaaaccccatcatctcagcccaaaatctccttaagctgataagcaacttcagcaaagtctcaggatacaaaatcaatgtacaaaaatcacaagcattcctatacaccaacaacagacaaacagagagccaaatcatgagtgaactcccattcacaattgcttcaaacagaataaaatacctaggaatccaacttacaagggatgtgaaggacctcttcaaggagaactacaaaccactgctcaaggaaataaaagaggatacaaacaaatggaagaacatttcatgctcatgggtaggaagaatcaatatcgtgaaaatggccatactgcccaaggtaatttacagattcaatgccatccccatcaaactaccaatgactttcttcacagaattggaaaaaactactttaaagttcatatggaaccaaaaaagagcccgcatcgccaagtcaatcctaagccaaaagaacaaagctggaggcatcacactacctgacttcaaactatactacaaggctacagtaaccaaaacagcatggtactggtaccaaaacagagatatagatcaatggaacagaacagagccctcagaaataatgccgcttacctacaactatctgatctttgacaaacctgagaaaaacaagcaatggggaaaggattccctatttaataaatggtgctgggaaaactggctagccatatgtagaaagctgaaactggatcccttccttacatcttatataaaaatcaattcaagatggattaaagatttaaacgttagacctaaaaccataaaaaccctagaagaaaacctaggcattaccattcaggacataggcgtgggcaaggacttcatgtccaaaacaccaaaagcaatggcaacgaaagccaaaattgacaaatgggatctaattaaactaaagagcttctgcacagcaaaagaaactaccatcagagtgaacaggcaacctacaacatgggagaaaattttcgcaacctactcatctgacaaagggctaatatccagaatctacaatgaactcaaacaaatttacaagaaaaaaacaaacaaccccatcaaaaagtgggcgaaggacatgaacagacacttctcaaaagaagacatttatgcagccaaaaaacacatgaaaaaatgctcatcatcactggccatcagagaaatgcaaatcaaaaccactatgagatatcatctcacaccagttagaatggcaatcattaaaaagtcaggaaacaacaggtgctggagaggatgtggagaaataggaacacttttacactgttgtgggactgtaaactagttcaaccattgtggaagtcagtgtggtgattcctcagggatctagaactagaaataccatttgacccagccatcccattactgggtatatacccaaatgactataaatcatgctgctataaagacacatgcacatgtatgtttattgcggcattattcacaatagcaaagacttggaaccaacccaaatgtccaacaatgatagactggattaagaaaatgtggcacatatacaccatggaatactatgcagccataaaaaatgatgagttcatgtcctttgtagggacatggatgaaattagaaaccatcattctcagtaaactatcgcaaggacaaaaaaccaaacaccgcatattctcactcataggtgggaattgaacaatgagatcacatggacacaggaaggggaatatcacactctggggactgtggtggggaggtgggaggggggagggatagcattgggagatatacctaatgctagatgacgagttagtgggtgcagcgcaccagcatggcacatgtatacatatgtaactaacctgcacaatgtgcacatgtaccctaaaacttaaagtataatttaaaaaataaataaataaataaataaataaaaaagaattttgtcattcgttttatctcaagcttctcacaaaacctgaaaactaatgatgtgttctgatgtttctgctttggaaattagcatatacactcttcattcggtcagtttgttgaaaagcccactctaattcactgggccattttctacccatcctttcaaagttctactccaacaatacatgctctaagaaggtcaattctctggcccctgaaagttaagttgctctcatctcctcgatatgtaagtgatagctgtaatacatcaatgcttcatatgtctgtgtaccctaaaagactttcctacactgaagcaagggtgtgcaatttggttttggatctgaagagcttagcacaaatcctgaaacagtaagcctcaaaacaacttgtagaataaagaggtgagatgggagtacagatatataaggatatatacaagcatactttatggaaactcccatttatcaagctatcagacttatagaaaccacaaacatctggaaagaagccacagaatctggaagtaaggggaaaataaataaataatactaagaatgacctactatgtgcctgacaggcactttgaaaagtttctttcatttaatctacacaagaaacttttgctgttacaaaaacttaataattattgagcactgttatttggcaggcactgtggtaagcactttaaagattttttaaatttctttcatcatcacaaactccaagcatgggttctactattattgccattcctcagagcaaagaggttaagtaactttcacaagattacacagctaacaaatgtcaaagccaagatgaaaattcaggtagtccctaacatttgagatctgaagtaagcatgaccttaatgcaaagggattctaatacaaacatttacaaatctgtaagccaagagaaatcaactagaggtaaatgttgttcatagaagtatatgagagcaataatgagacactccaagagatgttggaaataaggcaaataagacaattagagatatagaaggccactttaaagattgactaatatattcagaatgattccatgcatatagcacacaaaactggcagaacaaagtatatttagcaatatatacatagattataaaaaagcaagcaaatgacacaaatgtcaggatactggttttccttaaagaaaagagaatgtattgtagtcatgggagcttcggggtattgtaaatgatttattgacttaggtggttgatatttgggtgtttgcattgtaatccttaaatgatatacatgttttatgtgataacaacaacagtgacacctcagcgtcttagctctagagcccatgctccattacacccatagtgtgagctaagcagaagtcaggtgattgcctgtccccatggctgagtactactcatcactcctgacctaccttaaatatcatctctaactctcccattttagtaggtcctcccaatctttttaccatcatttattgcttagcacttgtgatggttaattttacatgtcaacttgacagggccatggggtggccagatatttggtaaggcattactctgtgtgtagtctgtgagagtgtttttgaatgaaattaacatctgaatccatagactccgtaaagcagattgtcctccctactgtggatgggtctcatccaatcagttgaagacctgaatagaacaaaaaggctgaccctcccatgagtaagagggaacatgttctgcttgactgtgtgagctggaacatcaatcttttcctgctttcagactccaacggaaacatcagctcttcttgggtttcaagtttgctggctttcagaatggaacttataccactggctctcctgattcccaggcctttggactcagacaggagtcacaccatcaactctcccaggtctccagcctgtcaactgcagaaggaaggctactctagacccagtacctattataatgaccagtagataacagacagccagtcaatggggattaaaaaagcaagaaataaataaatgtcatacagccggtcaagtagacagacacaggctttgatccagctagctctctaccatcaagcctccttacaagtcacacattctttatataccttgggatgtctcagcctccataatcatttcttataataaatcatatatatctcccactggttctgtttttctaaaaccctgactaatacaacactaaagaccttaagactcctggataatttttttaatatgtttttggttttatttcatgtacttttattctaggaaaacataaaatttactatcttagtcattttaagtgtacaattcagttgtgttaagtacattcacattgttgtgacatagatcttcaaaactttttcatcttgcaaaatcgaaactccatacctagtaatcaacaacaccattttcccctctttctctagtccctggtaatcactctctactttctgtcccattaatttaacaactttggatacttcatataagtggaatcatacagcatttgtcttattctgactggcttatttcacttagcataatgtcctcaagtttcatccatgttgtcacatgtgacaggaagtacttcctttttaaggctgaatgatatttcattgcatatatatatcacatttttgtcatttcatccatgaatggacatttgagttgttttcatgtcttggctgttttatgtagtattgctatgaaaaagggtgtgcaaatatctctttaaatctctgctttcaatcattttaggtctatacccaaaaacaaaattgctggataatatgttagttttatttttaatttttggaggaacctccatactattttccgtagctgctgcaccattttatagcactactaacagtgcacaagggtttggaattctccacattcttgccaacatttattttctgtttgttttgatagtggccatcctaatgtatatgaggtaatatctcatagttttgattttcattcctatgacgattagtgatgttaagcatttttttcatatgctcattggccatttgtatatcatctttagaaaaatgcctattcaggttctttgcccatttttaattgagttatttgatcttttgttgttgttgagttgtaagaattctccatgtattttggatattaaacccttatcagatatataatttgttctggtttttaaaataataactttattgtttctggatgtctttctcatactagtttggtagctccacgaagtctaagtctgtttcttctctgctctacacccagcacctattataataaccagtagatagtagatggccagtcaatggggatctaaaagcaaaaaataaataaatggcatgcagctattaaacagatgcaggctttgagccagctctctaccatcaaccttctttatgacacacatatgctttataggaaaggtagagtcttctttggactggagcctattgacttcttattggctatacaatttagcaaacattcacctggctttccctagccttgacttttgccctaaatgaccaatgctgcaaattagatgctggtagttccagagacgaaaaaagatctcagaaaaagactcactgagaagtgagacctaataaaaagaaagtcagaagcatcgccaacttcaatagcaacggaggatatgtgacgcaggaaaaagcagtctcacacgtggatttttccccaacagcttcatataacgctgtaagagtgatgcttacgcaaatggtcttcccaagaagagttaaattctgtgattttacaggcaaatatgttttgaaagattttgtaaaacaaaatggttacaataaaagaagcctgatgttttaagaagaagaaatttcaccaacatgaactgttttcttacccaaaaatcttcaagtcctgaaaataacaaagagtaatgtacatgcctgcaataaatgcgcacctatatgtgtaaatgtcctggctcaaattaggcaacagtaattggatgtaagatgaaaattaatgtcatggtaaagatggggaaaagtcagaaccacacaggaaagccttggcaactctatgtctggaaaacaaaagctatagaaggaaaggacatgaagggcatagaagaaaaaggaaaagtaaagatggcgtttgaaggaaacatagtgtatcattttttctttctccggatgacactaaggcatacactacaaatttcaaaataaattaggaaaccagtacacaaagctaacaatgtgccataatttctttggtacctctaccaaattaatcactgtgcacacctattttgtaaactgattgatcttaatgtttatggctttagtctgagctgtctgtaaggagcaatattcacttaattaaaaaaaaaagctaaataaatcttaactaatatacacttgagaagaaaacacgaagcattttaaacaatgtaattaccaaagatcgccaagcccagagtagcaacttgacttcttcctagtgttactgatggctaagtggtgaggaaaactaattaccaaagaaaataattctcatctatactgctacatttccccagccttctttatttatgtgtgtgcacacatatatagtcccaggtctctgcaaattctatcatctgtttaggtgatgactgaaaggaaggtagacagatgtagccaagacagatatctgcacagcccattttacaccacagactctctgatgtaaaaatgtcccacctattaatatttcagtgttttctttaattatttttctctattaggtaatgataaagaagctatgagactttcaatgacaaaaggattaataaaatgtaaaatattaaatactgaaggtttatatcaaactttttcatcttcaattcactttgcatgcccctttcagagtttttatatttttattccctgttcttgtggtcaagttttgatagtaagtcaagttaacttattctttcctcaatttccagtaattaaatattttttcttgctcagatcaacgcgataaacttcaagaactaacacagataagcccattggaaacaaaaagaccttcagaacacagtacttgcactctactattaacagaaaagaaaaaagcaactgacgtctttatctctttatatataaacttcatgtatctataccgtagttttccaattggttaatctttaggattctatcaccttcaaaattgcataactaaagctatagaaaattgtattatataaataagaatttaagaggtatcatttacatgtctcagaatcaggcattctccctaattaaatacgtgattatatgtatgattatatatatggtcacataaagaaccgagtacgtgtttttgcacccaagatcaagttttttagatcatttctcctcttttatattttataaaaataaaaatacatgttatattaaaatagcccagagaaccaagaccaaagtctggctagatttctacttaatttagtagtcagtaaaaagccagaaaacattatccaaggcaagactataaaagtatctcttcattgcatcccctccttatgtttatcgtttcctccatgaatcaatacgttcttcttgaggtgaagagaagcaataatagtcattgagccagttcagtgtcctgagaacctattgccatgggagagcactatgcactttccaaagaaaaaaactgacactccccttaaaaaaaacccaaaaacataactttgtagtattatcatccacctagtctgtgtttttaaggtggttattttgtttggattacaggtctctgtaataaaaaagttaaatacaaaagatactaatccactgcaaaataggtgcaagtaaataccaacttccaagtcaagaagataattgaggaactcaaaaaatggggtaattgcagtgaagttatattgtaggataaaggaaaataaaacacactataattcagcttttctttgagacataattactgtcaatcactcactgggaagttcacatttcttaaagtttgcattatcatttatttgctacatttttgtgggattttaacctatacaaaaaaaaaatgtgtatccttattaaccagtggcctcggtaaagaagatactttatagtaacacacaggacatgacaaagagttttatgattgctgtacaattggaggagtctgcctcagcatcttccccaaccttgaagctcctcatccaccaaaacaccagggcatggttggagaaacccagcaccacatgtcacatgtcacactaacacagagaactgagcaaagtgtgacaagatcagacacagacataggacatttcgctaatagtgcggtgtagtcaccgcactacacaggcatttttgaaaagcgtattaagaaagaacatactttgaaattctatcattacctagaatttttttcatgtttgcatttgttttttatttttcttatttgtagaaattaaagacgtacaagtgcagttttgttacatggatatattgcatagtggtgaagtctggacttttagtgtagccatcacccaaatagcgtacactgaatccattaagtaatttctcatccctcaccttcctccccacctcccacccttccaagtctctagtgtttatcatttcacactctacatctgtgtgtacacatcatttagctcccacttacaagtaagaacatgtagtatttgacttggatttatatagaaataaagttctagaaacagatgctgaagttaaagcatgaacttaaggcaactacagagctagtaataggaaataataaaagcacggtgttttttaatccactcaagatttttagggaaaacactaatttattttcaggggagggtagaacgctattatgtagcatttggaatttgtaatataaaaatataatttaaagttaattgcttgaaaaacaagagtcatctcattcatagtatggatttggttattctcaatatttttcttacctgtgtagttactaattaaaacacaaaacacacacacacacacacaaaatttggtattattgcttacagatatattgttggggtggacttgagctgacaagacaatatacttccatgggtaaggtgggcacagcaggtaatcagaatccttcatgtaactttgtccaaatgatgcttaattttatttttgtgagctgcttattacaatgttaaattcaatctcaatttggtgcaaaatgagaaactcatgtatgtgagtgatactaagcaacctcagtatttgaaactagaacagacaaaaaagtctctagctattacattaacacagatacttcgacttcgggaactttttctcataggaagtcctatttcagggttcattgacttacacaaaatcattaaacaacagaaaagatttattaacctgaagtttcatttattttataactgttagaagcttaccaggtactaagataatataacccttcctgaatactcttatatatcaccatctcaagaaagaatatattgaagtcttgatatggtagactacatcatctggaaataatattagttttactaaaaatgttgagtcttaaatttcacatattgttagagtaataaaatagtatctggattgtaaacttactagctgctatttattgcttaatttagagatggtgttaacataactttggggcacacataatgttaactatacaatttagaagaaaaactaaagcaccatattatcctgtttaccttcacagaataggtgctagaaaaattatttaattaaaacattgtaggccgagcatggtggctcacgcctgtaatcccagcactttgggaggctgaggagggcagattaagaggtcaagagatcgagaccatcctagccaacatggtgaaaccccgtctctattaaaaatacaaaaattagctgggcatgatggcgtgcacctgtagacccagctactcaggaggctaagacaggaaaatcgcttgaacctgggaggtggaggttgcagtgagctaagatcacgccactgcactccagcctggcgacacagcaagactccatctcaaaaaaaaaaaaaaaaaaaaaaaaaaaaaaaaatatatatatatatatatatatatatatatatatatatttaattttaaaaattaaatctgtgcaagaacccaacagtcacaaggaggggtatgtttttttaaaaaaattgcaaaactagaactccatgaatctcacaaatgtcttaatttaatgtacatggttttcacaatgaacataacagtgaaagatatgactcaaccacaagttaagtacatagggtgattttatttgtaacaatttttggggggccaggaagctctcataatgtctcaagtgttataatcttagcgattttaaaacaaatatctcaatggtatgtacaaattttaaaatttaggctcaattataattcctctgtaagataagagcatgagatttaagtggcagacaataacacacgaataacagtgatcagaaagctagattctagtttcccacaaatgtatgcatactagctagatttttttcaaacactttcgttctatatttgctaaacattttcaagtatcctatagcagagtcaaaaaactccattttattgcattctattttagtggattctttgtaaagaattatttagcaatgcattcctttattggctttatacatgctgattttcatatactaatacatcttaagttgagaaaaatacataatccttatcttttgttggtggataaagaatttcactgataaagtaaaataaaacatctcatttacttccatgtttctccccttcctccatcttctcaaaatcaaaaaataggagagaaaatgaataatattgatttgataattctttgcttagagaccctaatttttctgacaattaagagagttataaaatgactacattttcagtacacataataatatctgaaaatgtagttgggtttgtttttcttttaaaaatctgaagttttgttttcacagaaaaacagatggtgtttttttggtttgagggtgaaagtggtagtagaattttgttttgttttgttaaaaaaaaaaaaaaaacaggtgtgacaatcattttctcctgctactgtattagcacatttaattgctaagttcacaggcagccttctcaattcttttaccagcagatggtgaaagtgattttaaaagaggaataagaatttttcaagaaccatttcagaacagcatgagatctgctctttcttcaatgggtgtgtcaacgtctgatgaacactaagaaaagtcacatcactgcatctacagtgtatttgcctttaattacttgacagttatccaagttttgtaaaattactcacacattatctaccaaagtactatctgcttgcagtgactatcttcaaatgactttataactattggctaattaaaacttcacaatactcctacaaaatatgtaggtagaaagttttacaagctttgtttcactgagttcccaggtgtatcgctgacagagatggcagttaaatgtaagttctgagctcacaaggatttatgccctgtgccagcatttgcttctcaaatggcaatgactagcttttagaataaggagatctttggtgtcacagacacagttacttctccattacccatcccttttttccttctcagctaatagaaccctaattctgtccagaatagccatagacaaagaaaaagttctgacacttgttaaaacagtagggaagactttattcatgactattgcaatataggacagagattgggctcaactctgaatacagcaaagacagctggggattgtagcccagtttcagagtgaggggtcagtggatggaaagttactaagaggagtcatcaatggtaaagggattcttctgaagtcaggccaaggacataaattaaaggtgggggatgaggaacttggttagatatcaaagttgatcaagtatcgaaagtgggggaattctcactaaactgacttagcaggattctttgctgagattggactgagcaggccaaagacaggactggggacaaggtcaaggcccattagagaagacgttcagaggagcctgatgaaagttggtcaaggagagagtttgccactctatactcagctaaaagtccgtatctcctctgcaggtgagtgcagcatgttgcatggttttgaaaaacaacatgtaagagaaagtctgctggaaagtttggagaaagttttcacctttctgatgcaggcctgcctctttcccttatttctttcctggacacaatgcatccctatagtgatcattgggactaaaaccatgctaaagatgatggacaaatagaaagagcttaggacattgatgaaaatgtggagccattgacacaacctttactctttgcttgtctcctccaacctccatctacaatagcatctcaccccagctcctcagttaacctacattagcaacctggtgtgtttcctctcatattttctcatatactcatacaaagacctaaatgtgaacagaaatattgtgtacagatatgtatacagaatttacttttcattgttttattaaaattgagccaaattattaatcttccatttctctcacacaataatacctcataacaatccctccaagatatccagtatagctctaacatttgctttttaacagctgcctagtattccaaagtatggatataccctagtgccttcttttctgatttttgacagaacaaaaatgccataataaatgttttcttatacgtatatgctttttttattctacggtataaatttacaacattgcatttctaaatttttctagagactttttgaaagcgtccatttatatcaacaatagataagtacctttttccctgtattcctaccaataatttgtgctaccagtttttttaatttctgctattctagtatttataaagttatatctcatttttacttttatttgcatttcctacatatatatttaagtatctctttatttgtctgttggccatttgtacttcctcttctgtgaatcatatattcataacatttgtctatttttctctttgtctgtgtcttgccaactttcttgtttatatagatattaaccatcactattacatgtgttttccagatcttctgtgtgtttaccaactctgttttcggtatgggttttcatacataggttttcaattcttaactgactaagtaaaacccattattttttctatataggtaacggactattagtctaaggagatttcctaaccaccatatttttgagacatttacagatttttatttttcttcatatatttcagtctgcctgaaatttatttttgaacatggtataagatggggtccatttttattcttttccagaataaattgcagccgctatatttgccaatatgaattcattatatttatcatattctttatttcatattctcttctactaatcgtcttttcttgtattgacttgattagaggggctttattgtatgccctgatattttttaaaagcctccttttaattcatccttcttgcatttttattggctgttctcatacatttatttttccatgtaaactataatttcacccaattaaaaaatttgttggatttctaaataaaatggcattaaatatatatgttaatttggggaaagttgatattttcataatattgcctccctcatccaagagcatgctatgcctaatcctttattcaaattttgtttgagtattttaattaaatgtcacatggtctttgtataggtctgctactcttctttttaaatttagttctaagaattttagttttgtcaatattttaaaggtagtgtttgtaggcatttcttgctagagtaaagaaaatctattgattccttttgttatgtagtccatatctggccaactcaccaaattttcttattaattctatcagctgtttttattcaattataaatgtcttagatatatgctttgttgagtaggagcaaagaagtagagcaacaacatggtcactggaattgaccataaagtatgtccagcatattaacattaaccattatgcttttgtgtggaggtggaaagagagaacatctactctgagatatcaaatatgtggattaatttagctgattttacatattatttctgtttccacatttttttcagactgaactagacatatctttatcttttatttaaacatttgcaatgattgcatatattagcagtttatcaaaagtcctactgcatcactatttttttttatttttttagagaggggtgtcactgtgttgcccaggctggagcacagtggctattcacagatgtgatcgtagcatactacagtcttgaacacctgggctcaaagcagtccttccacctctgtgtcctgagtagcttggactataggtgtataccaccggaactagcttgcagcacatttttatcaaagaatagcatggctggtgtgtgtgctgaagtttgatttaatttttaagatttttatttgtgatttcacattttaaactttatatttaaatatcttgataatttccttgtcattcaccattttatgggtgtaaatcttaataactaaaatctatatgctgttttatattatgatttttatcttaaagtctttctctagaaaatatcgctgggttcagtggtccttctgtgctccaagttcactcttcccacatctatattaaatggcatcaatatatcacaataacccattacattgtatgttatttaaaaacacaaactgtgtctaattatcattgaatgcccaatatctaacactgctggacatattttggtgctaaatatgtttgccacacagagtttaactatttactaagtttatagtgactcattttgtcttcaaaattatcctgtgagaaatgctttaccattgttctaatttctcagtgaagaaacagactatgagaaactcagagagtgattattcaactacaatttagtccttcggtttcccatcccatataagcattgctgttacccacatcatcatacattgcatcctccaattataagtccctgtttggctatttaatcaattgtatgattcaataaatcatactaccatttttatcatccttgtgtctgttttttaaagtttagccactttgtcctatttcaccaaaaaaaaaaaaaatcttcttttctcaaatttgctttgcttcagccataaactaaacatttataacatctcataagcttatacaacctgatgaaaatagaaaaaaatagaacttttattttcttgctgtatttgctattgtatgagtctgttcttgcattgctataaagaaatacctgagcctaggtaatttataaagaaaagaggcttaattgactcagttctgcaagctgtacaggaatatgtgcctacttccccattaccttccgccatgattgtaagtttcctggtgaggcctcaggaaatgtacaatcatggcagaaggtgaagggaaagtaggcacatcttacatggccagagaaggaggaaagagagagaaggtgggaggtgccacacacttgtaaaccatcagatctctgagaactcactcactagcagaagaacacaaggggggaaatccacccccatgatccaatcatcccctacccaaccgctactccaacaatggggatcacaatttggacatgagatttgggaagggacacaaacccaaactatatcaactatcaacttaagtctataatttttacatggataggtactatatgcccaagtcttaaagttccatagctgtggtcatttttgcaggttaaattatctgatttctaatcaaaaatgtattctagagttaaaccttcatttttgttaactgggagtttctttcttgaaataatgcctcacattctatagtatttttatataaatttaatgtctataaggcagcatctttctccccttattttaagattaagaagctatagcttaaagaggataagtacctcatccaaggtcacagaaaaactaaatagccgaacaggaattcacaacagatcctacaactccagacctgaagctattccttttactccttctctatgtagtaaggtaataatatttcaagttctccatgtgattggttcttgtgtttgtttgtttgtccggagggtaacatcctttccacatttctttcaatctcttctgtatcatcaaatggtttgtttagcaagatttccgaaattcatttggtcctttcctgttgcctacttaaaataggcagatctaatactttctccacaaataggatatagcatttaacttcattttgatttcagaacatgtacttatttcctctaatcagcagaaagcttggtttttcccttcactagaattgaataatttgaacttcgcttatagtaaacacttgatttacaacaatactttcactacgtatattgatttacattaaggccaacaaaatgccatatttattcttcattcattcattgttcattgtcaaagattatgtgctttgtagttaatgtagaacttccaggaattcctgtttattctcatattttaacctaaatccctgaaaagtaatttatttaagtatcagcttctcagcttcaattcaaagcagaactcaagtaaaacaagttgtcttccttaaatacttcttattttatacattaaaggctggttcccatcatcttttccttacagatatactctatctactctccatggtgctcaaatgcatgtaactaaataaccaaccttataattctgaaaaataaaatcatggtggatgaggactggaatcatggatttttcttgttgcttatttggtttttgcttaagcttttgtcattaatacctgcagtctatattcaggtttcattgtttttagattacatcctcatgggaattctttttttaaaacatatacacattttattggagttttcttttcaaattcaaaaaggagaacattattttttcaaagccaagaaagagaagagtatatgaaaaaagtcaattttgtgcatatctttttacatttctttctatgctcatgtaaaacatgcattacttatgtaattatacacatatgttcccggtctcatctgtattaaattttttttattattgtactttaagttctggggtacatgtgcagaacatgcaggtttgttacatagacatacacatgccatggtggtttgctgcacccatcaacccatcatctacattaggtatttctcccaatgctgtccctcccctagccccccaccagccaacaggctgtgtccatgtgttctcactgtccaactctcacttatgaatgagaacatacagtgtttgcttttctgttcccgtcttagtttgctgagaatgatggtttccagctttatccatgtctctgcaaaggacatgaactcatccttttttatggctgcatagtattccatggtgtatatgtgccatattttctttatccagtctatcattgatggtcatttgggttggttccatgtctttgctattgtgaacagtgctgcaataaacatacatgtacgtgtctttatagtagaatgatttataatcctttgggtatatacccagtaataggattgctgggtcaaccagtatttctggttctggattcttgaggaattgccacactatcttccacaatggttgaaaagcattcctgtttcgccacatcctctccatcatctgtcgtttcctgacttttgaatgatcgccattcaaaatggcattagatggtatctcattgtggttttgatttgcatttctctaatggccagtgatgatgagttctttttcatatgtttgttggctgcataaatgtcttcttttgagaagtgtctgttcatatccttcacccactttttgatggggttgtttagggtttttttgtaaatttgtttaagttctttgtagattctggatattagccctttgtcagatggattgcaaaaattttctcccattctgtagattgccatactgcccaaagtaatttatagattcgatgctatccccatcaagctaccattgactttctgcacataattagaaaaaactactttatatttcatatgaaaccaaaagagagcccctgtagccaagacaatcctaaccaaaaagaacaaagctggaggcatcatgctacctgacttcaaactatactacaaggatacaataaccaaaacagcatggtactggtaccaaaacagatatatagaccaatggaacagaacagaggcttcagaaataatgccacacatgtacaatcatctgatctttgacaaacctggcaaaaaacaagcaatgaggattccctatttaataaatggtgttgggaaaactggctagccatatgcagaaaactaaaactcaaccccttccttacaccttatacaaaaattaactcaagatggattaaagacttaaacgtaagacctaaaaccataaaacccctagaagaaaacctaggcaataccattcaggacataggcatgggcaaagacttcatgactaaaacaacaaaagcagttgcagcaaaagccagaattgacaaatgagatctaattgaactaaagagtttctgcacagcaaaagaaactatcatcagagtgaacaggaaattctttattagaaaattacatcactccttcctcactatatattcctaatatcctaatttagactattgttttaacctagatttttataaaagtctcctgaattatcttccttctactgtctttcctctgtgagaaatctcccctccatgacctgctctctgagtaaggctgtcagaatgttctgacctatacttaatgttccaagcacttcaaatccaccttataccaaatgaccctcccttcccctaccctgctcaagtctgcccctgccccaggctccctcgatatgacatcaccacatactcagccaagcaggcaacattaaatcatctttgattcctcccttttcctcactccatactcttcttcattcatccatccattcattaaatcaatatttaaagagctctgactatagggcacagtgtgaggtactattaattttgtactttctgccatatgttccttcctctaccacctcttttctccacatgtcaaaattctattcatccttcaggacccagtccaaaagacatgtgaacttcctatgtgaagccttttctaatttattcctactatcccccaataactttttttaatgtaactaaataattatttatttacacactactatcatgatattcattgcaatttgatttgtattggaaagtaatctatgcctcctctaccaggttacacacatgatgtacatattttttaggatctcatcaagaaggtagaatagacgttcaaaggtcaattatcaatgtatcccccaaatccaaaaggttagcttctatgaaatgtatgtttgtgactccttagaaatttaaatcctaatccccaaggtaatgatattagaaggtgggggcctttgagaggtgattagatcacaagggtagagtcctcatggatgggattagtgaccttataaaagaggcccagaggaacttgtttgcccttttcactatgtgaggacacagctaaaagcatcatctatgaaccagaatgtgagtgctcaccagacaaccaaacctgccagtgtctcaatcttggactgctcagcctccagaactgtgaaacataaacttctattgtttataagctacccagccacgatattttgttatagcaacctgataggctaagagattagcagagcacggaatatttggggaaatatcatacttaagaatctgtgcgagtatgcagtcacttgggagaaggtaactggcaagattgagtccttgtcttaaaagaaaagtgatgtgctaggtgaataaccaatcaaggactcaatcaagaagcaaggcagcaagttcattttaaacactagactctgggaggggactgaatttcagcagcaacaagtaagaagtctaattagcagggatggactagttccaacagtactttgacaatatcacataattactgctacttgactagtcataaatgacacttgtaaagcaggaacaagactgaggttgcaaacaagtcagtggctccaactctaagaagctgagaatggcatggcattgtgcagccgctgaatctcctaatcagaaaatacactcaattgcattcagtaaacatttgtctctgagttaaaggctaaataaaatctataatggacctagaaatttctgaaaaaaaaatttgaaccctgccatccattgatggacatttgagttgtttccacctttggggtattttaaataacatcgctgtgaacgtgggggtataattatctcttcaagaccctgcttccagttttttgaggaactgccatactattttccacagtgtctgtaccgttttactttcccatctacagagtacaagtgttccaacttctcctcatcttcactgtcctcatcattctgtgctgctataaaaaaatgtagctgagactggatagtttataaagaacagacatttatttctcacagttctggaggctaaaaagtctaagatcaaggcattggcaggtttggttgtctggtgagggctgctatctacttgcaagatggcaccctgctgctgcatgttccagaggaaggaacactggtggaagagaaagagggctgaggcttcaggggacctcttttataagggctgtaatcccatccatgagggaggggcctttatggcctaatcatctcttaaagacccacctcttaatactaccacattgagcattaagtttaaatatctgtattttgaagaggacatattcaaaccataccattcaccaacactcattattttctgttattgttgttgtttttattcttatgggtatgaggtgccattaatcatcttttaaaacatccatgtcatcaagtctgtggctgagcaaatagtaatattcaataaatacttatgcaattaaattgaaaaagggctgagctcagcagcatctgaaaaaagcagatgtgcattacatgatgtaattccatctcaaggagattgagtgttttgctctcacttgcagctatgctaatacaaattctctcttccttctttctaattttgaggtgtttcaaactatggacacatttacaacattgtgggagatttcatgaatgattgtgaaattccttgtgttttgccagtcaatgaaacggtcacttttctatatgcatcttttcctatgtgtatatgctattatgttaagtaagtttatataagagcagtagatgtgtagaataatatccatgttgacctggagcaaaatacatttatattacaaatttttaattgctctaaattaaaggtaagaagtgatgagagactatattacagggggtcctgatctttgcttgtgggtcaggcttcagcgaagatgtgacatttgagtgcatctttttctatgtgcatattctttgccttgtacttttctgtaaccaggcaaaaattaattcaaccaagagatactgattcatcacctgctaaatgtaagcactgtgctaggctcagtggggttgcagagaggaacctaaggacttggcttgctcccaagtaatgacagaggctgggaatcatcctggttccaaagagattctatagcagagcaaggtcaaagtccttacatgcaagatataaatgtaatgggtaagttaaagagaatctcatagccattcatcatgcacctagtgaaatgatttgattctaaagaacatgctacactcccattgtttgtcctatccatttgtccatttgaataaaacacgtccacacaacacgtgcattatatcaaaatgcactggcaggctggcactgttcattcaatctataataatgcaaggtgctggaaattgaagtgaaagttgaaccgactccttgaaccattcaaaataacattcaaagaagcatccatttttagaataccaaatatttccattctgaatttgaaaatcaacctagtggcaggaggactgaaaaaggaaatcagaataaaacagactgataagtcgaaatttgtgaaattcctgtttttgcataaaatgaatggggaaaaaatataaagttgatctattcaccattgtcatccatgctccaataaagaagattagagttagtccagataggacagacacacaagcaaggaagcacataagcaggtctgcagtcccatatttctgtaatctgggtccaggcctggtaatgttatggtgttcaacctttgctaatgaggtcttctttttggttcaatgggtattcattatttagcagacatcaccacattttactatcatttacaaactggttgaaaacatattccctgaccccttctgatattagatgctcttctagatagcagtagaaaagaaatggtgagatatatagacaatgaaatttcaaaaacttcatttctgctggtctgaccttattttctttttctatatacaacctgcttattcctatttctgggccttttgtcatgctattttacctacatagcgtatcttccataccgctctacaagcacttccattaaaaccctgtcagtattctcaatcattctccaagctgagaaaaactgaacagcattttcttggagctccattagtactctacatatgaattgtagtataataagcccaggcttcaggtccctacattgtacttaagaatgtgcattaaatatgcttgatcattttaaagcattatacaaaaacatgagacatacacacaagcttcaatctcagcatcattgcctcaagccccacattcagcattttgggcttgttgtgtttgtttgaacacattcaggtctgctttgcttgtctatattttcaggggtattatgattaagtaataaaaataacaatagcttccattttttgacagcttactctgttctagtcactgtgctaatcatttttcacacattatcttagtcaatcattgaaacaatgctattcaattgagttgatatgaggattattattccaatcaatcacattaggaaactgatagagaagataagtagaaacttgccccagagttcatgactctatgaactcttactttgccatagatgatatcatctctaataaaggtggaatcagattgttggctttacaaacatgtaaaactgactgatttcatattctttctctgcccttcataagctaggttatgctgaaggagtttgctgatcactttaagccacaatttcttcatcaataaaataatgtgattgtgattattaaatggaataatgtatatgaaatgcaaaataaatgattatcacacaggaaacactgagcaagtgttctgtttttccctttcgaatacgttgtaagttcttcaagtcagaaatatcattatgacattggagcactctagtgtttctagcacaataatgccaccataagtaatcaataaatgctttatgactgaacaacaaacatttattatgattaagaaacaaatgtatccatattctagcaaattttaaggttaaaaaacgattgttttaataatctaaacttttctcttcctatccttgaagactattattcattagtgagactctgtaaagaatatgaaaaagcaacagttgaacacaggctaagtctggagacatattaaataactaaaaagaatcctgactcggtttctgaccattaaactattttaaaatattagactatttttaaaatatacagcctgaaaaaataaaaatacaggacttcgtctgagtgcctaaatcttatattcctcattgtgtaagagggcaatgcataagaggtacacatccattaaatatctgtaatgaaagacctaatagtactaagtaaaaaaataaatgacaacatatatctgatctccagtgaactcatagtctaatagagaaaacatgtgtgacatatgtggtaaatacatttttttaaagtacaaaaataatgatataataatacaaaagaaggagatattcactaagattgaaggatcatagaactcaatacacgtttgaacttggtcttgaagagttcaaattcacaaggcaaagatgatgacaaaagaatattccacacagaggaaactgtaagaacaaaggcagagatatacaaaaaagaaagttgcaacatttttggagaatgtcaagagatccaatatggctaaagcaaacggcaagtgaagctacatagtcagagaaaggatgagaaaggaaatacggttggactattaaggagcttgacagtcataataagaggcctagactcaaagcagaagtttggaccctgccatttcaactctgaggatatttttaccctgccattttgacccagttgtataccaaattcatgtcttcattctttaaaatatataaattgaataaaatattcttgttatttattcctgacactaagagcaaaaaagaataactaagaaatcaaaaaattaattagctaattgataatggagattactggtagatatcatcaaatcaggatagaacagataatggctaaaattgcacagggtaaaatttgttaacaaggatctaattttcttagtaaaattcatatctgatttttttggttccccaaatattggacttgttagaaataatggccacaaaagaaaaaatacaatgtcggaagctataattgttaaatatgataagaataaaactggctgtaaaggataagcaagacttaaataaacaaagcagggataacacatctgggacacaagaaatgaatcattttggccaaaagaattttcagaagttataatcttaaaaattaaattgcacatcaaaccccaatttggaaggcttttgcaacagtcaaaggagtttggtaataacaaaaactatgttcttctcgagaaaatgatataacagaagaactgtttttagataattgactagttaacaaacatgcattaaagaccaagaaataatcaccgagaagtagttatagaaacaagagtcaccagtttaaaagctagtgcaagaatcatcaatggacacctagactagaatggtcacattgagagtggtaaagaaaaattcgaaaagcattttaagaaatgaaaaaaaaaaaatacctggtcctcaaagactaattctatacagaaaaagaatctagaaggctaaagtatttcttctggaatatctgtatttcacgaatttaaaacaggagaggataatgcataacgtcttatgattcattagttctaaacaatgaagattgagaaaaaagttataagatatagcaaaatagatcattattgaactaagaagaagtggaaagaagctgggagggtatggaaagcagggaagaataaggattgagtggaaatcaaagacacaaagacaatgaatatagaatgctcatttgaaaatcacacaggaaagggtgatgaaggaagacttcctggaaagaaaatggaaatgttatctgggtcttgaaggataaatagaaataagacaggcagagagacagtggtaaattatacaatactcttgaatccacacaaagtcttgttattgctcttatggtaagagaacttaatagagaaacagaagttatatttaataatgatccatagcattaggagatatacctaatgttaaatgacgagttaatgggtacagcacaccaacatggcacatgtatacatatgtaacaaatctgcacgttgtgcacacgtaccctaaaacttaaagtataataaaaaaaagaaaaaaagaaaatgtggcacatatacaacatggaatactatgcagccataaaaaaggatgagttcatgtcctttgcagggacatggatgaagctggagaccatcattctcagcaaaatttcacaaggacagaaaactaaacaccacatgttctcactcataagtgggagttgaacaatgagaacacatggacactgggagggaaacatacacaccatggcatgttgtggggtagggggctgggggagggatagtgttaggagaaatacctaatgtaaatgacgagttaatgggtgcagcaaaccaacatggcacatgtatacatatgcaacaaacttgcacgttgtgcacatgtaccctagaacttaaagtataaaagaaatctacagtaatcaaaatgcattgatactggcttaacaataaacttacagaccaatggaacagaattgagagtccagaaataaatctaaacagccattgtaaattgatttcaacaaggatgccacgaccattcaatgtgggaaggaattgtctcttgaataaatgatttttgattttgtggggtttttgtttgtttgtttgtttttaacttttgttttaagttttaagttcagggctacatgcacaggatgtgcaggtttgttatacaggtaagcctgtcatggaggtttgttgtactgaatatacacatgtaaaagaatgaagctggaccctcactttataccatacacttaactcaaaatgtatcactggcctaaatgtaagagacaaaactgccaaatacttaaaataaatataaagttgaaccttaaaaaaaaaaaaaaagatccaggtagctgggccagacatcagtactacctatagaaatggaaaagttgagaagggaagatcccaaattagtttctttaggagatacaaccaagtggtgataacttcactctcttgacctttccaaagttttatgagccctaaggccttgcattaaaatcttcacatctggaattcacaaagtgagttgtgttttcttggccaaaccctgactgatgatatgcatggtatagaggaattaggactgggtaacttaaggaggctagaaatggggaaaggactaagcagtaaataactgggcagaatgaagaatctgtactggaaagagaacaacaagtaccatgacttttttaaaagatcaaataacttgtacctatgaacaaacttgtcattggaaataatcattactggaaacactaagtcatctgggggaaagagacggggcaatgggatgatctgctaagggaaaagaagcatacaaaagatatctcaggaaaagtgagaggtaacatcaaactggggtcaagcggattacagatagttcaaatccatgattagaaagcaggtcactcattttgcaccacaaaaactggtgatctaagttgagtaactgatactttagaaacgattttcccacctacctacataccctattcaaatgctagtaccagaaaaatagaacacttactatattagcatcccagaaaaagatattcctgtgaattatacaaaagaacagtatgtttttccttttcagacacataactcccattaaagtaaatgcatgtttttatacacctgtcaaaaatagattacaggcactggcagtaaaggtcacttgggtctatttcttctacccaggagcatacctgtgaatgcaaattaaaagtgcacatacaaatgttgtaagataagagctccaagtgccctaatcccctcacttatacaatgtgaacagtcctgctgaaaaaatcatttcatatcatattttaatcaagtacatatcccccaaggatgactacatgttgcaaacatatgtaagttctgatttccttggaaaatattatttagatttttttttttttttttttagttttcattacaacttagtttatttagttcttataataattctttagctcatatttatttacttaattatagattaacacagtagtttccaaatttgtcttcacattattagcagaatcaagtgagatcttttaaaaatttcaaatcccaagctatcacccagaacaattatatctcaatcccctagggtgaggcaaagaccttgttatttttttgaagctccccaggtgagtccaatgtccatacaagttggaaactactgtgttaacatagaactccttaaaggaaacctgattagcctttgagagcagcagttctcagacttagctatatatcagaaccacctgggaaattctgaaaatcccccgaccctggctacacccaagactggttaaattgtaatccttggggaagtgagcagggagccaaccattgttgttctttaaagttccaaaatgcagccaagtttgagaaccagtgctttaagccagagaatggtttgtaatacttattaaaaccattagatgtctggaaaaataacttcattgatgcaataaaaattcttattaaaactctccaaaaaaagaaggaacaggaatgtgtattatgttatgtaaaggtaatgacactctagtaagtagaccagctattgtgttaactacaatattgaaaattaggacagagacagaaaaagcctaagcaagacaaaaagaagaaatataacctgttgtcatttagagaggtataattgaatctttcaatctctatataataaaatatattcctgttctattcatcactcttgccaaatgtataagtttaagaaaatttaaaaagaaagaatattactgatagaaaaagttttccaaatactcaaaatatgtagattaaatgattgaataattttgaagcaagaaaaggtcatctcttatctctaattccaattctaagcagtagtttctggccactttttggtcctgttgaaaattagttcagcatgaataaaatgtatattatgtttcaaatacaacagaaggggtggttgaattaagatgatttgatgctataatttttaagtgtttattaaatgttcactttcatgtaaatatatttcaatggaagttttaagtatcatttaaaacagattttataaagtataattagatgtgctgtcagatgggaagacaaattaaaagtgcaatttacactgttgcagcagcagtgccaccaggagcagctgagcttctgtacaatgctcaaggcagaatgtaatccagtctccacagcacatgtgattatagactctcagggacactactatttaaattattaatcaatcagtttcctttggtagaaaaatctgtgtgctacaaaaaggagggggaagagtaaggtcttttttaacttttgtaaattgactgcctggtaaaaagcctcttacgtctcaatctcctagggtgagttcatcgaagtatcagctaggcatgccctgccaattgacagtatatgacaaagttagtgggaaacatccatttatccaattactttgggatgatttagtagttgttacaactggaaatctctgggtagaagccagatgaaccaatagatttttttttaactgtatatatctaaggtgcacaaagtgatgttttcatacacatatgcatagtgaaatgattgctacagtccagctaattaatatataatcatcttacatagttacgttttgtgttaatagcacattaagtctactcttggcaaatttcaagtatacaatattattaatatgtagtcttcatgctatacatctgatatctagacatattcatctgatataagatataactgcaactttgtaccctttgacctacatctccccattccttcttccctcacttccacccaacctctggtaaccaccattctactctctgtatgtattctactttcttttagattccacatatacgtgaaatcatgcagtattttactttctgtgttctgtgtctggcttatttcacttagcatagtgtctttcagggtcatccattttgtcacaaataactggatctcctttttaaggctcaataatattcgtgtgtgtgtgtgtgtgtgtgtgtgtgtgtatcccaatttctttatttactcatctgttgacagacacttaggttgtttccatagcctggctattgtgaataatgctgcaattaacacttctaaattatccccacagcttttaatgcagaggtaggtgcaattctacttattgtaatcttacccaaaacatcaacagggacccatctgatgattatcccctttgaggttgttggttaagggtacaaacttgtagttaaaagactaataagttctggaaacctaatgtacggcaaggtgactaaagttaataacaatgtattatacactggaaatttaccaacagagtagatctcaagtgttcttacaaccacataaaaagcagaggggaggagggaccctaggtgaggtgattgatacattaattagcttgattgtggtaatcatttcacaatgtgtacatatatcaatacatcacatggtacaccttaaatacatacagtttttatttgtccatcatacctcaataaagctggaatgaaaaaataaagggaatcactttaccaaacgatataattacataactaacctaatcttaggcaaacctttaaaaaaaatcacttttctttcttcaccagctagaaagaatcattaatagatgaaaaatcaaacatgatatgttttgccttttcattttcttcactgagcctctgttggactcattaattacccaatcaaaaggcaatatacttagttgttataagacactcctaccaacatgatagaacctgtcaccaatgcagcctaaggttttgttctcctttcattaaacatatccattattagttgttaaacaacgtattttgatatttctggatttcacaatacatgattggaaaaataaaaatcataaaaaacaattttataatgaactctcctaacaaataaaaacaaacacacacaaatcatctaaacaggcatttattttgaatccaatcagcaatgtttattataatccaaaattttttttcatttctttattatactttaagttctagggtacatgtgcacaaccagcaggtttgttacatatgtatatatgtgccatgttggtgtgctgcacccattaactcatttacattaggtatagctcctaatgctatccctctccctaccccacgacagaccctggtgtgtgatgttccctaccctctgtccaagtgttctcattgtccaattcccacctatgagtaagaacatgtttagttttctgtccttgcgatagtttgctcagaatgatggtttccagcttcatccatgtccctgcaaaggacatgaactcatccttttttatggctgcatagtattccatgttgtatatgtgccacattttcttaatccagtctatcattgatggacatttgggttggttccaagtctttgctattgtgaatagtgccgtaataaacatacatgtgcatgtgtctttgtagtagcatgatttataatcctttgggtatatacccagtaatgggatggctgggtcaaaagttatttctagttctagatccttgaggagaaaatggggtcatttaaaaacttttcaatgcacaaaacatattgcagcatttcatatgaatttgcattataaactacatatactttactcccaaatgaaagactcaagtatgctttttgacctaagtctcattaaacggtagatgtgatcagcatttcaattttccatttagcaggatctttggataaaatacatcatctccaaattttaaaatggttccaaattgctagtattaaataagcacttttaaaattaattatctcctttcctgatagtctatgcttttcacatccatactagaaatattataaagtgctccagcaaaatatgaaacaaagataccttattgtttgactttcctatttgaccttgtttgccaagtgtgcactgaatgtcatggcttccattgctaagcccagacaatgaatgtgctactgtcagaaagcccatttgactgaaacctcttcttttgtgaaattcattctgtaaccctatacctggcctctataaagaataaaattgtatttgtatgtcttatagttggtagaccagcgaagtaaaattgccactctttttaaagcctagctttctcttgtttgctttcatttaattctacaggtctttgtagcttcctacagtatgaaaccattctcacactttgtctttctcaaccataagataaatcaatgcaaaacagccacttttgtgaacatcagtctttctttcagccaggctctcacaatgcaagcacagtggtgccctcatcttctaatcagttttcagatatcctttgattgtgaaggggagaggataggaaataaagagaaaaaaaaaggaaatcgttccactgatttcagtagattagggttttgccttcttttagattaagaattccttttataaaaataatgaaaacattgctacaatagtgaccatgatgaagatgctcagaagtagcattgtccaggtttcacttagcaatgaatatttaatgagctacatgactctgtgcaagttactcagcttctctgtgccacatttttccatgtaaaataatattacccctctcagtaggagactatgtggattaaaaagagataatgtatacaaaatactaagtctacctgagtaatttgctcaataaaattaattcttactttaaatgcagaatttaatgaaatttccaaaaggcctaacatcctatataaatatcttctaaaataaatttggtgaatttgatattcttatcagacttcatatatctcaccccctatatttcaaaacatatgacaaattaatgtcacaatattttatagcaaatactctaataacaattttcaaaatgaaaatgtattttaaagtttaaaagagaggaacagttcctacatgagaaagaaaggaggattgacatacacctacatcagacagaagtaccacgggggatgcagaagaacagccccgaagtctctacacatgcccgcacacattagaactggatttcctcttggttctcagtggtgctcagcattgaagataacttggattcacctgaaagcatttgaatccatctggataaaatgtagatttcagggcctcaaccaagacctactgaattagaacgcctggagaagcaggaggcaagaaattgacatttgacaagaagcccctcccaggctcaaagtcccaccagtgatgccagtagctcatgtatcatacttcaagaaactgcaaggattgaagtcccaagtgagcagtagctatcatggccgattcttgccaatgttgcctacatttgcattgtttttcaaagtaggcatacatggagtgatcaatatgtctttaatgaacacttctgaccgtctcccaatcagaaaacccaagagcctagttctccagtaaccaggaaactgtgtgaaattcattttcacggaataatacgcattgcttcttcagtgctaaactataataggttataatgtgaaactaaatgacatttgccatttttctgcagataacgtcatgttactctcttttgctatccaataataaccactaaaataaagtctggtcaaacaaactcccccaaatactacagttactttgtaattgtgcagtacattgtctaattaccctgccactgcatagcactttccacataattagataaatagtaattatcctttgaggagccaataactcagtggaattgctgaatggcaaagtgaatcactgccttcctgggtaaatatgggaaaaagatcttcaatgaaggttttaaaatcaggccacagaagcacatctcaaaggctatgggttctatattatatcatatgaataaaaaatggaacaaatagaaaaagtttagtgaaatggcagttcatctactgcaccatcatttcagaaattaaagctggtagcataagttcatcctttcccagggtataggaagagtgagaaaggagtgaggtaaagtatattctagcaacccactgaagtactgcccagaaaatgtcctaaattggataaagtatcatcagaattgaaaaaggaaggtgagtaaggaggaaattaagaaaagaaatgaaaagagaaaataagaggaaataaagaagaaaagaaaaaccaatcttaaagagaaacaacactgctgccaaaaagtagaagcacggcaccaccccctccccagtggcagatccatcactacagtaaagatgcctagaaggagaacagttaatgaaagatgcagatatggcaaacgagactggaagggaagcctctgcaaaagaagtttcatggaaataaataagaaaaattaaccaccctctttgtccctctcccaccccatatctcataggcaagatttaccagtgctgtgtcccataaaactataccttaaaatatacttattctgatataagctaatgcttattcagaaaattcttttcttttacataaattacctttaaaatatattttatgtttatgaactgtttagaataactccagatacttcgcccccatagaaatgtatccctggccatgcaaggctggtttaacatatgcaaatcaataaacataatccatcacataaacagaaccaacgacaaaaaccacatgattatctcaatagatgcagaaaagtccctcgacaaaattcaacagcgcttcatgctaaaaactctcaataaactaggtattgatagaatgaatgtatctcaaaataataagagctatttatgacaaacccacagccaatatcatactgaatggacaaaaactggaagtataccctttgaaaaccagcacaagacaaggatgccctctctcaccgctcctattcaacaaagtattggaagttctggctagggaaatcaggcaagagaaagaaataaaggtattcaattaggaaatgaggaagtcaaattgtccctgtttgcagatgacatgattgtatatttagaaaaacccatcgtctcagcctaaaatctccttaagctgataagcaacttcagcaaagtctcaggatacaaaatcaatgtgcaaaaatcacaagcattcctatacaccattaacagacaaacggagagccaaatcatgagtgaactcccattcacaattgctacaaagagaataaaatacctaagaatccgacttacaagggatgtgaaggacctcttcaaggagaactacaaaccactgctcaacgaaacaaaacaggacagaaacaaatggaagaatatcctatgctcatggacaggaaggatcaatatcgtgaaaatggccatactgcccaaagtaatttatagattcaatgccatctgcatcaagctaccaatgactttcttcgcagaattggaaaaaactactttaaatttcatatggaaccaaaaaagagcctgcattgccaagacaaacctaagcaaaaagaacaaagctggaggcatcatgctacctgacttcaaactacactacaaggctacagtaaccaaaacagcatggtacttgtaccaaaatagatatatagatgaatggaacagaacagaggcctcagaaataacaccgcacatctacaaccatctgatctttgacaaacctgacaaaaaaacaagaaatggggaaaggattccctatttaataaatggtgctgggaaactggctagctatatgtagaaagctgaaactgcatcccttccttacgccttatacaaaaattaattcaagatggattaaagacttcagtgttagacctaaaaccataaaaaccctaaaagaaaacctaggcaacacctttcaggacataggcatgggcaaggacttcatgtctaaaacaacaaaagcaatggcagtgaaaaccaaaatagacaaatgggatctaattaaactaaagagcttctgcatggcaaaagaaactaccatcacagtgaacagggaaccaacagaatgggaggaaattcttgcaatctacccatctgataaagggctaatatccagaatctacaaagaactcaaacaaatttacaagaaaaaacaaacagtcccatcaaacagtgggcaaaggatgtgaacagacacttctcaaaagaagacaattatgtagccaacagacacatgaaaaaatgcttatcatcactggtcatcagagaaatgcaaatcaaaaccacaatgagataccatctcatgccagttagaatggcaatcattgaaaagtcatgaaacaacagatgctggagaggatgtcccactgttggtgggagtgtaaattagttcaaccattgtggaagagagtgtggctattcctcaaggatctagaaccagaattaccatttgacccagcaatcccattactgggtatatacccaaataattataaatcatgctagtataaagacacatgcacatgtatgttcactgcggcactattcacaatagcaaagacttggaaccaacccaaatgtccatcaatgatagactggattaagaaaatgtggcacatatataccatggaatactctgcagccataaaaaaggatgagttcatgtcctttgcagggttgtggatgaagctggaaaccatcattctcagcaaactatcacaggacagaaaaccaaacacctcatgttctcactcataggtgggaaatgaacaatcagatcacttggacacagggcagggaacatcacacaccagggcctgtcgtggggtgggggtctgggggagagatagcattaggagaaatacctaatgtaaatgatgacttgatgggtgcagcacaccagcatggcacatgtatacctatgtatcaaacctgcacgttgtgcacatgtaccctagaacttaaagtataattaaaaaaaagaaaagaaaagaaatgtatccctggccaggcacagtggctcactgtttctttttaatttttttaactcataccatgttcctaatacctatccaggttcttaacatgtatccatgttgctctgtttatatccagttttttgcttttaagtgtcccatgttaaacatggatctttcacattttaattcctcagtcccctcagtatggagatatatcctttagttctcaagtacctctcccagcaacaccaaaatatatggataagagagaaagatcatcctcaaacatattcatttacctttgtgagaattttctgtagggtatacctaggcctgagatgagtagtcatgaaacatatgttaacttcatttcactaagtgctaccagattgccttccagaatgactatattcccaccagcaagtggaaggcaaaaaaaaaaaaaaaaaagttacttttttaaaaacttctgacccaaatgcttttcatatatttaagagttctttaattcccttcttcatcccatggacccacactgtattaaaatttagttttttgttttatttttaaagggtttatttcagaaagcacaaggtcaacagctgctatgtaatttgggcatagtaggaaataaaacatgctatggtttaaaaagattcagcaatggaatagactatttggaagctaaaaagctatacagtgctggaatatgacatattttctatggaacatcctattttcctttacaatatcctacatctccataaatccactctctcattttatacccataggattcaaaatcatatccttgggcaaaaacagcagtaccatttacagtatcagtgactcacagaatgaaacactttctactattatcaccaaacaatataaaccaggaaggggtggaattctaggtgctaggtccctgggattctgtttgttttgttttgttttgttttgttttgttttgttttgttttgggacagagtctcaatctgtagccaggctggagtgcagtggtgcaatctcggctcactgcaacctctgcctccctggttctagtgattctcctgcctcagcctcccaagcagctgggactacaggcacgtgccaccacgcccagatagtttttgtatttttagtacagacggggtttcactgtgttggccaggatggtctcgatctcttgacctcgtgatccacctgccttgccctcccaaagtccctggcattattaatcagtactctataaatcattccagaaccccagcactttaagaatcagagaagttggtgcaatttccttctcagagctgaaaatgagcttaatagccactcttagataaagctaatggtctcaagtcctaatactaacaccactatgacttcaggtttactcattgtcctttttatttattataattactgttctgtgactacaccaagcatcccagagtctcctgctaatcagtcttccctgaactatcaccatagatcacatcgctcattctctcacctcatccctggccttgttcaagtatcaatgtaaagagagctctctcctaccaccctatgtaaagctgtacctgacacactcatataaacacgcactcattttaccaacaatctgtatcctctaacactgctatattatccttcataacaccacgtatatcttcccactaaagtgtagacacactaaaagcaaggattttgttattgtattcactgagctatccccagtatgtagaacagtgcctagcacaaagaaggtattcaaatatttgtagaacaaatcaatttagattgtgatagatgctgaagatccaataacaagagagcccagtccatgccctcatggggcttacattcatgcaaggatacagatgagtaagctgtagaatgtgcaggagaaccccggtcttgtcattcacgtagctctttccaccctgccatgctgaacactgtacaaaagatggggcttgattatttagcaacagctgagggaaaacattagtgaacagaggactgcaaaggctgagttagttgcctttttccatcacatatcttgaaatcctttgtggttttttttccagagacccattcagattagaagctgcaaaagaggaggtagccatgaggactctttgaagacttgtattattctaaagaacattttccattatgttttttgtacatgggatattattcagatttttaattaaataatcacagtagtaatgtaatcaatgtgcataaatttccacatgaacataccctcatgtacagtttaacagtgggtacaagaatggacagctggaaatgtttcagtggttatataacttgtccttaataagtcatgatgcttatttcctaacaatgcaagtaatatctaccaagtcatgttagaattgtgatagtgttctatttgcaaacaagttagaaaataaagcttctgttcctgtgctttggaatagaaataaacatcctatttttattgtataccagactctctttgactacacctgaagaaagtgaaaggaactgaagttttaaatactgtcctagaatttaattgagagagggggagagggtaaaagttgctttgaatgtgaagttgagctgataaaacaatttactttgtagaagccacattccatttctgttgacagactatgatatctgacataagagaagtccaaagaaataatccctgcactgagagcttagggactcatacaccaagattaaaggaaacgctggacatgctggacttattttgagttacttaatatggcctaaagatttttgaaaaaagaacataaaaatatgctgcgaataattttcactggaagtatattttgtcctgtttatactttcgctcatgggagccataaaggacaaacgattaaacagcagagtcttctcttaaccatttgaggggaggaagacaataaagactggtttatcacatacagtctcttattatgtaataacactgaatcattataggaatgctgtatagttattagggagtaatttttcaagtctcagtggaaattatctccagtgagaagtcaaattctcaagtttctgatatttacttgtgagtcacactctcccctgttcgatattaacatattagaatgaaagcacaaaaattcatttaaaaataaaagaaataagtcaccagctccctgtacttcagaagttctcccaatttctctaacttgctgataacatctttctctttctgtttgttgctcctgttttggaatgagggcaaaggatcaaattgcatttatttccacggaattatgattttcagcacaaccaaatgagattgctttttcttttgaaggttaagaagttgtgttatgatatgtaaaatgattttctgattgctatatttagatgtgaaatacagatccacatgtcacctggttatgcttcattttttaatggggcaggcattggtaatcatagctctggactactcagattttcaccaggctccacagctacctcagcccacaaccattgcccttggataccatggtgctcatggtatacaatagcttcctctggtgacctcgaaataaacagcacatgctaagtagctctgtgccccactattgtttgtattatgttcagtgtatttgctaagtagaaagagtgacagaatctagacatagacaatctaagctcttcttttttttttttttttttttttttttttgtctcactcactcactcgcccaggctggagttcaatggcatgatcttggctcattgcagcctctgcctcccaggttcaagtgattctcctgcttcagcctccgagtagctgggattacaggcatgcaccaccacacccagctaatttttgtatttttagtagagacggggttttgccatgctggccaggctggtctagaactcctgacctcaagtgatctgcctgcctcagcctcccaaagtgctggtattataggcatgcaccaccacacccagctaatttttatatttttagtagaaatgggatttcgctatgttggccaggctggtctcaaactcctggcctcaagtaatccactcatctcggcctcccaaagtgctgggattacaggcatgagccaccacacccggtccaaacgatctaagttctaagaaaaagtctatcatttactggccatgagacttagttaaaaaaaaaaaaaaatcacttaaactgttcaataatcaaactcaccctacccttctaacaggattaattgcgtcaagttgcaacaaaaggtattatatggaatttcaaaagagtgtgtgtgtacatatgctgttttatatgcttgaaaactaaaataattcaaatttgaaataattacataagaacataacattatataaataggacttgacagaagcaaaattggggagaagacaagtagaccgtctatgtccgaggctcacattcttcagtgctaatgctgccatctgctagttattctcttggtcaagaaaatggacttcggctggctcacatcttgaggaattattttaaatagaccatataaattatttcttttcatcttatgtagttgattcgctcctccaaatataaaaaggtcactaaaataaaaaatgttctgtagttttaagcatccagtgttgtgaggagagaaaatactgatttttcttttctaaatttaaagaaaacaagcttgcagtacaatcttaagattcttgttagtgcagcaggctccacaactcataaatcataatgtgcttccttgcagcatcctctttacatgtagctgaattaaaaaagcaataaagggtgaacaaaagtatctctggtttctgttagaatgagtgctatgtccacacatctctgcctgcttttcaaaccagtaatccatcaagtctcaagacaaagaaataaacagttctggtcaactcatcactgaacgaatgtgctaatgtccttctctctgggtctgggtaccattattccacagccggagtaacatgtacaatttgtgttttcccttatttaaactaatgattgcctttgttagaaactaccatggaaatattattccctgcaagatgccaaactaccacaagtccagaaaagtctgcacccttcctaaacaatggttgacaggttaaaaattgtacttccgagaacacaaataatatctaagccaaaaataacctaatctaaaagcacttaaattattcaggctgctctttcacctaaagcaaattggcagaattggtaaattaaataaggtaacatcttacaaaaggtctcttttgtggaaggaagtgaacggatgttacgggatgttgccccataacagagtgtcctcaaaaagatcaaggggaaaatctactgttcttgtaaattgcccaacttaaattcaagctctcagcaaatgtttgttgaagcaaattaaaatcaataaatttcttggaggcttaaatcacataaaataaattgaagattataaattatcaccacaatgaattattcttcaattaatactcttccacagaagacaaatatgtgctgctgatggatacagtggataacagccaggaggaaggttttcctggcaatacccacattttgagagttatcacaggaatgctatcatggcccaatctgagctccagacagaacttagcaccctacttcacgggtgtcaatgggaggatgcctttctcatgagggagatgtttaggggaaattattgccttgtcggtttccttttcccatgtaatatattcccttttcacttcccaatagaatttaaagcatttcaagcagtagatagtaaaacagattaaatgtattataaaatgccccaagatttggaatctagagaattccaaattttataatattaaaatacataaaatagttaataattaaaatggatcagaagccatttaggaagtaatgaaatcaaaaccagtatgtgaattcatatagaaagacaaactctgctggtaataaaatgttggaggagtttttcaaatgatacttcctttggaagaccttaagaagcagagcacataatgtcttcaatcactcatttattcagccactgtttattgaaagcacctactatgtgcactacaattttgcttaagaaatattctgcttctcagcttgacttctgatcaaagggacatataattaaattatcattccacaaatacattctaccagaaaactaaggtttagtgatgcaacttggcccaacaacggagatgtgtctcttgtactctccagtacccctgcaaacatacttcagcaggaggctgtctgtgcaagcttgggctctgtgatgagtgctacaggatgtgggagcctaagtttttaattgatgtcaaacaagcagaataaagattatcttttgacacttagggatacaattttcatctttgtttcatggaaacaatccaacctccatatatgggcagactacagggttcttgtgagcaagagcaattttgttttaccaaaaatgaaaatatattttcagctgttcttacattgtatatgatgtaagtgcctttcctcagaaaaatattttaaggcagatatgcattaatagtgtgctgtattgatcatacctctttaacatgataaatttaaaggaacactgcagcttgatgctcctgaccaagatgggttagctgtaaatgggtcctgaaggttgtgatcccaattttgtgcagcagcatggaattctaaaatagagttgcatgtgtcctctcaccaagatgtagaaaaatgcctagtgatccatagaagagaaggacaataataacatctgccctatacaaacatgaactgttatccctccttacccaaaaaaggtttatgcctaagacatattgaaaagctggtcccccccacttactcccccaaccctaaaagagcaaaacattgacaaatgtccatcgcattctaagtgacttggctatgtgaaatcattcctggctgacaaggaatataaaaatatgtgctccccattctctaactccttaccaaacctctcagcaccacccttgccactgccttccccattcagaaagaatggttactgccctctttacaggggagaagccagggcccgctcacggcttgttttagaaggtgcacatgagaagctgccacttcttcccccactcccagaatagatgtggttcaaaggtgtatctggcaagcttccaatcatttgaagcaaatgtgtagaagtgctccaaaataggatgtcagaaagcatattgccctcatagcctgctaaaataaatagagagagggatatgtggaggaaacgataccaattacccatgctggagcctgcccaagtcagaacaactaacacaccttaaatgtgtaaataatcaccctcagtattttaatgagttcagtaatggagagtcatcttttcttcatccatttcacctccaaaacagcactccttacaactcagtctctattaacaatctgctgagacattaattgaatattgacccaaagaaatgtctgctacctgtggcatcactacaactccccaattgaaaaccagctctaaatctgagatacagcaaggaaagaattccatctcaccactttgattatactttaactgctagtacttggaagccaatgaacttaaaaaataaggaaaaaaaattcaagacagctgcagtataatgaaaaaagccatggattagcagtcaggagtctcagctttctattactgttctgttcttccaaactgtgactataactatggaccatttgttagtttattcttttattagactatttattaagtgtctactctgagctaaacactgtgccaattttttttttttttttttttgaggcagagtctcgctcttttgcccaggctggagtgcagtggcgctatctcggctcactgcaagctctgcctcccgggttcacaccattctcctgcctcagcctcccgagtagctgggactacaggtgcccgccaccacgtccggctaattttttgcatttttaatagagacggggtttcaccatgttagccaggatggtctcgatctcctgacctcgtgatccacccgcctcggcctcccaaagtgctgggattacaggcatgagcgcccggcccactgtgccaatttttgttaaaaggcaatatttatatctattctgaccaacacacagggttgtcgtaagaattaaacaaaattacttatgtggtagtgcttagcaaacaataaagcactgtgcaattatgaagcaactattatcaaaaacattctaactgcttgaatccgcatctgatcaccacgtggaggagtgtatatgtatataaatggaatttgtgggtacatgatatgtaaattatgcacaatgagaaaagtattataagatatgtgagctataacaagtgaaatataatttggagaatgaatggaaatggagaagcagaatatttaggtgaggaaaatagtgaccttttgtaaatccccataaattaactgtgcatggggctaaaagtaagttacaatttagaagacaataaactgagagaagcaatagaaaaaggtactttatgctcttttctggaaccaggttgtctgggtttaattacttgctctagcatttatagctgttgcctaggaaaagttgcttaatatctgtgcctcagtttccttaccgtcaaaatgtgctcaattatagtattcagcctctggaattgttgggaggattaaataagctaacacatataaagtaagtgttatacggtgcattgtaagtctacctaaagatgagctatttaacatgcagatacttttcttttacatttaagggggttattagaaataatgatgcttaaaaattattaaatcataaatcaattcagtgaatgttactataagcacatatgtaggtttttatgtcattccttattcagaaatctacaaaggcttcattttatctaccataaacagtctaaagtcatttattggcttttaaatcgctatattttcatacactatccaaacatttctcacaacttctaatatgaatgctacatttcagttaagtcaatttatccctctgttggttcttttccattagcgtaaatacacactaaatctcccatcttttttaaaaaaacttttttgatcttattttctattttgttcacttttacagcaaaactccttaaaagatttttctgtgcttactgtctgaacttcctgttttattctctcttgaactttctctaattgggtttcactccctgctagtctcgctaaaacagctcctgtcaaggtcaccaatgattttaacattgccaagcccaactgtcatttctcaaggctccttatactcatctattcagcagaatttgacattactgatgacttcctgcttttgaaacagttccttcatgttggcctgcaaaacagttttcagttcttctcccgtatcactttcagtcttctttgctggctctttctcatcttcctgccctctaaacgttcatataactcaggtcttgatcctcacacctctggtgtctctctactaaaccccctagctcatctcctctattatgcagtcttaaaaaattatctaagggcagacttctctcaaatttgtatttgcagatcattcctaccttctgaaatccagacacataacctactactagtatttggttccatttagaagtccataaaaacctcaaagctaatgtgtcctatagaatgtttgataatttctcccatacctgctactaccaccatatccctaatttcagcaaatggaaactccattcagaagaatctttactgattcccctctttctctcacactccacaggcttcaatccataggcttatagtaaagcctataagctctttgttgaaaatacatctaaccaattttcacagcttccaccactccctaaaccctctttgcctctcacttggacttcttgcaagaacatccctgcttctgccctgctttccctactgtttgttcctacatagcagctagagtgagcctttgatataagtcaaactgtgtcactgctcccctcaaaatgtctaaatggtttcccacttcactgagactcaaacccaacatcttcaccatatacctaaggcactactgaactggctgctacttcctctttaacctcattcatcactactcaccacctcctccaatcccctttttctgctccaactataccactcttccttttcttgtaaaacatccctatgcaagaagacaagctccatgagagtagaaattttggtgtttcataaactgctatatcccctaaatcaagaaaaatgccttgtgatttcctatgtttgttgaaagaatagactgaatgattaatctctttgtattgtacacaaataatagctcctacacattgagtgccatgcctgatgcctgcatcatgtcaaaccttcatgaaaactctgaagacaagcattattcttattatgtagatgagaaaatgaagcccaggaagattacatttcatgtccaaaatcacacagctagaaactggccacgctgaagttttaaccagaggctgtcctcttttcattaagcctctctgctcactaaacattctgcgctcattactgttccctaaactgggctgatgtccttaccatgtccagaatgccctccttctaactctaaatctcagatgtcaactacaaatcaatgcttctcattaatttcctttattgacttcccactcatccatataagtcattccaatttttatcaatgtctccattctcagaactaaagctcttaaagtttataaagaatgaaaataatctcaagtgtacatgcttttctgtaattttctaatgtatatgtgtatgttggtctacccaaacacaattgggggctttactatagaacctatttcattaaaatgtctgtctcatctagtggcgattgagaatgttcatagcaagggttaaatgatgtattaccttgaagacacacaaatatgtaaaagaacacaaggttcttttgacctaggtgtcaaaagctacaaactttagtgttgccattcagaaatttctgtcattggccataagagcacaaagagtagatgcccatttgctcagactaaagtctcatagatcaggattttcctttctgtccatgctaatccctaattttcctcatggtgtaaattggggactcttcacaaacggtcactgttaaatacagacaatgaaaataatctttaattttctaacacagagactaaagtgttcatgttcgtgggatgtttatttgccttgagtgctgcttctctgtccccctccaaaaggcagatgaaagattcatgttccttaaacagtacttccctcatagtgctccctctctcataacaccctgcacagctctctactaccacctatagatgaaagctagacttctcaatctgacactgaaaacctctcacaaccagatcctgctctctacatactaatggtccacaactttgtaactaacactcttgcttgcttttaagtaatacaattagatattctatgcacatgacacatttactctatcctttgtcccctttcacagatatgttcacttgacccattcaaccttttccaccccccactttaacattaacattgtcaccatccttcagagtccatatctccactgagaaaagggaagccaccaaagtggagctctgtcaccatcataacttcatgcagacaaacccatctatctgttcaagcctgcttttccttcttctctcttgatacactgagaaaatatcactatcttattaacactcaatgtctccagccatgctctggatacctccttcctcctgttgccttttcaagacttctctcaagacctctctcctgaaactctagtctctcaccctctcctgagtaattctcattaacattcaaatatgctccaaaatatcccaccttaaggtaggaggaagacctcatttaattctgttcctcatagctaaattctcaagagtttctaaataaaatacctccatttttttcatgccattcttcagtccattctaatcatatttctaatcatttttccctcaaaattgttctggtcaaagtcaccaatgatctccatcttttcaagtttaatggactctcccttcctcatttttttatattctagtagcttttgacacagttgtccactcaatctcccttcgtttccgtatctgtgtattcacagctttcttcttacttgcctggagactttttcttagcctcttttctggttctttctctgctatctcaactctgaatttttatttagggtttgagcctgggccagctcttctctctaaactctaaaatacatcctgaacatgctcacttctctgcatttgcactgacaccatcccattctagaccatcctttttactagcctagtccactgcaactgccccctaactgtctgcctgtctcatatttctccaattagccactcaacaagagtgttcctattaacataaattagtccacttctgtctactgtgtcatactctcagaggcttcccatatccacagaataaaacccaacttccttataatgttctccaaggctacacataatctccccttttctcctatgagacttcagtcatcttatgccactgtcactcctagctcattattcttcagacacaatagtctttccttagtttcccaaataacctaagttatttcccatatcagagcctttacgcttcctataccctgttcaagaatgtacttctcccatctccacatgactagttccttcaaagtcatcaatgtcacctccttagagatttttaccatgatctcacaattcgtttcaaatgtcttcttcactacattttctctaattgtatactatgttttatcacagcacttctcagtaattatttttgtttgttttgggtttttattttttatttgtttcgtctgtcttctctattagaatacagcctgggaccaggtcgacctttttcaatgttgtgtctttccatggctaacattgtgcctggttcatagggtactcagcaaacacatgttgaatgaattgataattatgtgcaagatttaagggtacatttgattacatagtatgtgattccatttatatgaagtattcagaataggcacatcaaaagggacaaaaagtagatgagcagttgttacggcttagggtagatgagagaaatggagagtgactgctaaagagtataaagtttccttggaggttgataaaacatgttctaaaactgattgtggtgatcaataaataagcatttatttattctgtaacaaataaataagcatttgtatattctgtaaatatacaaaaatcattcaattgtacatttggggtgaattgtatggtatgtaaatcatgtcccaataattctgtccccctcctcccccacaaaaagacaattggctaatccattagttgatttttttttcttttgacattgtattgataagaaatatttagtagcacacattttatttgtttttatagtccttaagggtactataaaaataaatgactataggataatgctaataaggcagtcaaataataaagaagtatttattcaacacttgctatatacagtgcaaagtactggagataatcaaaaagaaaaatgcctccacactgccattaaagagtttaaggaaccaatttaattcagattaagatgactaaaaggaaacagtgaagatcactgtatcagaaacctcctgtgacccatttcccatcctcccacaaccctttttactccaaccgatgtttcagtaacaagctgtgagcaggtgcagtccttcacctcagctttctaccaggggcttccactcagccaagtgggacactgcagaatcgctcagtcatttcaatgtgtgtgcaaagttggaggaggtgggagtgaacaactgttgcaactcttgcctacatgggagctgatgcataaatactccagtcttctgtgtctcaggtgtacaattctccaatgtactatacaccaattctcaaagtttgatcagtgggactgagtcacagctgcccacagttgtaagcagatcaaaaatgcacctcaaataggctttcactcttctcctctttctctcttccaagcactccacttatgtaccctggcatcacttccccaaataagctacctgtatgaaagcccttgtctcaggttccgctttggggtgggagggatctaagtctcaagcaatttccaaagtctatttctctatttttataaccttaccaagaaaaaacaaaatttctgaatccaaagcatagcatactgtcaatcagatcagatgaccataaatcctgcttagtctgcacatttgccaagctatttcattcaacagttcatgcattcctttattaaatattgatcatccactattatctaggctctcttctggattctagaaatatatcagtggacataaaatccaccctttctggaggttgtattccagcaggaagaaacaaaaaataataaacaaataaacacataaaaaagtgtatatatgtatatgtgtgtgtgtatatagatacatactagactatatgtatatatgtgtgtgtgtgtgtgtgtgtgtgtatatatatatatataacccattaagtggtcgtaagtgcaatttaaaaaagtaaaataatgagtgatggcaacagactatgatcagagaagggttctatagaaaagcgatatttgagcaaggatctgaataaagtgattcatgagaatatctgggggaaataatccgaggcaaagggaactgcaagggtaaagacctgctattagtaatgagcttggtacagtcaaggaagagcaagaaagcagtacagctagtgtcaaatgagcaggggcaacagtggaaagagaggcccagtggctcttacagcccaaggtacaaaaaagttagatttcattccaaaagtaaaaggaagtatttggggagttaagaaaaggggaggtggtgacaaaattggatttacatttctgtaagatgattctagctattatatgacaaattcactgtgggagggcaagagaggaaccaaggagatcagtgagaaacactaaacagcaatccaggagacagatgacagcagagaaagatgaagggaagaagaaaccattccaatgactttacatgtttaaaaaaaagtggagggacctgttagttccacttaagcattgttttttggattttttttttcaaataaacattttcacaaaaagctgttcatatttgaacaaagttaattttaaatgttttttaaaataacaaagtataaaactgccctgagatatgacatagtattcctacaatttacaaagaaaaatggagactaatttctatgcacctatttttaagaaaataacttagatcgatccccctcagttccaatctgcaggaaatcatgggtcagatgtaaattacacagtcaggagggaaaagaaaatcctagatacactgctctaaagattaaaaaatcacaaggaatttgatgagaacaaatataaggaaagaatttaaggaataagtcagagcaagtaaaaggagagtggaaattttccttaaaaatgcagttgcccattcctgtcattcaggacatcaatatgaggggaaataacaggtttcaagtgaagctacaaaattacatcttcacagatttcttaaataagtgcaatatagcattatatttttaaaatatttccagaaaactttatttttaaacaccttttgcatgttcatttatattaactcctccccttaccctcatcttaaaaagatagcgctctcatgaagattgagcctagacgtaaaaatgcaaacaatacttttttataccacaggtaagtatctttcccctctttaaccaaaatttcagatattaaaggccaacatttctaactgatatgcatatataaaagcatttaatagtcacagttatattaagtgtatactattatttttcccattttacagatggggaaactgaagctccaaggagttaaatgtcttgaccaaggtctcacagctggaagccagaatttaaagccatgaagtctggctccatactctcaaccactgtaaatatcaccttgtaatgtactatacagatggtagcttggttcagaagaaaaaacaaaaatagaagaaacacgtggaggatgtaattgaagaaaaacaagggaggggctgggaatacacatctctcctcaacagctaattctaccaactgcagggaaggcacaagtaacatctgatcctgccaaacagctcacctagaagtattagagattcacctcccgtattgcaggcagcagctcatatcctgaggattttcttctggtagcagcagttgagtgctaacctgctctgtaacaatatagggcatcttgccaaggaagctgggtttttattcagctgcatgaacgagatctagtttcaaatacaagacttccttactacttattctagagatttcatttaagactgaaaaatatactggccataagaagatcttaatatgagaggaaacagttctatttaattctagggggtagttcccaacctaactgaatgacaaattcaaaatatcattcagctaaagcatgccccttcttcagaaatggtctcatgtcccatacgcttcatgcaatagcctcagcacaatacaattagctgactttgttataaacaatggctttcattcaatagtatcctaacttaacctcatacaaatccaactaagaagatttgtcaggtattaatatctacatctgctagataagaaagcaaaaggacagggagttttaaagtcttgcataagattacataactaggggaagtatggagaaaatatgtggatacggcttcctaaaattcaagattaggccattcgttcattcattgttggtgaattgacaaatcaactggtgactgaaatcctgtcatgtgcccagctccatgctaatcaacagagttctgtagagaacaatttgaaactcccaagcaagtatttaatccacctgtgcctgtttctgtatccgtatgctgaagcgaatactagtactatatcccagaattgttgagaaaattaaaggaggcattgcatatcagcatttagcacagtgtctggcacaaattattatgatatttttaaaatcctgcaattagagctgtctaataatgattgaactcctcttaccagaaaagtagagagataggctgaataacatttatcattaactaatggataaagcctgttccaaacctatgagactgtgggaaagaggtagcatcttggctcatataggttcttttcctccctacttgttgatataggagagctttctcagaaattttcatacatttccaaagatgatacaaacaaatgaaaaattaatatgattttcagagacacaccaaaataaatcagatgcttagattaactactcatttatttttccattaagatcaatgtcattttccattacttatacttttttaaaagaaaaccaaatatagcaactaaaactaaatcacaggaaaaagttaataaatgtggctgttattagtttaaccctgtacattagcattctaatgcatactgcctgtgtagtcctttactttcttcagaggttttcattatcctaactatattaagaggagctcaaagaaagaaaccacatcatatgtttttcttaattccctgccatactttccagcacatagtagttggcaaataccttgatacggccatggtagctgtgaactagattccataccaaatgttggcaaggatgtggagtacatggacctctcatgcattacaggagggagtcaaagttgttacaccagtattggaaaagtgtctgacagtattttcaaaaactgtacatatacacaccctatgacctaacaatttcactactggtatgtgtttatatggcaactctacagcaatactacagtgatatatctatgtatttaaacatgcataaatatgtgcacacacaaaaaaatgtacaaaggtgtttaaagcagtattatgtggaatatccccaagctggaacaatagaaatattcttccaaggtataataaatacattgtggtatattcatatgatagaatactatgcagcaatgcaaataacgtattgtctttcatatcattctcaccaacatgttaagcaaaagaaataaggttcaaataagtttatactctaagattccatttatataaaggtccaaagcaggtaggatggatctatagtgataggatgcagaatagtaattacctgtgggagagggacatgagaataacttctagagtactagcaataaaaatatttatagaagtaaaaagccacaggaccaatatcattgtgctccactgctctcttccccctgcctattgaatcaatgtaatttattaacattctacagaaataacaaaaggcaggggaaagaacattgtagcaaaaaccctgaacttccttgaggttccactgctgcttggaactagctacaaggttatttaagttgctaaaattttttgttccttctcatctctaaaataaatgtattgaactgatctcttttatccattcagcaacacaatatatagcagcagtccccaacctttttggcatgagggactggttttgtggaagacgatttttccatggactgaggcagcagggagtggttttggatgattcaagcacattacatttattgtgcattttatttctattattattacattgtaattaatatataataaaataattatacaattcaccataatgtagaatcagtggaagccctgagcttgttttcctgcaattagatggtcccatcttggggtgatgggagacagtgacaaatcatcaggtattagattctcataaggagtgcacaacttagatccctcacatgcgcagatcacagtagggtttgtgctcctatgagaatctaatgctgccactgatctggcaggcggtggagctcaggcggtaatgcaagcaatggggagcggctgaaaatacagacgaagcttcacttgccctcctgctgctcaccccctgctgtgtcgcccagttcctaacaggccacagacagatgcccatctgtggcccaggggttggggacccctaatatataatgattcacattatatatcaaaagtaaatcaaaaaattataactacagctaattaaaaactatgtaaacatacagatgaaaataagatattatgcagcactataattagctgctgttaagtgatgatgttgtagagaggttttaatacaaataaaacttggaatcaaagatcccatgataatatgaacaaaacaatgttaccaaaaaacaaaagccagatggtttgatcaccaacctggaggaccttaaccatcctatgcctctctcttctgtggaaccacatcgcttgtcccctttgtccaaccaatgagaaaactcttcagagactggtgataatatggtggggaaggtcactgcaattaggtcctgtagtggcttatgtttcactgcgttttcatatagcctaggacatagtactctgtatattgcatgtattccataaatatttctagatttatttatttggaataataaaaagggaaaatttctgtgagacacatatttgaatcataaaagaccttttttagtttctcctttccttacaaatagcccccatgtaacctcagtgttctttctctaactgaaatcctggctccccgctgagcaccctgcctcccttgtgtctcaagtattggctttctctcatttttgcgtaatgggcctagctacaagtgaggtgcactctttgcttctcaagatagcttcccgattattttccccatctcttccataaaatttcctagcttagactctcatgtcatcagattacatcactcgcaaaccctcattgttgacatagtctactgatacctgtgtcatttccacttattgcttgacaattttagctcctggtttactatgactttctaaaacacaacccctatcttaatttttggctatttcaattcacatagagatagtccttccaacactctggccccttcctgaatttctctcttccaataatcatatcatactccctattctagcttcacattcccaagtcatattcttcattttgttgttacctataaatcgtctaaaatttaaattttatgcatccacctcctgggttgcatctttctatctttctaccttattccttccagtacatcaattcactctaaaaatgcttaaaccccacaagttcttgcaaagcattaattctaccaattttttatgtccttcacccatctgacatcctctctacccttcttactcagattaaattctattgccagtcattggaattactcccttgcatacatcctttactcctttcccctctcaccaccatcatctctcaccaccatcatctctcacctggattactgcattagtctcctaacaggttccccagcttctatctttctccatctacagtctattgtcaacatggtagccaaaaggatccttttaaatgtaaatatggacctgtcattcacctattcaatactctcaagtggcttccatctcactcagagaaaaaccaaagtccaagcaatgccttacaaagccagccatgaaccgcacccccttatgtctgatttcccctcctattctcatctgctaactcaatccaggaagttaaactgggcccctcactgttcctctatcccattagacaagctcccacctcagagcctttgcactgactatttcctctgcctagaatgttcttaccctagatatactctcttgacttcctcctttgccttcaaattttgcttaaatctcagcttctgaatgtggcttactctgaaatccaatttaaaactgcaacccatccacctcagcctggtactcccaatccttcatatcctgctctatttttctttttaccactgcacttttaaatgtctactctactatacaatttgtttatttattgtgttcattgcttctctcctgtctaccaccactaggatttagactccatgaggcacaaagatcttaatctgtcttgttctcttatatattccaagtaccatgagcaatggctagtatatagatgtacaataaatatgtttacataatttaaacataaatacatttctatgtgtgacttgctggatttcaaaagaagcagaaccagacttgagtagactttcacatttttcatttcccatttttcacaagaagtgcatgcaaaaaaaggagaacgtttctaattgactcatatgttaccgtctaaaagttaatctctacatttgcttcccatacagaaaaaacattcttaattgtagatccacaagtccatctataaaatcacttttggtttatagttatctgaaatattatatattataaatgaatagcagtgactaaaatcattacaatattaagcaaaaatacaaaataaataaattataaaggtattattttatcttaaataccaacacttaagagcagccatacataattaaagaaagtgagaagaaagatgaaaacttttatgctaattctgcaggaaacttcaagcctcttttaaagttttaagaaatgaggtatttgttatgtctattttcacttcaaagcatggctttctttgtccctgttacaagtggatcaccagcactgctctgatatggttatattcttttcaactcatttaaatgaaataaagagagagctggaaaggtgtttctgatattactaggcaatggctagaagagagatgaagcaaaaaaggtgttaaaaagaagaaaagttacttgagctgaaaatagctgcactgtaaagtaggaacaagcatctagtctctgctcagatatgagtaaagagagggaaaaaaatgaatgtctccaagtttgatggggaatgtgatagggtataaattgtctttaagataagcgggatgggcaagatatagaactactatatgacccagaatttcctctgttggatatgtacccaaaggaaatgaaatgagtatcatatagatatcagtgctcccatattcattgcagcattattcataatagtcgagatatgaaaacaaaataagtgtctatcgacgggtgaatggataaagaaaatgtggtacagatacatagtagatattaataagccttaaaaatgaaggaattacatcatttgcaacaacatggatgaacctagagaacatcacgctacattaaataagccagaaacacaaagaaaaataatgtatgatctcacttatttgtggaatgtttttaaagtcaaatacataaaaacagaatagaacagtggttaccagggatggggtgaggggggtaaactacatggagagatgtaggtcaaagagttcaaaattgcagttatgtaggatgattaaatatagaaagctaatgtgtaagataaagactatagtcaataatattgtatcatatactagaaatttgctagaagagtagagtttaggtgttaccaccaaagaaagataactatgtgaggtgacggcagtgtttatttgcttgactgtagtaatcatttctttactatgtatgtgtatatcaaaacattatgcaatataccatatatatacacaatataaatgaataaatgaatgaatggaagaaaagttctaattttattgctatcgtctccactttagccttgcttcttccttccttccatttccaatgagatcttaaatatagattatttgtgacttcagaatacagatatgtttctggaaattcatatagaaaataatttaatgtaaaatagaggaaatgcatgtttaattcagttacatgcatatagcattttctagcttactagaaactttaatatgaaattttagcatgaaagtgctttcattgactatacaccacacatattatagataatctagttcaaactattcattctgagagcaggaaaattagcaccagagaggatcaatgttttctctaaggttatagggataaactagaaagcaggttccctctctgtcatcctgctttctttccattaatccacaaaaatactatatggattttacagataagcaaagtgaggtgtagacagttcatttgccctaagttgcacaaatagtaagtgatgcaactcaagttcgatgtccttctgattcgtatatctgccaatgaaaaaacatgtctgagaaagaaataactgcaaaatccaaaaataagtcttaatctaccctcaaatcatctacttattaaaatttacaattcatcattttcctatcaagctctattaagcaaaataaacttcaacattttcatttttataatactatgaagactcatagcacagctttattgtatttctttcttctctcaatttattaaaactacttcaatctctcttagatgatttgaacagtataaaatctaccctggtgatggtagtactgactagatcctaaatttctttccattttgatgatacttttgttttgtaaaccaagcacatgagatttgaaagtttatcagtggtttgttttgttttgtttttgtttttgtctttaaaccttcctatttcatcactgctttttgttgacaaaggcaaacagggttgtgaagcgtgccctctgctggtaagaagaggaaaatggtcatacttcaaaccaaagcgctcctataaatttcacgtggatagcagatgtatctaaagatccgaaatagagtagcctacaaatgattgatttagaaataactatcatgttataataacataattatatataatatcatatacacttaaaatgggagataaaatagatttacaaggcactgaatagtaatatttatatttgttccagcattttatgtttgctttactactaactaaagtctaagagaggctacaactaggaagagaaaagggaaatcatactcagatggatggagccacccaatgtttttccatattttaccgaggaaactgtcaatagtttatcagcttcaaatatcaattgcaagcactgacattgtcatttaaatggaagtcaccaaattcagtgaccaatatatcttctccccaacccattttctatcacaattcattagtaagcccccatcaaccattttaatatctccttgcaaggaaaaaagggagacagatccctaactcatcacaaatgttcattacaagtgtgtgcttcagacatctgcaagttacttaaactaacaactataaacttattataatatttcttatctcataagactaaatggactatatatttctttttatgaggtgttaagaaatgaatcttgcctgtgaagcatgattgaaggaaactctgggaagggtgatgaagatgcgtcctgtgtgatctgtcacctggccacctctctaccattcttcctggcccccatgctccttctgctccagccacactgaccgcttcctattcctggagcatgctgagcatgtcatctcccaggggcttttgcattttctgacccctatgattgtaatgttctttacacacatagacacacagcctcgtcttacagctcatttagggcataaatgttccaacatcaaaaagaccttcctttattaccctatacgaaatcaccacatcctcttaccctgatcttcataatatatattacttgttactatcaaagtgattttgttttatttataatctgtatcttcccacgaggaagcaagctttgtgaagcagagacttaacttatgtggttcactgttctgttcacagtgactggaagagaacctagttcatagtaggtcataaatatttgatgaatggataagtaaatgaacttatcaggaacactacagagataatttctgctttgaatgggagagtgatctaatgacttccagggccccattctgtaattttataaagatagctcatcttgaaaaaacagaccccatcttctttcttttgattgctagtactacactttcagaagtgtactttttttaaagttttactttcttttaaattgatacataacaatacggggtacagtgtgatatttacatacatgtatacactgtataatgatcaaatcaatgtaattagcaaatccatcacctcaaacatttatcatttctttgtggcgagagcattcaaaattctctcttctagttattttaaaatatacaatactttatcattaaatatagtcaagcctactgtccaaaagaacataagaacctattcctcctaattggaattttgtacccaattgccaacatttccccattcctctatccttcccagcctctgataaccactatcctctctacttctatgagatcagccttttaaaattccacatatgagtgagatcatatggtatgtgtccttctgtgtctagcttatttcacttaacataaggtcctcataactctttacaaagaaataaagtataagcaaatcaactaaatgaatttgggaacaccatgaaaaaagtttgattggatgtttaaataattcattgcactaccatgtaagatattttttcttctttgttactgtcatttccttttgatcatgtattttaagacaaataaaatacagcaactataaataatctataaaaatatcacattactggagttgattaagtggttaaatatcaaatatttcacatagtttctatactttttaaaattaacattataatagaataatgtttttcaagaactgaaaaggtaaagcagtaacaggaagaaaacaaaatttaaatgtgtaagtatatgctagtacctaccatttttttgttatgatactgccaaactctattaaaagtatcatcgcacaacataacatcttctaagtctaattctaagtctaatacctatgatattctatttaaaatattactactataacacccatctttgagatgaacacattttaggtatgcttgtaatccctaaggaataagcaaaataatgaaattggtaacatgtccaaatattcctagctgactttctggcattgctgtctgtctggatgcatcaggattacacacaagaaagatgattgcagttatttggtgttttgacaaatgcctgacactatccattttattgccaacattttaggccccttattgcacatgatgagagaactgacctttgaaagaaaattgttgggtcgaatagagaaaaatcaaatgacagaaattgatagaaagaggactgttgtgcaatcatacttggatcatctcagatgacgaacttttctaactagtaaatttttgtaacttaatcatgtttaccagtgaaaatttcctattgtaaatgtacacacattacaggagggagaatcttttagcccatgtaagtcattttttcagaacaaaagcagagcaatgagaacttcagtatctggtcacacatagaatcatcatattaaacacataatttcaggtgtttatagcattttgcaaaacacactgcttaaacaaattatttgaaagtcagttaagtgaatttggggggcatcataaggccaaaagatgatgcaggtccccttatttataaaatcatcatgttctcttttactaatccttcttatattggttccagtaacagcagagaaagctcaactttcttagatgtattcatttattcatttaaaaagcatttcttaagtgtctactatgtagcaggaaccaatagctgctgggaatttgaagattatacataatcccaacctctttagagcggacagaagatataacatggcacagatgatttccgatttgtgtttaacattaccactatgaaacgctctcaaagaaaagtcaaaaggacactaggcatttagacacgagcaattcagaaacactaatttggctttatcagatataaaaaatatataattatgtgaaagtctaatattatttcaagtgactaagacatccaaagtgacacattacgtcattccatccatttattactcacagaaagtaatcagagaattctattccttgttttgcagatgaggaaaccaatattctgaaaacttgtgacacatacaaagtcaaaaaatgagcagttcttagatatgaactcctagtccatgttttcttccatgataataattatccaaccatatggaataaactcatcttccttccctttccgtcttcagacactgataggaatgccttggtgacaaagtactgtgtgtttaaataattcaacattctttgaaaactgcccccaaatagctactcccctgccagaaaagaataaaggagactggtcaattgaggtagtctcataacatatttaaatgtgcctaagaaacacaccattctccattagcttttacatttttgtactataggtttacttttccaacattcaaaatatctacacaaaaacactaatttgaaactgtagtccctctccctctccctctccccctccccctccccctccctctcccccatttctttatttggtctccctctgttaccgaggctggattgtactgccgtggtctcggctcgctgcagcctccctgccccgggctcccgtggttctcctgccttggcctgggtttgccagcgcgccgccatgcctgactggtttttgtatttttggaggagacagggttttgccctgttgaccgggctggtctccggctcctgacctcgagtggtctgcccacctcagcctcccagggtgctgggattgcagacggagtctcgctcactcaatgctcagtgttgcccaggctggagtgcagtggcgtgatctcagctcgctgcaacctgcaccttccagccgcctgccttggcctcccaaagtgctaagattacagtctctgcccagccgccaccccgtctgggaagtggagagcgtctctgcctggctgccctgtctgggaggtgaggagcgcctctgcccggccgcccttactctgggaggtggggagcgcctctgcccagctgccccgtctgggaagtgggcgcctctgcccggccgccccgtctgggaggtgaggggcgtctctgcccggcccccccgtctgggaggtgaggggcgcctctgcccggccacccttcatctgggaggtggggagcgcctctgcccagcagcccttcgtctgggaggtggggagcgcctctgcccggccgcccttcgtctgggaggtggggagcgcctctgcccggccgcccttcgtctgggaggtggggagcgcctctgcccggccgcccttcgtctgggaggtggggggcgcctctgcccggccaccccgtctgggaagtggggggcgcctctgcccggccaccccatctgggaggtggggggcgtctctgcccagccgccccgtctgggaggtggggagcgcctctgcccggccacccatcgtctgggatgtgaggagcgcctctgcccggccgccccgtctgggaaatgaggagtgcctctgcccggctgccccgtctgggaagtgaggagcacctctgccaggccgccctgtctgggaagtgtacccagcagctcagaagagacagtgaccatcgagagcgggccatgatgacgatggcggttttgttgaaaggaaaagggggaaatgtggggaaaagaaagagagatcagattgttactgtgtctgtgtagaaagaagtagacataggagacacaattttgttctgtactaagaaaaattcttctgccttgggatgctgttaatctataaccttacccccaaccccatgctctctgaaacatgtgctgtgtcaactcagggttaaatggattaagggcggtgcaagatgtgctttgttaaacagatgcttgaaggcagcatgctagttaagagtcatcaccactccctaatctcaagtacccagggacacaaacactgtggaaggccgcagggacctctgcctaggaaaaccagagacctatgttcatgtgtttatctgctgaccttctctccactattatcctatgaccctgccacatccccctctctgagaaacacccaagaatgatcaataaatactaaaaaaaaaaaaaaaaaagaaaagaaactgtagtataaggtagccagtgggcttgtataagacagaccagagttaaatcccctgcaactgcactaagctcttctgtaaacctcagtttgcctcatctgtaaaatagagctaaagctgacttcacatttgtaaaatatttggttgacctctcagcacacacatgctaagtaaatcataagcactaatagggattctatgagaatagatccctaatagtgtttatacgctactgacaattgtttgtacttgattttcaagtgttcttaaatcatttcatagtacatgctgaacattactgctagaatctgtagaaatctgtaatttctaaggcttaatatttttagtcacattcagtggagattaaataaaagtgatttagtggtgataagaagaactccaaaccacctcatatacactggtgcattgagaaacatcaataaatgttaattatctgactgtcacattattaaaactttaataaatctgttttttcataaaggaaatatagaaaacaaaacattttgcctgtaataaaactctaatttttatcacttctattttcctttaggtgatgtgccctattgaagacaataggagacacgtatatcatctttctcatatttcagcatttaaaaaaaaaaaaaaaagactgttgatttgttttaacctccgcagatgctttgtgaaggtacaaaggtgcatatggtcaagatgagacatttcctatttttataagcaccttcaaacttccattgcttacatttgtattgaatttcctcaaagcacaatagtaaaaaagtctctacaggagtaaaactgtatccaaactattccatctcagactttgtcttattcctaaaagtactctatggaagaaaatatttgaaaatgtaatgggaaataatccaatctaaaacacagcacccaaaatttaaccttatcaataaaaaagcaaatcagtattttggtactatgatactactaaatattccacaaataacacactcagaagaaaaaaaataaaattctatattcctgattattgcaaggtttaaaaaatcacttaaatctaaatactggagggaaatgtagtttgcagaaaatcatggaagcacactcatgctacagacaaaattgccctgaaatttgcccagttcagagcctcaatgcatacttacatattctccttattaaaatgctggaaattaatttctcgcccaagaggaattcatagtcccatgtttaaagcacaaagattacaaggggagcatttagattatctagagatgccatcatgtgaatttagcctattattattgaacattcgtagtttatggacaaaaaatagtaaatcagttcagcaggataggctgcttaagaaggattagactatcacactataaatgagatagaattttactacatggaattcagtgagataaatttaagctttgtagcttacaaatttgtggtatttaccataagggcagcacaatagaaatcaatgcctgccagtacccactcataaatctctaatcacagcacataacaggtttgaactaatgcaggatcaagtagaacacaattttcctggttaacatattataaaagtaggtgtgttcataaacacacaagaaaaaggaaagaagacttcccactgctaatgggtgccatttgagacttaagttaatagtaagtctaaaattccagtatctaatccttcaggcaaatactgcacccagatattaaacactacacacatcatcatcacacagcatggtggctctgttggagttactctattagaaaaatcacccttattactagtctaataccacagtgtgagtaatgaactgcactgtaagttgtacagaatcatttaatgaactgaaataatatgaaatttctttttgctctatttaataacaacttattcactcaactactgaggcttcaaatcttgaccatctaatattagacactgggagattcaaagtgtaaatataacaaactagttgtaagttagtcgataatttaaggtcaccttcaaatatagcacaatcaaaagccaaaatactattgcacttttacaacaattggtataatggcaacaggttctatcttacaaagtctacctaataggcctcatcaatatatgcagaagagaaattaactatcttggacccactttccatgaatagtgccagggacatgctagatacttcttaaatacttgatatctgactgttgactgatatcttagtgaactactgtggaatgcatttaacaaaatctttaaaatatgtattattccactgggctatataaacacacatcaaaacattctactgacatcgaaaaccttaattttatacttcaggcaataaaatacaaagaattataaagctacatcctcaagaatacagggtaaatttaacacattagtggaccaactttggcagcaagataccaaaatttactacccaataagatagtattttaaccagtgttgctgcataatttattttgagtttgtgagctgaaaatacttcaaaatgatgttctggctgtgcgcagtgactcatgcctgtaatcccggtactttgggaggccaaggcgggcgaatcgcttgtgcccagaaaatcaagaccagcctgggcaacatggttaagccccatctctacaaaaaaaaatacaaaaattagccgggcatattggtgcatacctgcagttccagctagtcagagggctgaggcagaaggattgcttaaccccggaaggcagaggctgcagtgagcagagatggcgccactgcactccagcctaggtgacagggccagactctgtctcaaaaaaataaaaaataaaaataaaatcatgttcagttgtcagtaattttcttcttggctgccatagttaaacaggccataaagaaacttgaagtcagactcaactagcatttattaaacagaactattaaatatcaagtattgtgctagacttttccacataaattgataattcttatgaccaaccagatttggaaaccaccctgcaatgctgggccacataactccacaatgctatgcccagtaccttcaatgataggacaggcaacctccaaaaaaaaagccatccatttcatcgtggcaaattcttctattagcaaattctaatattctctattagcaaattcttctataattaaaccaaaactgttttccaaaaaagtctatcctagcaactcttctagtattacaaatgagccttcttctcccctatatgagaaaacagctattcacaaatatgaaaagttactatgtctccaacttcctgcaatttaaacttgtctgccccatccttgatctttctggtagcattccatctttttccttcttataatttacaactaatatatcatttgtttgttcactttttatagcttgggttcttcactaaactagggctctgtaagtccaaggatcatgtctattttgtgcaccattgcacagccagcatctaaaacataacaggtacaataaatatttgatgaataaattaaagaataaatgatttaggtgcatatgcttataatctttgatttatatcaccacactcatttttagagatagtgtcacaggagaagaataagagttcctcaattagctgatctcctacatagtaggaaatctcagtaaatggtttttaagtggattttttaatgataaagatcagcagcatttgtttattctataaatacatatattgattttctacaaagtgcaaacaatgtaccagacactgatgatatagtggtgagcagagtagatacagtcttgccctcatgatgtgataatgaaatttaagaggttactatatagagaagcaaagtacactatttattgcaagacaattgcattaagttcacatcctcacatagatccagcagtgagacatccatcccagtcatcagataacaactacagcaaggaaaaagaagatggtaggcctcaatttaaacaagtaaatcatggagttataaagctgagacatgagtggtccaattcataaatgcagaaagtagaatggtggttgccaggggctagagggataggagaatggggatttgtatttaatgggtatagaattctactttgggaagacaaaaagttttggagatggatgatggtaatggttgcacaacgttaatagatgtaatgccaccaaattgtacactgaaaaatagttacaatgataaattttatattgtgtatattttaacaccataaagaaaactacaaaaagaactgtgtcacacatggcagttatatttcaaacaatgtagtagtcatttaccatgcacatgtacagaactctgggtcctcggtttgtttttgagttccacgtgcacaaatatggagaaaaactgccaacagcaggaacttcaagtgaaggaagacaaccacatttgacaaatgatgtattattatgtgaccagtgagaaacctcaaggatgccgacagctcattttttacttaaatttcttttcaggaaagctctctaggactgtgagactcagtaattattttttaattctctcacctccaaaacacaaagaaatttttacccctcaagttaaaaagcttaactttgaaaatatcctaaggacacaactgccagaaatgacttaaggattaagtcagaaaatactggaaaagctaatcggaaaatgttaactctgtctgaacactccaactgccctcagacccttcttcccacaggcaccagggaaagaaaatttagaatcaagatgcaggtggcatacaactgaggagaaaacctcctttcctaatataaaatgtaaggcatactgcaacaacattcctccgagcccttctcagaatcaaccatcctaccaatcattcataccgatagcaaaaccagaatagtgtcaccgccaagccagtcaaactgtcaacaacatttattattgtgtgtacagggtaccagtaagtacctggtaccctgatgagacaaaaggatgagacaaaagaaaaagtctcatcctttgcccttcgagagctcataataggaagactaattatttctgccatacatgtagagcaggggagttggaaggcaatgaagaaaagagcgtgagctctgcagtgagacagatcagtgatctaataccaactctataactttttagctgtatgatcttaatgataatacatagctaaattactgagggcttaccatgcaccaggaagtttggtccataatccaccccagctaatcttcacaagccctataaagtaaatactattaatgtttcatacataaactcaagttatttaatctccctgagcctcagtttccttgaggggatggaggattaataccaactttatatcattgttttgaaagttacatgagttaatgcgtaaaaaaaaaatagcttaagatactgtagactctcagtgaatgaatactgataccactatttaattaaatgtctataaaatggcacatatttagaaaaattattccaagaaagcattttagatattcgtattttgttataaatagtctgaactatttgtaaatgcaatttaattcagcaagtatatgtattcttgctatatacaagatgctgtggcagctactgcaatacgcacaccaatatatgacacaattttggtcattaaggagttagtaatccagggaattaataacagaatatattctatcttaaaattaactcaactaaccaagacctaagagttggccacgtggtgaaatatttttattctggagtgtattttgttatattctccaccactgttttgaactgcaagatgactttttccctgaaaaatataactttctacaagttaaataccaggttatctcactaaagtatggttcctcttgtttttcacatcaatatagcatatatttttataaacagctgtaccaagtgaacacttgctgattttcaatcatcagtatgcaattcactcaataaaagaaaacaagcagccaatattcaggcattctgtttataatgacaacctaaactgccattcaagctcaatactgtctgttataattatcagaatgagtggaaacaaatgatcaataatgggaaagcttcttattcatctcccatggcaatgtgctttcaattcctagtgagatttcccaagatatttatggagaaatcttcccagaacattgatctcagctgaaaatcttatagtttgggagaatgcagggaatttccccatggaaatggggagagatatgatataaggtactgggcattcctgcagtaaatgagtactgagcatttataaaatgtttgagagaattgataacatggacactgtaattaatgtgcattataaaatatttcccatccctccaggtaaactccatcaaactatagttttaaaagcagttaacatactggaataacaatcattagtcaaaacccattacatttcattgtgaaatccccagtattattattctccttcatctttccaggaaagaatagcaatccatgtatatgattaagtgatatcaccatttattcacacaaaatcaagcaaaggcttaaagacagtatttttttaatatatctagaaatgtcagttcaactaaacttaaaattaatatagaccaatggagcagaacagaggcctcagaaatatctacaactatctgccacgtatctacaactatctgatctttgacaaacctcacaaaaataagaaatggacaaaagattccctatttaataaatggtgctgggaaaactggctagccatatggagaaagctgaaactggatcccttccttacaccttatacaaaaattaattcaagatggattaaagacttaaatgttagacctaaaaccacaaaaaccctagaagaaaacctaggcaataccattcaggacatgggcatgggcaaggacttcatgtctaaaacaacaaaagcaatggcaacaaaagccaaaattgacaaatgggatctcattaaactaaagagcttctgcacagcaaaagaaactaccatcagaatgaacaggcaacctacaaaatgggagaaaatttttgctctctactcatctgacaaagggctaatatccagaatctacaatgaactcaaacaaatttataagaaaaaaacaaacaaccccatcaacaagtgggcaaaggatatgaacagacacttctcaaaagaagacatttatgcagccaaaagacacatgaaaaattgctcatcatcactggccatcagagaaacgcaaatcaaaaccacaatgagataccatctcacaccagttagaatggcaatcattaaaaagtcaggaaacaacaggtgatggagaggatgtggagaaataggaacacttttacactgttggtgggactgtaaactagttcagccattgtggaagtcagtgtggcgattcctcagggatctagaactagaaataccatttgacctagccatcccattactgggtatatacccaaaggattataaatcacgctgctataaagacacatgcacatgtatgtttattgtggcactattcacaatagcaaagacttggacccaaatgtccaacaatgatagactggattaagaaaatgtggcacatatacaccatggaatactatgcagccataaaaaatgatgagtttatgtcctttgtagggacatagatgaagctggaaaccatcattctcagcaaactatcacaaggacaaaaaaccaaacaccgcgtgttctcactcacaggtgggaattcaacaatgggaacacatggacacaggaaggggaacatcacacaccggggactgttgtggggtggggggagggagggggatagcattaggagatatacctaatgttaaatgacgagttaatgggtgcagcacaccaacatggcacatgtatacatatgtaacaaacctgcacgttgtgcacatgtaccctaaaacttaaagtataataaaaaaatttaaaaaaatagaataaaataaaataaaatttatgttttaaaccacaaatgatgcttctgattcttaagtttccaatttaattattttcaatttcttaatatatttttattcaattttagttttatgcatttcaatgctcaacattcagactacctcactataaatattgaaagacagtctcatcattcagactacctcactataaatattgaaagacagtctcatcattatagattaaactgattccaaatcgtctcaacaggatattgagaacttacctttaactgaaaatgtttcattttattaagttgatactaaatgactacaaatgccaagttctatactggtactaggcacataaaaatgacttcagaacatagtaagaaggagaaacacaagaaagacaagaattaaaatacaacgtgaaaactgccacactagtattatcataccaatgccccacagaaacacagagggaatatgccctcattacagcccccatcctttcatttctactgggaaaaaatggcgaccctacacttccaaaggaggtagttttgagctgaatatcaggggacaaataatagctcactaagaaaacttaaaaagaatgaaagaacattccaagtaaagaaaaatgtaagacacaaagcccaaaggtagaaatgggcatggtgttttcagagaatgtcaattagttgtgtcaatgagttgcagcacagataacactgggatatggacagggagtcagataataaggatgaaggtgaaaattatctacctacaaaccaaactgtaaagactattctatttcatgctaaggagtttatactacaggcaacagctactcatttaagttttctctttgtgtttgaaaatgatttcagtgaaaacacccctttactcacttctcatttactgaaatgtactgattgagcaccatttctctgccaggattggcagatatcacaatggccaaaatttttctgtagcctggttttatatggcccacaaactgaaaatagtttttacatttttaaatgaatgaaaacaatcaaagtaagaataatatttcacgacacgtttatataaaatttaaattttagtgcccctaaataaagttttatttgaactcagttatattcactcctttgcctattgtccatggctgcttttgtgatatggtagcagagataagtagttgcaatagagacagtatggtctgcaaatcctagaacacttactaaaacagaaaaaggttgctaatttctatactaaatactgggaaaacaagaggtctaattatggagacgaacagagaaacagatctatacaattcagtatgataagtactatggtacaagtaatctcataatatttgattagcagatgcttgggacacatagcccaaattgtgggaaaggactctaaataaggaaaggcttctttttttaattttttttattttcaaaggtttttgaggaacagatcgtgtttggttacatgaataagttctttagtggcaatttgtgagattttggtgtacccatcacctgagcagtatatactatacccaatttgtagtcttttatccctcaccccctcccaccctttcccccaagaccccaaagtccactgcatcattcttttttttttttctgtctttgtacaatattttattaaagatctttacagaacaacatccagactccagaatacagctgccaaggagaccctgttacgctgtggggactggctgggtgacggcaggcggttctggcttcccacccttctgttctgagatggggtggtgtgcagtatctcatctttgggttccacgatgctcacgtggtcaggcaggggcttcttagggccagtcttaccagttgggtcccaaggcagcatgatcttcaccttgatgcccagcacaccctgtctgagcaacacatggcacatggcagtgacaatgtaatagttaacacggtctccgctgtggatcatcaggccatccacaaaacttcatggatttagtcctccgtcctcggagtttcccagacaccatgacctcacagcctttggccccactctccatgatgaattgcaacacaccatggcaggccctcctcacagcaagccctcctaggagcttgtaacgcagagactctgcctgggcaatggcacagacccctagcggccaccttatcagcataaagctctacactgccctctggaaaaccaaacctcttctcaactgcagcagtcagttccccaacccactggcccttctcaccaagaacattctgtgttctggtggctaagataatgatttctgtcctggttggtgtaaaggaaaggcttctaaaactggattagataaaatttagagaccaagcgatgaagagccttacatgtcctgctaaagacttccaatttcatactgaaggcaacggcaagcctttgatgggttttaagaaggtctatgacatgatcagttttatattttaaaatggtgatcctagaagaaatgtatataattatatgtaatgccattttcttccatagcaaacacaacactgggatgtaaggattatttcctctaagaagaattaattatcattcctgtcaggcaatcattcactttttctctcttaataaaataataataataacaataatagctagtactttttgagtgttaccatgtgccaggaacttgctaagtgcttcagtgtattaattcattcaatcctcactcatataatctgagcaagcaattcttgtcgaactgggtacttaaaataatgtaattagatttaacccttttctggatgaaaacctttctagtgctcaaatcacatattcttgtctgctcttaggcaaatgtactgaacagctgtagcataaactttaactcccttcgtcaagcaagacagatagttacataatcactcgtttatccactccgattattgactgagtgtctatcatgtgccagtaactgtgctgggaagatatgagtgtataccagcaagtagttctcattcccaggggttcccatggctgaatgaggggagcaaccataccagcaatcacaaacctgaaccacagtcactgtttccccctctgcctaggattatactgttggatacatctaatatttgaaattcttattaaaatatttacctactaagcagttttgtgagttgatgttctggtaagagagagaaaaagacagtgagagacaaagagaatcaatgagcattagtgatgaaaatgaagccaagaaagacagaaatcacgggttcatagagagccaaggattggtatttcggcctgttttccaatagcaaaatgaatgaaataacaatggattgttacctggagtaactaggttggaagtggagggaaaggggcttagtgaggggagggtgaacagctactgtgtggacaagaggtggacctccctctgtgatatgtggcatttgccttgatttatgctataaaaggtgcaggaaattttttatacatctaaatattttttctgttagataaactttcttttgagttcagatctaaatttaataatcatatatacatctaggatataggatatactatgctttacaggctgaataactttattggaaaattagataaaatcagataaaacaaagaatttgccgttttactggagcactgcacaaactacaaggttcacaaaccaagacttatgaaccatgagcttaaaatcatgattttgtaactaaaaagatactgaagtgtatctggaatttcctctaaatttccaacagcagcaacatacctctgagcttcaccagaaatcaacacagagagggaatgatggcattttgtagttctttactttttcaattcacctgagatggacagcttcactactgcatctactccttacagtctgaacttgacatgctgtcgaatggaaggagaaaaattaggtacagaaaaaaaacacaaatctcccccaaaaacttcccatatataattttctctcattcaatgtttttcttctgcacgtcatctttatcctcagttatgttattagaagacttataggagagttaaataggcatttgttaagattgtgaaaagtcgaaagtttagataactttgaaagattctttttgtatctgatttaattgcaagtttttcaatattggaatcggttgccttacctctactgcttgaaaacactctttgttcctatttctcttgcatgcttcccatttggagatattttctgcatcaggcagatttctttcccctctcatcccaacaaaatctggtattcaggaaagtcagtaaacagctccatgatctcagcattcattctctttcattttctgtgtattcttgatatatgctattggaaatagagtgccccaaaatccaccgtataagtaacctgactgtagtatattaatagaaaatgaactctcatggaaagttagatgaatagttgcctggatagagatataggtcctattgttcataccttcttctaaaatgatttagtgataatgtccaaaatgcctattgtttggttagagcccaatccctgcagattggttttgctttgcagctagacaaagttaatgtcccatatgagaaaccattttggatctcaaactattaagaatcctagaataaaacttagaaaacaccaatttggacattggccttgggaaagaatttgtgactaagtcttcaaaaacaattgcaacaaaaataaaaattgacaagtcaatgctaattaagctaaagagcttctgcacagtataagaaaccatcaacagagtaaacaaccttcataatgggagaaaatatgtgcaaactatacatccaacaaagatctaatatccagaatctgtaagaaactcaaacaattgaacaagcagaaaccaaataaccccattaaaaaaatgagcaaaagacatgaacagacacttctcaaaagaagacattcaagcaaactacaaacatatgaaaaatgctcaacaccactaatcatcagagaaatgtaaatcaaaaccgcaatgagataccatctcacaccagtcagaatgactattagaaagtcaagaaaaagaatgctggcaaggctgcagagaaaagggaacacacatacactactggtgggtatgtaaattaattcagccattgtggaaagtagtttgatttctcaaagaacttaaaacacaactactattcaacccagcaatcctaattctctgtatatttctctgtatccaaaagaaaataaatcattccaccaaaaagacacatatactcatatgttcatgcatgttttcacttataagtgggagctaaacattgggtattcatggacataaagatggcaacaatagaaactgggtactactagaggagggaaggagagagggaaacaagggctgaaaaactaactattgggtactatgctcagtacctgggtgatgggatcaaccataccctaaaccttagcatcatacaatctacccaggtaacaaaactgcacatgtacccccaaatcaaaaataaatgttgaaattttaaaaattaaaaaataagcaaataaatgaaactttttgaacgagaaaaaattctgatttctaatgaaaagctaatctttgacagcccttctctcagtaggaaatagattttttaaatattatggactgtttgtacttaaatgaaacagtttctgcatgaaatctatcattcatatttaagcagagtgggtaaaatttagtcagaacattggatggctattgttttacaattgctattgtaaaaataataaactctgttttaacttgctttgtgtaacacttagtagaggataagccttgcattttaaaggcatctaataatgaaaaagatgtcttataagaaaaattaggacaattcaaattttgtattctagctctgatttttgcaaattgcttgccccatcttaattacaatgcatactagagtttttacctaaggaaaaaatatatttaataaaaatattgagcacctaccatatgtactgcagaggaacccaaaataaagaagtagtcaagacgaaattaactggtaatacacactaacatggcaaacaaccaaccctgttcattttttataccatatatattttagtacatgcaggaacccaatcaatgaggatcgttaataatttaaattccaagggtaaaaagaagcctacttaaaatataattggaagagctttcacatcatcctgtttagatgagcataaacattaaccatgaaaaggattaattaaaatgagtttattgtctttctctaaccctctgatacactaatgttgaaatggaaaggttgctaaggtgttccactggtgtggtttccattcctcacttgtttcagagatttacctgaatagatatccagtcagagtcacgtaaagaagacagaaagaaaaacataagttcctttgaggtttgcccttaaagcgcccctgcttggattccccacaagacacaacagggcaaacccatgatggatttgcttttttcttgctgatacaaacttctaaacttccaggttcttggcaaaacctggaaacatctcttgtcactagaacaagaagatctgcttcttggtctgattctctttccgactccagctcaacttgacctttcatgatgtacacttccttgtttttctcacaaacagctctgattcctctatcagctggcagacagtgctcattctgtccagctttgttttggtttgcagagcctgggagacagtctatgttttgaatttgctgaataatgctattatttggtttattctttgtatcttctatttttagcaaaggtttccatttctaaaaatactcaaaattatgataaatattttggggatttagagtttaaacaaaatggcttcaacaaaagaaagcatttggaattgtaaatttgcatttaaacgcttgaccatgctggtatcacttatgcggcaatattaaacagcatgagataaatcagaacacagcttgaaattataggcctaacttatttgatttcataataattttagggtctttcctttaaaaatcaacagctcgaagacgtattttttcccagcgaattctcttctctttttgaataatgactctcccatgggtcacagaatggcatatataaaagcactatttctacaataattattcctaatttttaaatttagctaaataacatctgccagatatttataagtataaaattagacaaagtcatttaactgaaagcaaactaatttaaaatatgtaaatgaaaatgttctatgctggaccaaggatttgcatataagttactattttgaaatgcacttgtgtgattgcaagataaagaattaacatgcagcatacagccctttagcatagccctagaaaaaggaaaggaactaagaacataatattcacagtcaaacaaattaataaactggagtattgatcatgggaaagtggagttgtggaaagaaaagctactagagaagattcaattattctcaaaagaaatcataaaatttaaaaatttctaagaaggtgaaatttgttgcaacaaacaaagcaaaaaacattcctagtttttttgtgtgctaatgttgtgattgataatattaaaatttgtgtagcacctttcacattggaatcccaaaagtctaatgatttttttcttgcacagaacatcaaagttgtcctacgatacacagagtaagttgtacccccttccttcagcagaacctcctttgtggcactttgccatatgtcagcctctcttcaaagtgtatttttttattctaaatcttcagtgcagcagattatatttcccttttagagatgagaaactaaagtacacaaggattcattaatttgcccaatttttcataggtagaaaatagtaaagcagagactttatccaggtatctgcctgtaaaattcactagtttaattgccatgttttgctgcttctgctctaccaaatccttcggggaaccacaagattagctccagatttctaagatgcagttggctaataccctggttccctgttatccaactagccttcgttttctatgttgaaggactttgaatctccagtctaggtcttggtttcctaactcatctgctatagaggtaagctccagggtcagactggttgagttcaattttcatggggccacattatggttagaagaagacaatgtctcttgtgtttttgttgtaagagaaaattctcaaaatacctctctaatagcctagtactataacaagttctcaaggaatgtatccaaaggcaagtgtgaaaacttgttttctatggatttagcctggccctctcctgtggtaagctgagttaggatcaataacctcgtctatctagactagtacctagactcaagaaccagctagacccgtgacagaaagacagttcttggctccttcacagtgagttcccacttcctcctctcatctttatcctttgcacttctctctgtctacaggagaggaagccagtaagccttggagaaagaactcttttctctaaggctcaaagcagagaaatgtatgaaacaattctcaactctcagctattgaatgcttactacatggctaattctagagttgtgcatggtcaaacataacaacacagcacaaaagaaaagcattgtgagagtcaccagaatccatcttagcttacaagtaagttcacacaaattgtacaaactcaaataactatcctaagtttcctctaaactattgctttaatcacagcagaaggctctcaaagctactgacagccagcagttgcagagtcgaatgcagtctgactggccacctgttgtgaggtagaagccaggaataaatgtgagtaaaatcaactttattagtcagaaaaagagacatctgccataacagtcagtacaaccacccaaaaggacaaactatagtccaaactacttcccagttcctgtttgcttctcttcaaccctccttcacatctaatataggaatatctgccatttactatctgtatgctaccacagcataattatttttactttttcaagtataggctaaaatacatgtatttaatatgtaactaatagatatgcattagaaaatttataaagagattttttaactgaataatatgttaaatactaaaaacggaaaatgtcctcaccatatttaattttttaattaaaaattaggtgacattttaactttcactaactggttttaaaaatccttttgttttgattctaaatgaaatcaggcaagctatctcaaagcattcagttacgatttataatctgtaagggaagctcccagtggaagcagggtttcacttgacggaaagaagaaaaccattaattgtgaaacacctagcatgtgtctgatgtgctggacagatttaactacatgttatctttttaacattaatattatgcttgttagggaggtgttatcagaaccattttattgataagaaaattatgtttctgaaaagttaacaaactcatctaaggtcacatagctaataattagcaggttgtctgcttgcagagctgccaaccctagtaaacagcacagtatacagtttccatgtcccatgcctgaggaacttaaactgatgtgataagatggctaagtatcagaaaatatggcagaacatgccataatgacattataaacaattacttttttaaaaaagccaaaacatggattacttggattataaaggcaaaggaaagtgcaatcaccctgtacttctatatcaccatcacctcattagttaagtacaggtcaaggtctccctagaataacaatgaacccaggtgaggagagttgactccagccctcatgatcatgcccacacggaagaaccacattaaatgtcttcctatctctctctctctctctctctctctctctctgtcatgcagacacacacacaccccatgcaggactctagagaagtttctagagagtcaagataaggatagcaacattaccacagcaatgtctgaaagaaaaacgatcttagaattaacacagggcactgctttcagagcttcatttacctcccattgaggtctcatctggctcctcatgtaaataaggaataatcacaactacctcttccatgaagtcacccaagtgtattttaggaacgtaaaggcacaaaatctaacttattatcagccactgctgaggaggaaaagctcagaaaggatcaaagacacactggcatccttggggacccaaagatagtggtcagagtagaatgcctgaaactgagatgaagacggggttgccattactgataaggtctgggtatgagtgaggaagcaattcactgaggttggaagataaggtcatggagaagtggaatcctaggaactgggagtgtgtaagaaggatcatctatatacatatttaaatggccccgaattgagataatgttaatatgggagaaatagaataagccacaagagaagattgctaggtaaagaggagagaggacccaagggtagggtaggcaaaagaaacaaaagtagtgtaagggagtttaagagaaaggcaagagcatgatctgaaaaccacaatgacaaacaaggaagacatctattctactcccaagcctagtggtatgaagtatggttgtaagtgggaaaaacagccacctcttgtcaggcttgcagtgaaagcagcaaccttagggagagccagttgtcagagcaagaaggtgaaaggaatatttcaagaaaaatctgaaactatagaagactttgctgaaaatggtccatggactctagaaagtatagagagaatggaacatgatggggtgggacctgggaaacagaggtttgttgttgttgttgttactgacttgaggttaaggacacaatgaaatttgtctcaataaattcaaagcaaatggtaaaggtaaggctttgggtttcagaagtaggagtaacgggtttctggagcttcctcttcacccttaatgatgcacgcagaagttatagaggaggtgtggccttaatctcagggcacatcagctcctcactacaacccttatatggtaggtactattattatttccacttttacttattaaagagagaatgaccatgataactctagactgtacctaaagctccatggtaaaggagtcgtggactgtgtgatgtttaatactgagtgtcaatttgattggattgaaggatgcaaagtattgatcctgggtgtgtctgtgagggtgttcccaaaggagattaacatctgagtcaatgggctgggaaaggcagacccatccttaatctgggtggtcaccatctaagaaactactagtgcagaaagaatataaagcaggcagaaaaatgtgaaaagagagactggcctagcctcccagcctacatctttctcccatgctggatgcttcctgccctggaacataagactccaagttcttcagtttttgggaatcagactggctctctttgctcctcagcctgcagacggcctattgtgggaccccgtgatcatgtgagttaatacttaataaactcccctttatatatatatatgcatagagacacacaaacacacacacacacatcctattagttctgtccctctaaagagccctgactaatacagtaagagctgagttgtctgttttagggtgtagggccaaggaggctcttgaaggcagacaaagtcaaagaaaagtataaagaatgacatttacctgtatatatatacactttgagaacttggggatcacaattatagtagtcaactacactacgaatttctccctttcaacaaaaaccctacgacctccatgttccagaacagtgccacctctgttgatatatatgttgtaacatctgaagcataatttgaatatttatggtggcctactttattgttagtcttaattatgttttagagtagtctaatattttcaggatgacttttccagaccaatttagtttatccgataagaaaatttagctagtatattatgagaaatattgtaaaacgttatttcttcttaacattagcaaagattttaacaaggccctgcttgcctcctattatcagactggggaaacatggtttataacttaaataacattgaaaatttggctgaaaagtgcacttaaaaagcagttattgatggcacaataccaacctggaaaagtatagcatgtgtaagtccaagagatcacggtgaatgatgaattgcaaacatctctcttggcaattttaacaataacataatgtttaaaatatggagcaggaggatatagctatgaggaggaaaatcagctgagaaagggtacaggaaaggacttcatttaagtaatatgacctttctcaatttcattcaacccagaatttctctgctaaaatccagtaatacatcttgtaattgattggcatgcacattaggatgtaaacaaactttgccaatatctctgacaagagttctgaggactgttttgcaaatcaaatatatgtgaaatgttataaggaataaaaaacattatgtttgtactaataattgtaactataataataatgttggtattattcctactcagactagtatgaagtgttcacagcttcaagacccccggcatgaaaagcattggtaatcatgtcattatctgtctgatttatttgtttaagttccataggaatacatttttttccagaaacaaccctcatataagacttcttgatgcattaattaaaaaaaatctgtggctcctttttaaacaaggcaaaaacagcagacctgcttggagctactcatatttatgggcatcgagagtgttgttagcttctcttaccatatatgaatcagacaaaaagaaacagaagagtatgtgaagcttcccatatttttctacttatctaaaaaaactaaaatcagaaaaggaaacagcattctcacctaagaatatcctcccactcagcaatgcttcacattttttcatggattttattactattattattctaccctcagggaattccaagagtaaataaaaatttttgatccaaaccgcaacctcttcttctcccccagctaaggatctgccctgcatggaaacacgtacatgaactgccagcctacccacacagccatgtcagactagcacctgggaagttattccaccctgtccagggagcagaatgacactcaagctgttacccttgcttttcaaaggctggaattattgtgggttacatcaccctttagcagaaatattacccttcctgtgtcaccttatgaaacactaccatgtgcccactcacattatggggctttttcatgaacatacatatattcctgagggtcaaatgtccatgaactaaggaattcccaaaaccctaatattaggaaatagataatgactaaaaatgaccttcattcaatgcagaccactgacacagactacatcggcccttaggaaggaggtttgctttttgtaattgcacatttttcctacatttgatcagatcccaaagactctgctccctagacaaagattttctttcaccagtgagagttaatgcctcaagaagagggcagagtttccaacaacactgacattatcacctaattctctatccatccctaattgctagtccaagatcaaatgactagaaaatcaatttctattaattattctatcacaatatgaagaaaattcttcaaggtgtcatgatgtatgtcaccaacccataaacatgttatatatatatatacacgttatataccaaatatgttatatactcatatatgagtgttcagcctgagatgcctttccctacagaatcgctggtttaaattatagctatgttctctggttagcctataaaaatctatttgaaccattatgtacctactccaagtacacatagaactctttcaactttgtttcactattagattacttttatgaaaaaatgaatacaaagtttgtatttattttaagctgaaccatatgaaaatgcaatttttgtagttcaaaaatggctgaatcttggcaatttcatgtggttcaatctaatccctttattcaaaaagcattaactgaataatatgcacaagagagaaagaggttgggggaaaaagagtggaagacataattcatgtatttagagatcatcacatccagttaacacgtaaatggatataatgggtacatgacatgataagcggtgatttgatgccttttaactccaggaaaactaaacacagaccacgtgtgttttatattaccaagcaatgtcagcagatatgttcaccttgagcccagccccctttgccaaacccacactgtaagggacaggatgaaggtcaggtaccgcctggcagataaaccataagaataggagtcaaatgtttattagattttacctacctcggaaagggccaatgattcagccattctctataaaagtactcaaacagaatgacctgtaatttaaattttcttattactctctttagctgtaatgtttattctaatttgttttggataataaatagattaatcgttttaataaggatattcagtctgttttctatttgaaaaatccagaggacaaacacctctgctttgtgttggctccctaattatgctaactatatttgactgagtatatattagacagagagccaagcaggatgtttggatcataaaatgatcccttattctcaactccaaattacaccattaatcttcaatttaatttctcacagatttctccatagtcaataatatgtatgtattatattaatactattaaactcctgtaaaattatagtttgggaaattcaatgatacaatcttagaatccagttcagcatcaatataattttaaatttttagtcatctttcttaatatagaagcaatgctcattaaatttttaaaaatcaaacaatgtaaaaatacagtagaaattgaaagttatatgtaattgaggtgaaaggggtgagagagcaagagatggtgatttgaaaacagagtgacattatattgttgtatcaaaataaccacatccaaaaagccatgacatatactgttttgcctataactactgcatagaactatatatgattaataccaaatattggtttacaaataaatgccttatcaatttaaaggagggaggtcacccctctatgtgtcaaaaatagttgatgggtctaattctttgtaaatcactgtaagatacattatcttacttgatgactgattcattgaagagagatttattgagtgactaccaagcacaaagcactatgctggccactgagggaaccacagtgaataggacctgccctcctgaaaattgtattctaatgggaaagataagatacaaacaaccagttacacaatgaattatttaattagaattgttaataatgtccaaggacaggaatacatagcgctctaaggggaaagcaatctaacccagtgggagaagtatgggaggctgctttgaggagtgctattcactgagctctgaagttcctactcagcaaatgaaagaagtgggaagagggttgatatagggagagccacaaatacaaaagccataaaataaaaaaaattaaaaaaaaaaaccacacaggctattcaaagaactgaaaggaagctagtgtgcctggagtggagagtgcaatgggaaaacagccaaagataaggctggtgaagcaggcaggggccagaccctctagggcaaggtttccgaacttcagtgctattgacgctaggggtcaatgattctttcttttttttttttttttttttttttttgaggcggagtttcgctctgtcgcccaggctggagtgcagtggcgcgatctcgactcactgcaagctccgcctcccgggttcacgccattctcctgcctcagcctccggtgtagctgggactacaggcgcgcgccaccatgcccggctaatttttgtatttttagtagagacggggtttcaccgtgttagccaggatggtctcgatctcctgacctcgtgatccgcccgtctcggcctcccaaagtgctgggattacaggcgtgagccaccgcgcccggccaatgattctttcttttggtgacctgtcctgaatactgtagcaggctaagcagcatccttgacctccacccactaggtgccaatagaacccgtttcccatacccagttgtgagaaccaaacatgactccaggttttgccaaaagtccccttaaggacaaaatcttacctgattaagaaccactactatacagccttataggtgatattaataaatttgacctttattctgccagcaataagaaaacattgaatattttaagaaagtgattgatttttaaaactatctgggtaggacaagaggaggttaattaaaagagcaaaatgctgcagctgccagataaataaatgctctctaagcctacagaagagaaagcaggttggtaggtcagccgttcccaaaatgttctgaattacctcgacagaagtgggaacagggccactagttatgtacttccccattgtccattcatttatctgaagttagactttagggcttcttgtgtatctgtgttcaccattcagcctggtagtagtactctacatagcaattgctaaataaaacctttgctgatgaattgtcagaattctaatatgcttattagggagaaggtgagaataaattgtaaatggaaattattacaatgtaaaatatgtagcaatgattatatacatatattatgctcctttgaggacataacacaaaactaggaaatcaaatagcacaactaaagcagataccaaatactgaaagagaagttgcaccaccagaagcagtaattctgtttttagtagaagtctcctggctgtactaacttgagatctttactggctaaaacaaaaaatcagtcaactgcttccatccttgttaactcagttccttctgctttttaggaaaaacatgtaatttctcactgaggtctcttgctattccaattctgctgcattgttatttttattttaatgagtgcttggaaggtatttattatgtaatttaatagcaataaataaagtaaacctggatgagctcctaaaacatttgctatgtacctgcttatttaaagtaagaaaaaatagaacattttccataatgaccaggtaaatgtttattttgcttagtgcctctacctccagccttcatctttttctcttacttgttcctaagtgtgggctctgcccatgaacttactgttccttctccatctgtgctcgaaaactattgcccatctgtgcagggtgagtttcattcaaaccaataaccaagaagcaagatccaatgtccttaagcacactagaaggaaagaataataccaaaagaatccttctgatccatgaacaggattaagtcttcaacagctaacactgtgattaaattgctctctcttgagttctggctcaaaattccaggcaaattcctgatttttaaaaaatcatacaattcttaatccactcatgccacaagtaaatagaatgcctgcttctaatcacatgcagcagaggtccctgaactttggtaggcatcaaaattatctgcattaccctttacaaatacatatgcccacgacccactacagacttatggaataaaactcatcggagataggggcagaccatctgtacttttaatgaaatctccaagaaaacttacataccaaattccaatgcacaccaaaacttaagaataactactttatagaccagagcaataattagtaatggtcatacaataattattaattggacagggataaatataagtcacaacataaattattttaccgcctgacagatgatttaacagtctcccctaataaatcaaaatctctttggaggaaacaacaaatcttagtcacctttatgcccaaaccagttgtatagcagacactcaataaattttagaaaaataagtaaaaacatccatatccacatgaacatctaatcagttttatcatttcatttgtatgtaagaagacttctgtactgtatgatctcacatgtgaaatctaaaaataaaaatcaaatacacagagagaaattaaaacagtggttaccagcggcagggtggagaggaaatggggagatgtaggtcaaaacagacaaagtagcagatgtataggattaacaagtcttgagatttgatgtacaacagagaattatagttaataatattgtattcaagatttttgctaaaataatagattttagatcctcttaacacaaaaaaggtaactgtggaatatgtcaattttcttgactataataactatttcactatatgtatattaaaataccatgtaaaccttaaatacactatcttccttctttgtctgcaggctctgcatccacaaactcgaccaactgcagactgaaaatattcagaaaagaaaagcattacaataaaaaatacaaactataaaaactatgtacatagcatttacattgtattagatattataagtaatctagtgatcatttaaattttacaggaggatatgcataggttacatgcaaattatacacagttttacataaggaacttgagcatccacatactttggtaagcaaggggagtcctggagtcagtgccccacagataccaagagacgactgtatgcaataaaattttttaaagaaaaacccctagacatacaaaaagaaagggaaaaaacaaaataccaagactttcacttcatttgatcacttaaaaatactatgcaaaaaggtacaacaatacaacgttcccaggaaagaaatgcatgttcctctcacccactttttccgccaagagtacactgtacatcttgatttttaaaagaaatgaaaataagccatgttatacatgatagtcataaaattctcaggaaaaaatattagatgactcccaaacccttcacatagccttctccctcatactcccatttgctgacctgatagctcattactgcattgctcctttgcaacatctgccccagatgatgtctgcatattttcaagaacagggtaaaagtttctgtccttgcaacaagggacccactaaaaaattctagaccctctcactggatttgagacgtcagtgcagggaaaatgcaaaataagaaatgtagacccagaattaccaatgtgcaagtacaaaagcattcatccattggtttgtaatgatatccaaattccataaatataaaatttggtatggtaaactctatgcaccttacactaattcactattttatttattctgaacctgtccaaaaataacaaatgttttcctattcttggagcactccatgaaaaccgctgagtaagggcagtaaaataggttcttcattcctaataaatcattataatttatgttgtacttgtcccattggagaggataataagaggctgctatgcataacatatttcctcaaaaaaatttttcactgggttcttactcactctggacaagcaattgtaaagcagaaacttgatggttgagagcagggcattaagcaatgttgagagagatcagttgccaaatggagcttagaataggacttttaaaggtaacttggatgaaattaatgttacatcacctcaatatcaatgctgcctttgtcataagtatgtttgagaatactactaagaactcaaggtaaagaagagagatggctcttctaactgttgcatgaacaatcctgagatgcatatacacttgcacaatcaacttacaagctccaccattgtcaccaaagcagatacccgatcaaattcagtacttctcaacctgcagcatgcatacgattcacctggagaacagacacatgagcactactcccagagattctgattcagtagcttgaggtgaggcccaagcatttgcatatccaaaaatctcctaggtgatgcagatgctgaaaatctgtggaccacactttgagtggcattcctccggttgatttttctgattccttttactcagggttgcttctagatgttcattttaattaagaatgctgtgggagaacacactgggggatttgacgtgtattataccactctgagacctgcataaataaacatctgtgatgtctacattgctaaactcaccaaaaagtgaaatagccagggtccaatgtaagacagtctgactccaaacaccatgttcttttcattacactacagttgttattaaagtcaacaactagataagattacttggggagaaagacaagacccaaaaggggctgaggtcagaacctttgggaataccaattgttataggtggaattgtgtcccatcccccaaaaaagaatatattgaactcctaaaccccaatacctcagaatctgaccttatttggaaacagaatctggacagaggtgatcaaggtaaaatgagattattagtatgagccctaatccaatatgacttatttcctcatagaaagaggaaatttggacataaagacagacacatgcaaacagaagacacacaggaagaagacagtcacgcaactagaagccaaggaacctcaagtattgctagagctagaagagccaaggaagcactctcctctagaggcttcggggagaacatggctgtgcaacaccttgattttgaacttctggcctccagaactgtgtaacaacacatttctgttatttcagccaccccacttctggtacttcatgacagcagccctagaaagctaacacgaatatttacaggaacaaaacgaagtacccacgaatgacactaagaggccatgtttaaagggagaggagtgctataccataggactgaagaggtcaaactgaatataaagagagacatgtaaaaatttcacagaaacttcctaaacaattattgtttttctaaaatgacctttctggtcaaaagaacaacttcaacaggccatgtgattaggaaatctcaaaatatttttgagcacttgagccgtgaacaagaaagactaataataaacaaacacttatatgtctaacaagaccctattattcagaccgtttttatcatttgttctcaaaacaatctgatgaggtaggcagtatctatattgttcatatcagaaactaaagctgagaaaaaactaatctttatgtgaaattataagcctgcaggcattatgttattgatttaactgttttcttatgtaatatctacaatcttctgagggaggtgtcttatccacctttcatcggtcagaaaacacagaaatgttaggtcaattgcccaagatcagagagctttgaaaaaaagaaaaattttcaaagtcacatctattgcccccaaaactcatattctttgcatggcactataactggcctcctgtggactggtgaactccatgaaaaaagttattaaagtgaggaaggtactgaaagtggatttcggaaactaaagctttgtaactttacagaaatagttaaaagatatttctcttatctaggacattgtgcataaggtggctgaagaaaccattcacataaaggtaatcagagtttactgctgacaaaataaaatattttcccacaaatgtgttagtaaaatggcttttctggtcaggtgaacaactttaactggtcatctagctaaaggcagaatttggaagtaactatctgaattgcatgtatacttagttattcctctcctcaataaagagtaaaaaatcatcaagacataaaccataggtacattacaatatagaatctaagtgcttttattaacatcatgtttttgtgctatgcttaagattacataaaggtttatgctttaataaagatttctcacaaccctagaagatttttttcaaagattatcctacttcattttaaggcaaactttcattcagatgtaaattctgaaagaagatttcaatattgcttaaaatacaaaaatacaaaagagcaaatgatatagcattctttttattatgaaatgcttattttcagaatcccagagctataaaggatctctgagaggcatttaatttatccatgtggtcttaatactgtatattaatgtatttcaaataatgatcaggatggaaagtctcaaagaaggccgcctccattgtggcaactccttcatatctgaagggaatcctcaaggcagaagacaccccttcatggggagtcgtacccattcccaagctctcttatccctacaagcaaaagcacgtaaatactcaactctgctcagtgtctaggtcaatcctgatctcatggaggaacactgttaacagttctaggccacaattaggttcaaacagaaacagcataagtctccttggctgctaatccagttcaggtgcttgcatcccaattctgaccaccagatttagtcctaaattctgcattgaagtctgtgtgtgtgtgtgtgtgtgtgtgtgtgcgcgtgtgtgtgtgtgtgtgtgacatgcataatgcaagtatgtctcaaaaactgagactttgccttcatctggccagtgtccctgctggaatagagccttgccctgaattctgttctagtacctgaaaccttactattagttgaatggtttctcttgttttaccagcctacatatctacctagaatcctaagtacttgcatgatattactttaccttgcctatcaaaacacttataactccatgatgagcctatattttttctgttactatacatctttataatgtgccctccatatcatcaactgtattgaaccacacatatcatctcaatgcctgcctcattccagcggggtcgcctgtaagcataatctatcctggcaaggttaattgtgctacatccagcccagtcttaaacacaacctgtgtggtgaccattccttggatctgccccaatgcaagaccgtcagcaccctgcctttcctccccttctgtagggtcctcatcatcagaacttaataatttctaaagatcactatagttttataaaataaaaattatatcttcaataaaagggggatagagatgtcagccacagataacaaggacaaaagtaacatttataagtagttatttttcattcctaaaacagaaatgtaaaatatgtcattttaattcacaatattttaatgtatgtattaaatcctgctgtatttaagaagaatattttcatttaattagtttattgcggcactattcacactagcaaagacttggaaccaacccaaatgtccaacaacgatagactagattaagaaaatgtggcacatatacaccatggaatactatgcagccataaaaaatgatgagttcatgtcctttgtagggacatggatgaaactggaaaccatcattctcagcaaactatcgcaaggacaaaaaaccaaacaccacatgttctcacttacaggtgggaattgaacaatgagaacacatggacacaggaaggggaacatcacactccggggactgttgtgaggtgggggtaggggggagggatagcattaggagatacacctaatgttaaatggcgagttaatgggtgcagcacaccaacatggcacatgtatacatatgtaacaaacctgcacattgtgcacatgtaccctaaaacttaaagtgtaataataataaaatttaaaaaaaagaattattatggtaactgaatctcaagtattaattaaatatatctttaaattttacttggtgtttttatattaagcatcttgcaaggaatctaagatcttcaaaggtaagaattatatcttgcatataatacatgatagtttcatcctatgtcaaatccataaatccctacacattgattgaaaccacatgctggggcattttatggagatttgtaaaagctttgctggcattagattgaaggctgtattaacaattatgataactactttggaaaaataaaacaaacgagggaaagcacagaaaagttacaagtggcacttgttctaacactctaaagcaaatataatccccttcaattcacaaaactattaattactctcgaggcttgcaagtgttctacacaatctgcaaacctttttccatctttgcaatgcatactttcagacatagaggtatttgagaacccactaacagtatgctcctaaggtattattgggcagtgggtgttaaaaaaaaaaagtatttttttaagataccaggaaaactcagattccaaaatctcctctactcctcatgtatttcctattgtttgaattgccgaaagctttttagttcaagttcttaatactagtaaaattggcaataatctgagtgttttaacatttgaaacttctaccatatttatactacttagagtaacaaaaagtctataattacaaaaagtggtgagaggaaatggatcacaaggatgctaagaatctaagtctgggaaaggggctatcaaaagggagcaaagggcaagattctggggataaaacaagaccaagtgtggacatttcccacaagtaaagaaagcccgcataacctgaattctggcttacaccaggcaggtgtcagcgtggcacagaccaagagaaccaggactaataaacatgaagatggcaagtgattttcaactcaggctcctgctctttttgtccagctccactgtttgcttcctacctgctgttaaatcaacagtcctaggcagacttcagtcacgtgccaaacaacatgggggccaactggttttggaaaagttcatgagaactaggctccatctttatctttctgcctttttaggtactgctatccaaatgctggttgaacagctgagcttaaaatctctcccagatataatggaaaaatgaaggcaaacgatcaatctcctgcaagcttctaaaccatgtgagaacagaataagacccaggatgatcaggctgaattctgcttcccctaaaatttggcagagaagcacctccatctgtgttccttgggcccttggaaaatcactgtgcctgacattttaaggccctggataccaaagacaacattctttttgcagggaagaacagactgaatcatccgttagatatagcaatagctttctttatggagaaacctaactagcttatctggcagacatctgaggcacagatactctttacttaatgtagacacagcctaggtcgtacagaaaaataaataagaatgtacttccaaagaaatataaatccatacaattaaattgatttcattcatgctccagttgccctgttcatttccaactttttttatgctgataccttccctcccaacttctctgttcatgcttgggctcacacattctcttaatctgttaattatctgtattagttattcattaaatactatatgcttttggctggaacctgaccaagaaattttttttaagtttcatgctctcctgggaataacttataagacaaaaatccagatttcatcacacgatgcacgtagtgacctccctgggggagatgttaccagtaaaacaaagctgctttctgtcaaagcaaagtgctgtggattctgaaatttgaagccaaaaataaaatattcacaaacaaccaaaatatttatgattaaagatgttatgctttcaaaattatgctctacaaacttttgctatgtcttctattaaaaagcagtagcctaatgctaaagtgtcagattctaacctgaagctattttagatgttcctgtttttaaaaattgagaaacactatatgtagagaatctaatgtttttttctttttcctctctccttaccaaaatcaatcaaattacaatggctacccagaacagtatgagggaaactttatcattcacaacacatacataaccaacagcaaggaggctaccctaaccagtattgtatacagagtgtcaacaaaagacaggaaagaatacaaactgcctgctgtaaggaagaccagagcaagagatctgagagctaacggagaacttaagaatgagaactgtgatccaaaagaaattctgagggaaaataagatgaatggtgaaatcggaaaggaggaaaactagctagagaaataagaggccccagatagatagggatacaaaggtcaaagtagcccatggccataatgatggattcagaaagcaatatgctataatttgctctttaaaaattaggactggatccaaaagattaaagtgtgtttctgatattatttgaccccaaaattcaacctgctcccgtgtttggtgtgtatcagagctagaaaaatgagtcaagataagtcagttcttgcactgatttattgccatccaattaggaagctcttggctcactgatcagaaacaaagattaaaggaaaaaaagataccataaaagctaaaacttctgcaatcttctatctcaaccgactatacaaaaagatatgcagtacctaatttagtaagagttataaatcactgcaagtgctaaagaaaaaaaaaacgatgttaacatttaaacatatttcttctggattttggtgtattattatgtcactgataaaaatatttttaaatgaagctttaaatgccctgattttggctgtctacacagaataaatctaatataaaaccatacttaagtaaaaaatatttataccaatataaaatactctacagatttcagtaaatattgttgctataatagttatttggcctacttctttctaactccctatgccttactaaatcagcaaacacattgttcagcgtccatagatgaataactaacactatgtgatggaaggatttgtcttagtctaatggttatttgacagattacttctctgttcattaggggatgttattatttcaacatattatttgtaaaaccttttaaaacattatttgcaaaattttaaagtatacctttattttttattattattttttatcttttattttaggttggagggtacatgtgcaggttgttacataggtaaacttatgtcatgggggttggtgaacagattaaagtataagtttattttttattcattaggttaacacccatagaaaatgtgcatcagaaaatgaatatcatcttaaaacaaggaaagtaaaatagtaataataataattaggtcaggaactgaagcatcaacaagtgtactgatttaataataagtaataaacattctcttatcaagagattttgatgtctattcagcacctaactggtagcaagatctatgagacagaaataaggtagaaagagaagaaagaagagcaaacaaaggaaggctaggtcgcagaaagcctggagtttaggccctcactgataaactgtatgatatttggcaagtgacaacctctataaacctcaattttctcttaatataagagcacaacttatgtcccaggatcatcataatgattcaattagatggtgtaggtaatattgttttacaaatgataaagctctatataatataaatttattacttctgctaatatttagctgaacagaggaaacaacttcagaaataatgaagactaaatttggttagatgccaggtttatttgatcacagagtactgttaaggtttactaatttaatttccaatgtagcttttcaaacttatttatccaaagtgttagtttgcatttttttaaatacctattaaaccaaaacctaaccatgtaattaataaatcattttctttccttgaggtatacatagccaaagatataaaagaattgtcattttactacctaagaaagtttttttaaatattaagaataaccttttgtgcctacctcagtctacctgccttcaagattatagttccagattccaaatgccagaatgcatctaaatggaggttaaaaaggagaatatgcatgctgaaagttcctaaatagaacctcttcacaagttctagatgtgtaggtcttcaaaatatcacaagaaaaacaaaaaaacataaccacataaattcctgctttaaaggaaaaaatgtgttacgataaagtgatctttgaagcaaatcttttcaaataattttttgtgatcaccctaagatgattagagattgcttctaattcggaattaatctttcaaatatctgagttgaatagttttgataacagcaacacaagacaatatttgtattagtctgttttcacactgctataaagaactgcccgagactgagtgatttataaaggaaagaggtttaattgacttacagttcagcatggctggggaggtctcaggaaacttacaatcatggcagaaggtgaagaggaagtaaggcaccttcttgccaaggaagcagggaggagacgtaccaagcaaagtgggaagagcctcttataaaactatcagatctcgtgagaactcactatcactagaacagcatggagaaaactgcccccatgattcaattacctccacctggtctctcctttgacatgtggggattatcaggattctggggattttaattcaagatgagatttgggtgggcacacaaagcctaaccatatcaatactcatggaatactggaaattaaaatcctcacttagcagctcatttttttcctgattatatttccccaattttcaaatcttcatttgtcaccatttactctatttactgttcaacctttgatcataatgttgttatatcaaattcattattactttgcccccactagtgtcattttattattacaaataagccttatgataagtaagcttaatgtgaaaattgttaatagattaataaaatggagaaataaatgattctgcataacccaaggcctacactttgctatcacaatttagttactgcatagcaaatgacagcacgaccagcagtgtgtatttcagctgagtactgcatatataggacatagatagaccaaaggagaggaatatgtcatccaaagattaaacaatttagacaaaatatctgtagacagagccacactaagaggcagactacccatgcagctgttcatgttgctaagctatcagttgaaatataataagatggagaaaattatattaaacaatgtcctcttaaggaggagatatatgaaagaatactttgataagtctcattaggtggagtacaacctccagtggatatgtcaaagtcacaaaggtaatatgtcttctagggaggtgggtatggatttactgaatgagccatacatcctggcaagctgccccagaaccccttctccaccctccatggcactcctctaaatgaacattgaataaagaaataaagagaattttctcaaagagtcaccaaatcatgatcctaccaggacagcaagacatcctattttcatgtgagatgatgcattctggcagcactgtgacttggaagggagacacctacactcacaaagaaacattagcagacaattggaattactcaggcaagaagtacctagcacctgcacccaaccagtgttattgggaacaggaagaaagcagctgaatccatgagtttggatgaggttgtaaagggaacaagcacatagtggggagagcaactaaaacattttcagttgaataatgagcaaagaagccaaactgcactgagttcagtatgaagcaggagaatatgaaaaacccttttttcataaagattgacaataaagggatgttttaaattatcttaaatgtcataatcttgctagaaagtcaacatatacaggaaaaacagaaggctacaaaaaccgagttttcagtatgaagtcaccttatatataatgtattatattgtgtatgtatattattaagttcattaagagacatattagaaacaagagaatatgtaggaatcttgccaagaaattgcagaacaaagatcaactctctgaactgagcacatcagcagaattgacgtgataccacaggaaagtgttgctaccaattgtctataaaagaaagtggcttcgaaaaatttgcaaattgccacatgaatatccaatatgataactcagctaaacatgaaaatgtacagattcacaagcgtaaatccagactaatgctgactagagcaattgccctgtgctggcttatttgggtgtagagtaacattcctgaagttatctatcccctgtacctgcaagatagcctactcttttgaaaagagaattttgagatgcttctattgttactactactgatgggcaaagtaaatgcctgagaccatgccctccgaccttccaggggacacagattctaaaaattataattgcctctctcaccaagatgtcaaacaataaaaaggaattaaaattttatcacagctgggctcggtggctcacgcctgtaatcccagcactttgggaggccgaggtgggtagatcacgacatcaggagatcaagaccatcctggctaacacggtgaaaccccgtctctactaaaaaatacaaaaaaattagccgggcgtggtggcaggcacctatagtcacagctacttgggaggctgaggcaggagactggcgtgaacccgggaggcagagcttgcagtgagccgagatagtgccactgcactccagcctgggcgacagagtgagactctgtctcaaaaaaaaaaaaaattgttacaaactttacacagctccatattcccttgtataacaaatggtcatatctatacttattagttaaaaacatgaaactcctccacattatccctactaacctggcagtaaactcctgcaaccaaaaactgaagtgattttcaattagccatgtgctaataagagccaaatctgagcattcttttccagctctgtgtacagtgatgtcacatcagtagcttgaatcagccatggtaggagtatttacaccataggaactggcaaacactataaattacagttttatatccttctagagtgctggttatcaaaccttttaccatcacattactactctaagcatccttttcatcagtgctttaaaaagcagaattgaatcccttcccatcgctcagtctcgaagagttctccaggatttccaaaatgccaacatttcccactctgaaagtttactctctccaaggtaacagaccttaacagcatccttagtgttgctaaattataccagaggaaaaaaattcttttttgctagatcagcttttggtgttgctgtaatattttagctctgtgcttcctgacagctaggagtctaattaccactctcccattcatccattcagcaatctttgactatcttcaacccagtgaggcatacagattggtccttactcctcctcctcctgcctgcttcatgcaaaaggacttcattcagatccagaaacaaattcccatgtttttcataaagaatgccaattttatagctaataacctcacttcacaagtctatagatcatgctctatggtaggtactgacaatagaaaaatgaatcaaacacacttcctccttatgagaggatacaaggtcaggtatggaaaacagacatttaagcaactgcttttctaccccattttaagtaagcttccagtaagaataggagcagcaagaattgagattccaggagaaattcaaaaatgtacaatttttcattacacaaacacttcaattcaatgtaattcgtttacttagtgcccacagtgagccaggcactaggcacacctgtcacctgtccatgaggagagaggcgacaggaactatgcatacctgtcacctgtccatgaggagagaggtgacaggtgtgcatagtgcctgattcactgggggcactaagtaaatggattacattaaattgaagtatccatgtaaggaaaattgtacattgaacttaaagaaacttgcaaataagttttatagataatttacaccaggagtcagcaaatgttttctaaaatgggccagatagtaaatattttacactttgtagtccatatggtctctgttgcaactactaagtctgcctttgtagtatgaaagcactaatagacaatacataaactaataaacatgttatatttccataaaactttaattgcaaaaggcaggcagtaggccataagtggcccatagccatagttttccactccaactccaatttcaattataaaaattgagatgactcaaacattttcatgggtgcctctgacatttaccaatgtctcttctcattttaccttctccttcttttgtgtgtgtgcatgtgtgcatgcgtgcgtgtgtgcatgtgtgtgtgagagagagagtctgtttcccagggactggaaggcagtggcatgatcacaactcactgcagtctcaatcccaggctcaagtgatcctccagccttagcctctcaagtagctggactacaggtgcacgccaccatgcccatctaatttttttgttgttgtacagatggagtctcactatgttccccaggctggtcttgaactcctggcctcaggtgatctgcccgccttggcctcccaaagtgctggaaatacaagtgtgagccactgcattgcactcagccaaccctcttctctttgtgctctaagcaattagtaattagacacttttatatattaatattttattttgaaacaatcctctgcttgctcaccttcactctgttttcctagcacctggcaatcaataagaagcaggtaagtccccagtatacgcaattgacaccattgattccattagaatgatgaaagctgctctacctaaattctaattattctagaacttcagggtctgagccgcagcataaatgcaaaagtagaatctaagagattcttagatttgtggagatattagccacaaacgaagactgtatccaagcaccgatatttattgtttgctaaataaagagtgcaagtttaaaatcagtaagatcatttctttaaaagttatttagttatttatttgaatctttactgagaagtcagttcattctgaccttttcataaattaaattaaactagcactggctaaaaggtgatgggaagaaaaggtgaaaaggttagtgggtcgttgtcgtttttattgcacagaaatttctgaatggagcttcagccaaaatattgcaaagattcaaaatttaatttcctgggaccagcaaaccaatttttgatggtaccataaagacttccaaaatgagagttaatttaattcattgtcatccaaatcaaaattgtgaaagtatataaaaaagcaatcagtacattttctccaagtaataattttcctttctccaagtttcatgtatattgctacaacccagagtaatattttctcagtagtatatttttacttgttttgttagcataagatgctgctctaaatacatatatttaatattctggtatgtttttaaaaatagtcttatttcctttcattgagactttgaaagagcacctttatgcatataaaaaaagaaaagaccctaaatacaaaaactaacatagagagtatgtaaaattgttatatgaatataataaatgctgctttaactttgaaataacaccaaccattaacaaattgaaaattttgtaacttaagctatttaatgtaattctgtttgaaatacgtattgtttactaaaaacttattttagccaaaaataacacaaagcttctagactgccaacaaaatgtgttttaataacccaattcattagaaaaatgttgaagaggactctctaccccttttcgctcctttacaagttgaggagctgcatgacatagtggaatgaaattccctaatttgaaacctggttctactgcttagcagctgaatgactgggcaagttatttaacctggctctgagtttcataaactggaaatagtattagaacctatctcacaggcttgatgtgccacttacatgagataatatttataatccactacaaacagagcttaatacatagaaaatgttgaataaatgtcagccattagtaatatgttcatttttcttggttgaatgtgattttattatttagtacaatttgatctcataaataacagagactacaggctatagctacataaaaaggagaattggggtcaagtagttcagacaggagaaacacactagagctcaactcagcatacatgatacagctgtgtacttccagtgactaacagtggatgctgttgcaggcaggatactaaagcaatgttttgtgtcagcagcattaagcagatcagaaatcaaaaaaattacatacagtaacagattctatggttagcaactgtaacttaaatacagaaagcctgtctatgtgtgtacaaattcaaatatggacgtgatgctgaaaagtttttagttagtcttttcagcccttttcaccattaatgtcctagattcaatgtaaagacttacccattgtattgccaacaaagaaacatttcaaaattaaagttccaggacactcgaatctaagtctgagatcatacacaatctcagagttcacctcaatatcttcggcctgaagaaaatggataaaaagtacaagatactttaagctttagtgaactgtaacttatttttaaacagaaagggaaggtatattttaatgtgaattacattttaaagcaaaagcaatataatggtacttttagaacctcataaactttgaataaaaatggatcagttcatacttaatgctttgttccataaagctcttccagatacttgaaatgttaaagctgctactttacataaaacaatatgctcttctataaagctgtgttctaaatatataacgcttgggtacatttcatggcattttaaaatgcattgttttctggacttgcatttattggtgatttcaggaatacagaattataaaacagtgtcacaatttcaagtatgcaaacatgatttcatcacagaatcttatttttaaaacagtatttttttatcttctaaataagattaaagaacagaaattagtctcatacatatagtaggtttttctagatcactattgctatagacaatgtttgtatccctccaaaaattcatgtgttaaattctaatggtcaatgtgatagtattaggaggtgaggcctttgaggctgattaagtcatgagagtggagtcctcatagatgggatcaatgcccttataaaagaggtcccagagagctccctccccacttccaccatgtgaggactccaggaagcagtcccccaccatatactgaatctgccagcaccttgatcttggacttctcagccttcagaactgtgagaaataaatttctgtcctttataaacaacacggtcatttgtattttgttacaaaatcccaaacagactaagataactatagcagtcaatatttagcccatatacttcagaatactaaaaaaataaacccctgaaatagaaaagagtctctccatgtgatattttctcataccatttagtcaacttattacaatgataagtataaatatttctacattgtctccactggtattaattttgatcttcagcagcagaattaaacttatcaaagatgattatgtgttatgcaggtcacaattactattgtgccaccatttcaatgacaaactagaaagattgaaaaaaacagtaatgattttagataactatacctaaataatttctaataataaaaatcaacagtcatctaaaaagatattagctatctggttatattttagatcgcctttttcaaagttcaggttataacctttttataaatccccagaatcaaagcagtggctcacaacttgcaattttttagtaaaatgatagactagaaaaaaatacaaaagaatagagatactagaacacatcatatctataataaaagtatcttttcataaagtatatttttagttacatgagtgtgtgtgtatgttggattacaattaaaatccatttcttattataggttactgtcaaaaacctttgaaagtcaatagagagctatcatacataaatgtaagtataaaactaaaatgcaaaattcttaactcttgcttctatgtagttcacttcccactcaaaatcaggatttcagtatatgcccacaatatctaaagttctaacaaatatagaaaaattgttttctgcattaaaggccgaattcattcctgatattatgacttaggtttttgaaaaatggaaattatacttttctttttttatttctctatctcctataatgcttttattatgaggggggtggtgaatatttgaagttgagtaggacaaggcaacccacacaatagcttgctacatcgccagatatttaaaacactcccttcttcaatttagcaaaatgctattacagtaaccaatatttcctctaatttttgaaagtatgaatagaatacgattacataaaaacaactaaccacaatatttagacattgaaaagttcaactgatgtttacaaccaccagtgtggcatataataataattaaatttaaattagtagtagtgtttgtacatggcataaccagtcagtgatagtgtattggtggaagaaattgttctagaacttgcagtgacctggaggcctgaagtccatgggctcccccaccaaccccacttcccacacaacatgcccactcttctggtgtcccatctctgcattttgcaactttctaaggctgagctaaggcaaccactggacacttgggtctgctctgactcaatcttaacacctaggaataagcaagtccttcctcaaagatatcccaaaaacagggacatcacctatgttttgaccatgaaaatgaaaatcaaaaaccattttggacacaccaactactgcattcactaggaggagaaatgggtgctgcctacatcaagcgtaacaataaccacaacaacaaaaaaagatgggggcccgaaggcgcttctaatctgtcgttaggataaagttagctagcattttgtttaaagtttttctatctatgctcttgagagagaaaggcctgtagtttttagtctctcatgctgtccttttctaagtttggtgtcaagagtgtacgtacctccattgctattccctggaaacctttttggtggaatactgaaattatttgtttttgaaggttgggatgaacttacccataataccatctgaggctagtgtttaacttgtgggaagatttttactgatttaatgtcttcaatgctcataaaatgtttcaagttttctatttcttcttgaattttggtaggaggtgattttcaaaattttcccccttttgtttaagttctcaaacttattaccattaaattattcacagaatgtttctgatcttgttaatatctcagttttgtcccttcttttaattcttagtattttttcttgattgcttttttctcttcttcttctgatccatctcacaagatgttatgttagtcttctcaagaaaccaaattttgattttggtgatccatctcctaaaactgtgttttctttctaattatgattatatgagggtttattcctactgtattatgttgtgcttgctatttttctctcattttctatactgttggtttttcttattttttgctttattttaaattattaaattactttgtcattcaatttgttttactttactcagtttggaaattatgtactcttgtctcttttccttgagttccttttctgtgaaattttactatgcatacttaagaaggtaaagtctaaaattaatcagtatcattacctttctttcaaaaaagataggaatttaggccactttaaatccttaatacttcacactcaattatttgcaattgccatatatttaagttctatcattttaaccacactaattagacattgtttttattgattcatgtggtgggtatcagttcagctgtaaccacaggtttctgattttcttcgctcaccattccctcttgcattcagatctcacttaaggaatcacttctgaattcattatttataatttcctttaatgaaggatcacccaatggcaagctctctctttgtctgaaaatactttcattttgctctcattctaaaaataaataaaaacaaataaataaaactgatttgttgaatataaaattgaagctagacattgttttcttttaataatttaagatattattccactgtctcctggtttccattcttgctattgagaagtcaactatgcctgtcattcctttgtaaggaatctgtctttactgtggagctgattataagatcatctcactcccatgatgatgggcctttagtgagatttccgtttgttcacttgggattccttgggttttcctaacctaaggagtagaatctttcatcaattttggaaattcccactcttcaaaatttgcttctccctcattctctctctcctcccacaattctaattagatagatattagacttttcacgtattgttttatttagccatatttatagagtgctcactatgtgctgggcactgatttacagacactggagatacagcagtgaataattccgtctgagtccttccctcagaggtctcacatttgaatgaggcaaggcagtcagtaaataagtacagctatagtatgtctgacagcgctgtgtttcatatcctgccctccttttcatgttttctcacctccccccttttttttctgtgtccctttcatgcattctttcattcaagaagtaattgttcaactgggcatggtaactcacgcttgtattctcgtcattttgggaagccaaggtgacaggatcacttgagtccaagagtttgagaccagcctaagcaacacagtgagaccccatctctaaagaaattttaaaaaatatatctgagtgcgggtgcaatggctcacgcctgtaatcccagcactttgggaggccaaggagggcggatcacgaggccaggcgatcgagactatcctggctaacacggtgaaaccccgtctctactaaaaatacaaaaaattagcctggcgtggtggcgggcgcctgtagtctcagctactccggaggctgaggcaggagaatggcgggaacccgggaggcggagcttgcagtgagccgagatcacggcactgcactccagcctgggtgacagaccaagactccgtctcaaaaaaaataataataatatatatatatgtgtgtatatgtgtgtgtgtgtgtgtgtgtgtgtgtgtgtatctgagtgttctggcatgagcctgtagtcccagctatcagagggctgaagcggaaagatcccttgagcccaggagcttgaggctccggtgatctatgattgcaccactgcattccatcctgggcgacagaaggatacccagtctctaaaaaaataaaaataaaaagatgaaagtaattattgaactgctgctatggaacgagcattattttaggccctggggctgctgcactaagcatgaagaacagtctattgagtaggattggggagacaagcaacaactatgttaataaatagaatgtcaccaggtaacaactactgtgaagaaaagtaaagtgtggtaagagatagcagaagtttagcagtggggcggggcggggggttgctgttttataatacatggtcaggaaagggctccagaataaggtattatttgagcagaaatctgaaagaaatgaaggagcaagccatgtggccacctgaagaaaagtattccaggcagagtcaacagcaggagtcatgataagtttatcttgaataattttcagtgcttcttgtaggccacaaattccactttcagctatgtctattgtttaggctgttcgttaagtttttaataccaatttttatttttcatttagatgttctattcatttttcaattctgtatactcagtttcaaggtcacttgttcctcatttatattttaatttgaacttttatttcttcctactatattaaaatatttttataattttatgtctgataattcctgtatctcaagtttttgaggatctgtattagctatcagttatcattgtttcagaacaatattaccacaaacttagtaacttaaaattacacacatttattgtttcacagtttctgggggtcaggagtcttgccttgctttcttgcacaatggatttttaccattttactccttcactgaggatacaggcttttagtctctaaaatgacccactttgggtgggctttagactttgtctcctgtcctctgccctcagcagccaagaaatacaagcttctacaggcagacagatctaggaatgttgcaaataataaatacaatcatgcatcacataatgacattttggtcaacaatgggccacataaacaatggaggtcctataagatcataatggagctgaaaattttttcaccttgtgataactgttataatgtcctagatcaatgcattactcagtttgtaatgatgctgtttgtagtgatgctggtgtaaacaaacttactgtgttgccagtcttataaaagcgtagcacatacaataatgtacaatacataatacttaataataacaataaatgacaatgttattggtttatgtatctactataccatatttatcattgttttagtgtgtactccttctgcttaaaaaaatttaactgtaaaacagcctcagggaggtccttcaggaggtattccagaagaagacattgatattacaggagatggtagcttcatgcgggttactgcccctgaagaccttccagtgggacaagatatggaggctgcagacagtgatactgatgatcctgaccccgtctaggcctaggcctaatgtgtatgtttgtgtcatagtttttaacaaaaactttaaaagtaaaaaatgtatttaaaattttaaaaatagaaaaaagcttatagaataagaattaagaacatcccatgtaccccataaatatctactatgtatgcataaaaattaaaaattaaaaaagtttaaagggaaagaaaatatttttgtacagctgtaaaatgcattttaagtaaagtgttattaccagagtcaaaagtttaaaagaaaaaaaaaaagcctataaagtaaaaaagttttagtaagctagggttaatttattattggagaaagaatatttttaataaatttagtgtagcctaaatgtacagcatttataaaatctacagtgccatataataatgtcctaaatcttcaccttctctcattactcactaactgactcacccagagcaacttccaatcctgcaatctccattcatggtgaagtgctctgtacaggtgggccatgttttgtcttttctacagtattttaactctaccttttccatattttaatattttaaattcacttgtacttaccattatgttacaattgcccacagcattcagtacagtaacatgatgtacatgtgtgtagcctaggagcaacagactataccatatagcctcggtgtgtagtcggctttactatcgaagtttgtgaaattacactctgtgatgtcacatgacaaaatcgcctaacagcgcattttttcagaacatatctccatcgttaagagatataagactgtatatgctaccatcgggtaatgaaagaggagtcacaagatgagaaaaagaaaaatatgctacatttttagtataatctcctaatataatttaatgagattgtcactaggaggttactcattttatgaggtgcaagaattaattttggaaagtagaggcaccacatgaataagttaaactatactatgcctaaggaaaactaagaaaacatcatttattcattcattgaatatttattgaacatctacaatgtatcagatcagactatttttttacttttgaagacatattagtggataaaggtgacaaaaatccttgcctactgggaacctacattctagtaagcatgagagtactgagctatttattgtaagagcggagaagacgcagcaccaagaggcccaggggaggctcggggaaaaaaaagagatgccagcctggccaacatggcaaaaccccatgtctactaaaaatacaaaaattagccaggtgcaatggtgcacgcctgtagaaccaactactccagaagctgaggcatgggaattgcttgagcctgagagacagaggttgcactgagctgagatggtaccactgcactccagcctggatgacagagcaagactctctcaacaaaaaaaaagagatgcaaaacataaaactcccttacctggccactttacttacagttgaatgttacccctcattttcaagatcaagtctactgtcttaatatatttgctaaatctgttaacaatacactgtatcctcttgggagaactcacacttcttgcatctggaggggaacactgatggggcgtaagactaataatactggaataggagatgtggtttcattgcgacctgacaagaagtgaaagccttcctcatgctgcagctgtgataggaggctactcattgagtcagtagtacagacgccaagccaccttggcctctttccactctgaggttatatctaataaggtccaatcccactacctccttgtcttgacttgcttggaacggtatggagacgttaacacacctgtatccattttctgttgttgccataacaaattaacacaaacttagtgacttaaaacaacataaacttattatcttccatttctcaagtacaataaaggtctcaccagactaatatcaagctgtcagcaggctgcattcctttctggaggctctagaggtgaatccatttcttgcttatttatgttgctgacaaaattaaggtccttatggttgaatagtggaggtaaccattttcctgctggccctaaggtaaaggcctttcccagcttttaaaggccaccgcattccttggctcatggcccctttcttctgccttcaaagccagcaacagcggatggagtccatgtcatgcttcacatttttcttctttctctttctgtcttatctctctgacccaaccagggaaaggttcactgctttgatggactcatgattagagggcatatctagataatctaggaagatctcccatctcaatacccctactcttgatcacaacctgtgtcatataaggtaatatattcacaatttctgaatattaggacatggacatatttggggggaccgttattccgcctgccacacagccctagtgacttgactctatggtggtccttcagcatgaaagttgtcctggctatttgtagaaggtaaaattggttataatctcttactattaaatatttccttaaaatcttaacatgaaatagtagtctaattcctgatgctaatctaaactaataaccataataattgggctatatatctatctactcagagttatgaataaatccaggagccatttcctaccatcaaattcttattcatttatctgttaaagtttacctgaagaaacagaaatatgtattctatatatagtttgggttaacctttattcaacactcctgggaactttctattgcaatggaatccatttagtatgcagccttagaaaaggcacctttgatagaaaggcagatacagagacaccgaagtgttcatcttaatgattaaccaaattatattttgctgtctttccatttgcacaatgaatgctattcacatagaaaattctgtgttatccaaatgaacaccaggtggtttgatgtatcaactgttatggttaatagagacatacaacatacaaatttcctataatcaaaaacctttaagagcaaagcttaatcattgttcatgatatagatatttctaaaaatgaatcaaaatataaagaaaaccaatggtttttgctatgtaagggtggctggacacacacacacacacacacacacacacatgcatacacacacacaaaatagattggataatcctaatatttaagattaagaaaaggaaagcaacttgtagaaaaacaatgagagctattatttgttgttcacttacattgtttcttagacaatggtaggtgcttaatatatattaatacattgcttacgagagctgtgtaatttatgtgtcatgatcattttagagatgagaaaactgaggctcagggggaaatttctaagctgatttaaggttaagtaactaacaaatgacagcgctggaattttacatctgaatctgagttcattttttaaatgcactaaaaactttacccaacaattgtaaacactattattttttacatgatgaagacaaagatatttatattttgtggaattttggaacacatagacagagctattttgccatagtgtatcactgtacatatacacaaaaaagtttgagcctatttaaaacctgtagttgccattccacaaacccacttggttttgaataattaaaaaaacaaaaacacagttgtgccaataaacaacttacctgttttcttattaatgtattgccagtataacattaaaagggaacccagaggcaacttgtcagccaagaacaatgaaaagaggataaaagaaaaaatatacaccactcaaatctgttggacttcggttttcaaatttcctccagaaccataccacttggtggattcaacagaaagaatgcaaaatcttaagctagttatccacataaaaatgtttctgttcaatatcattaaatgtttcattttcttcatatgtaatttttaagtaacttatatgactgaattgcattccctcataagtgctattaaggtacactttagttcactatgtattaatccatctgcaaacctgtcacaaattgtggtcagtaatagcttccaaatgagcatggttttcatataatcctcagaacttccaatacctattactgtaggaataccactaacaatcttcacagtaagtcttctattgaatttgtaccattttataaactagaggttcagtttccattgtctatgtttctctaaggcatcaatattaattttactattttaactgacaatatgaagtcttgtgcatatactattgaatgctacatataatattactttagatagctgttgttgctatattttaacactatgctccctcaagattaaaatcacacagccttgtttttcctccaaggaatttagttccaaaaaccagtcatagtacaagcattttctgcaagctattttcatattgagtataagctttgcatgaaatcagaaagtattacacaacttatgtgttttactaagaaaaagctcgttaaggtgatacacctcacttccaggaaaaaacctgagcacagaacatcagtccaaacgtcaacaatattaatatgagtagtaaacaggaaaaggaatttccaaattacaaaaatcaaatattcagcaacctattgcagactaggattctgtgaataaacaatgacggattatagcagagagcctcttggctctcattttcctgccttgtcttaccaatgaaaataccaaaacaatgttgaaaaaatgtgcacttgaaaactccaaatcataatcagtattgaaactaaaatatgtgtgatagtatctgggcacaggcccagagccccatatattataagcttctttatatttattcttagcatgtgttcatatcataaaaagcatcaagtgtggtcaatttttaaaatcatatggtttcactagccaagaagaactgtgtatgctgataaaaattctgtgtgtgtgtgtgtgttgtgtgtgtgtgtttactgattagtaggggtagaactaaaactgagttctgtacatatatttcacctcaaaagtaatatttacacctgtactcagccttatcatccacaaaataataaaagaaaagtggtttttacttgcatgtcagctgcagaacacaccaacagcctccagagccataccactttataaaaaagctggttacaattattaatatcaatgtaatcttgaaagcaccagtgcatgtaggaaaagctgtagataaaccctgtcatttctgtgtgattaggaacagtaattttttcaaagtgaaagaattagtaactgagaattagtaactgaaaagtaaaaaacagaattccccattcaaataaaaggctggataacactgttttttgctgaaacagccgtgtgtgtgtgtgtgtgtgtgtgtgtgtgtgtacatagtagggtatatatatttatggggtatatgagatatttggtatcagcatgcaatgcatgataatcacattcagataaatagagtatccatcacctcaagcatttatcctttgtattacaaacaatccaattatactcttttagttattcttaagtgtccttttaagtgtccaattaaattattttttaccatccacccagttgtgctaacaaacgctaggtcttattcattctttctaacaattttttgtacccattaaccatcctcacttcccccacttccccccaccaccctcactactcttcccagctactggtaaccatccttctactctctatttcaatgagttcaattattttcatttttagtttccacaaataagtgagagaacaagcaatgtttgtttgtttgtttctgtgtctggcttatttcacttaacataatgacttccagttccatccatgttgttgcaaataacaggatctcattctttttatggctgaatagtacttcattgtgtatgtgtaccacattttctttatccattcatctattgatgaacacaggttgctttcaaatcatggctatgttgaatagtgctgtaataaacaagggaatgcagatatattttcaacctactgatttcctttcttttggacatatattcagcagtgggattgctggcttatatgttagctctattttcagtttcttaaggaacctccaacctgctctctatagtggttgtactaatttacattcctaccaacagtgtagagggttcccttttctccacatcctcctcagcatttgttattgcttgtcttttggataaaagccattttaactgggatgagataatatttcattgtagttttgatatgcatttatctgaagatcagtgatgttgagcaccttttcatatgcctgtttgccatttgtatgtcttcctttgaaaaatgtctattcaaatcctttgctcattttttaattgggttatttgattttttcctatagagttgtttgagctatttatgtattctggttattaatcccttgtcagaggggtagtttgcaaatattttctcccattctttgggttgtatcttcactttgttgattgtttcctttgctgtgcagaagctttctaacttgatgtgatcccatttgttcatttttgctttggttgcctgtgcctgtggggtattactcaagaaatgtttgtccagtcccatgtcctggagagtttcccctatgttttcttttagtagtttcaatgtttgaggtcttagatttaagtctttaatccacttttatttggtttttgtgtatgaagagagatagaggtaagtttcattattctgcatatggatatccagttttctcagcaccacttattgaagagaaggtcctttctccaatgtatattcttggcacctctgtcaaaaaatgagttcactgtagatgtatggatttatctctgggttatcttttctgttccactgatctatgtctgtttttatggcagtaccatgccattttagttactatacttctgtagcatagtagcccaatttttcaatggtaaagtatcagacagaatttcactctccttacaatatcaaaatgaactttcaagaaatattcaggtgacttttaaatatccagatatcattgaaaaaactaataaaacatcagacttcacaattagatttgcatttgtatattatttgtttactgcatttatttcaacttgagtatgtgtctattactttccttttctttccttttaataatttttgtttttactttttttttcagattcttctaaaaaaaggaaaattcttagtgtcagatcttcatgtccacaaactgcattccacaattccacaataatgcaattctgtagtcactggactacaattccttttaccaaaaaaaaaattaaataaaaattttaaaaaaagcttatttaccttcctcactttgaaaatacaaactctaacacaaatcagaacagatctctattttttaaatacaggaaatgttgtgatgaatgttcttatagatatgaaaggcatgaactagctatacaaagttaatcttcaagaaagtttaaactacaaatacctccacataaggtgactttcgctctctgtgaacctctgttcagttcctatagcacaccctcagctacctaggcaaatcaaccacattagtgtcttgaggatggagttctgagagaacaagatgagatggtattcattctctttttataactcacctctgctctcttttgaaatgctaaacattagaaaacttaagctattttttctgctggtatccaaagaaaaattagcaaatcttctacctgtctctttgaaataggtcttacaatagttaagcaaggggctcatctatcatgccagtcaaatcatcagaggggctcacattctattagaacatgacaatggaaaatttacaaaatattattcaaaatttacaaatataattcaaaaaaccaatttagaagatttctcctttaccaagcctaaaattatttttgacttcatataaaggattcagatgtcttgtactacttggccattgtcaagaatcactgggaaataagaacaaacagactacatgattacatccatcagaaatatttataatcatagacaatcatttaaaagtagaaactatgaattcatactaactgaatgcatcagtgttaccaacatcaatgccaacacaaatagaaagatgtgactcctaaactatgaggtctgaatgtcacaaattttctccatgttcttaaagtttcctgtgtggggacatcataaagcatatcctctctagaaataaagaaagccagcttgaaaacctcaatcacaaaagcagagcaatttttgtgctgcaatttccacagagaggatttatttatgtgatctatggaagccatcattaaatggcttctgggctccacactggtctgtagttctccaggctgactcctttctcactgctccatggcagcctattaacctttttagtttatctgtgaccctaacagcaaatccctaatggcataggggcaggaaagaatcaaaacagaggtttctttaaaggtgtgttttgtttattttctggaaatcactaatctgatgctcttactatgagtccaaggggacagggatggcatctaatcctctgccctatacacaccacataatgaattaccaaaattaagagcatgctgaactacagctttctagggcttaaggtacttcctggatagatagctactttcagatgctacgtacaccaggagtacagtcaaactgtatttcaatagcatgaacaactcccaatggtacatgaaaaatggacaagaaatgccttaaaccttataataacactagctaacaaaggttgagcagttcaaaagaaccagaaaacatataaattccttacatacatagagtccaagtgctcgttttttatacttgaaaaaagaaaacacataatatattgttacataggactcaactgtcccctttggttgtttgaattttagttccttcacatgacaagaacaacacaatagtgaccaagcacactgcttcacttcaatgtgcataatcatggcatgcaccattaacactaaaaagatttgctaacccactttaaaataacacttttatttagattaaatacgatgtttgctatagccaatgtatatatgtcaagttcttcataaaatttataatgttgcaaggtggccttacttcctgaagacatttatacacttgcatgcaagttttgggagtaatattaattcatccattcattcattcctcccagagctgcctgagaccagctctcagcaagaaactagaggaaattccaaagacacagaaggcagtttcctctttaagatatttgtttcttgtgctgctttatttttagaacattattggggaatttgaggttaaaaaatgtcttgaatgaggtgcaataatagcaatggactgcagagatatcttaatctctttctaatactgacacaattggcaacatttttaagcaaaccccaagtaatactattttttctatacagacaagaaaagtctgtgtgtgtgtatgtgagagagaatatgctacaaagctcatgagacacatagtgaaaaatggcattaaaatataccagctaagagcaataaccacaaaagcaattatagtcaacaacctgatacttcactttccttggtttaattgaaacacaaagacttttgttagcagctctttcctagggagtttacattgagtgctcccttactgatggaagaagtggcatagctctattctcttgcctctgctagtagttagggctacacctagagtaaaagaaaaatcaattgtaattatccaatgagttcagagtgatctgataacaaattcagaaatcatttgcacttcaaaaaaaatagcatcccagctttccacagaaaagcctcctaactgccttggactccgaatactttacctaaaggctaaataatcatgaatatcatattagtatattataagctgtcactacactctttcttatttattttttctcttttctgtttttcacgttcatcattgcaggggacagtgtctggtttattatattcttattgttcagcttttggttataaaacatgaatgtttcagctgcaccaaatttcagatagaattatcaaatctgaacatacgaaataaattggcacaacccaccatcacttaatgcccttacattattaatgtgaagttaagtcctgtttaagatgcaaactgcaaataatgctacttaagtaaaaagcaaaagaagtctttcaacaaataacgtattaaacctcttgcagacacagttctgagtactgtgaatacagtgatgaagagaatctgtggagttcctctcatgaagctgacagcctagtgatcagagggtataagtgctacagaaagactaaatgcaacaatgtgatggaaagcaatagaaaaggcctctctagaaaggtggcatttaggctgaaatcggaatgctaagaaggaacagctctcggacccgggaaggtcagcatgtggctagagcacaggaagcgggggtgagaaaaggatcacaaaataagctcaaagaggagacaggtgaatgatcatgtaggactttgtaagcctgagtaaggagagtgatttttcttctaggtgagatgggaagctttgagggagttcaagcaggagagcaacatggtctcattcgcacttttaaaacattactccaagcactttgggaggccgagacaggaggattatttgaggccaggagctggacactagcctgggcaacatagggtgactctgtctttacaaaataaaaatttttcaaaaattacttcaacttctccatggagggatgtactgttgggacataataatccatgggaggactctaaagagagttgtagacctgagccatgatgttagaggagaggagacaatttgagatagcttttgaatattagtttaatcatacctggctgacaggataaatgtggagaataaggctaacttctagatacttggcttgaacaactgggtggatgatagtgtcatcctgagatgaaaaagactagaaaaagcaaacttgtgaggataggggaaatacagttgtgttttggctgtgttctttttgagatgcctagaacattagttcttgatgttttattatgcaatacacttcactgcactaatatttataaaaaattaatagcatattcataagcaaggcaactaaacttcttacattacatttcaggtactattttttcacactcatttttctccaagcatcctggcttagacaaagttgcatatccagagaaagataggtaaagtaaaatgtaaaatgggcatgaggacgaacatccttgagcaaaaatcttgcaccttttgtgttaaaataatccattcctggccgggcgcggtggctcacgcctgtaatcccagcactttggaaggccgaggcgggcggatcacaaggtcaggagatcgagaccaccctggctaacacggtgaaaccccatctctactaaaaataaaaataaaaaaattagccgggcatggtggtgggcacctgtagtcccagctaccgaggaggctgaggcaggagaatggcgtgaacccaggaggcagaggttgcagtgagccaagatcgcgccactgcactccaacctgggtgacagagcgagactccatctcaaaaaataataataataataatccattccaggccgggcatgatgtctcatgcctgtaattccagcactttgggaggctgaagtgggcagatcacttgagcccaggagttcaagaccaacctgggcaacatggcaaaatcccatctctacaaaaaatacaaaaaattagcagggtgaggtgatgtgcacctgtagtcccagccagctacttgggaggctgaggtagaagaatcatctgagcctgggaagttgaggctgaaataagccgtgatcacaccactgcacttcagcctgagtgacagagtgagaccttgtctaaaataaataaataataatccattccaaagatcaaaataccgaatgatccaaataagatggagcaaagtaaagaaagaaaactgataccctgatcaactgaaaaagtttactttaatcctaggatgacttattcttttgcaatgagaactgtttagttagctcttaaatgataggggaagcccatcaacctaaaaaatgttcttgttcccatctaaagccagtgaaacctttaaaatctcttccaactgagcagcacagaggacagagcaagagctaaaacaaactaatccaagatactgcttctgatggcaggaagtgccatatccagtttatagtatcatggaaaacaaaagcaggcaatacagatcaggggacagagtaagacaaagaatagagactggaatctgaaaaacatcctacggatatcctaaatgttcaccagaagatttcactattactttggtattgttcccttctgtgtaccacacattttacatatcttgtattcctccatttcatctttgcattaagcctttgaggtagatgttattatactataggtaggtgttattatcttatctatatattatagataagaaaacacctttgaggtaggtgttatattataggtaggtgttattatcttatctatatattatagataagaaaacacctttgaggtaggtgttatattataggtaggtgttattatcttatctatatattatagataagaaaacacctttgaggtaggtgttataggtaggtgttattatcttatctatatattatagataagaaaactcatgttcagaaatctcatgttcagaaatacttgaatagcattgcacagttggtaagtggcagagccaaaatttgactttaggtctgtttaacttcaaaattcatgttagtatccccttattttttattacatttttgattatatggtagatacttagaatagttttagttatctgcagtcataaactgacaggccatgaaccaagtggacccacatggtactgaggtcttcctatgccacgactatacagatgaaaatgaatcattttgtagaatggcaagagtagggattgtctccagtgagatgaaatagccctcacacatggcatgctgttaagcaaactaggtgtctttgtatcttgactgtgccatagtatacaatacaaatgttttgagtctatgtgtgctgaattcgaggttggtgagtacaaacttgcttccagtttgttgacttgcctagcatagcattaaataggaactatttctcattgaatgtacaataattaacttatgcagcacagtcatttaagtttaaagtgttttacccttccccttcccaaagttagaacacacacacacacgagaaagataatgtatggcaaagtcaagattaattttaggtttctgtgctcagacagtaccatggcattccagccagcatgactgcacaggcacagagtttttccagcaaatatcattaagtactttatttttgcatcacaaaaatttcaatacttaattttgcttaatcttgaaattaaagggttcatttaaagggaacattttttaaaacccttcaaattctaatctctactgcaatttaattgtttggagagtgacatgtcttatgagctaattaataatttattaaaattaagtggtgataagtttattaattttggaacttctgcaggaaaacattctacattttcgtttagctaacaaatccatagctataaaatgccataaaattaagaaagtcttgtttcctcttgcttctgaagccatgatcttcaaccatcaaatttgttttcatacagacagtagaatgcgagcttataaatgaaatattcacatctagcacatccaaatccttctaactacatgaatttttttttttttttttttttgagacagagtctcactctgtcacacaggctggagtgtagtggtgtgatctcgggacactgcaacttccatttcctatgttcaagcaattctcctgcctcagcctcccgagtagctgggactacaggcacacaccaccacacccagctaatttttgtatttttagtagagatggggttttgccacgttgcccaggctggtttcaaactcctggcctcaagtgatctgcctgcctcagcctcccaaagtgctgggattacaggcgtgagccaccacacttgaagatcttgaattttaaagatttaatgactacaagaaactcatcacaaatgaaatatggacataaatgttattacattttcagatgacaaccattgaaccaataacacaacattcttcttcattgttatgaaatgaaatatttgtataacaataacagctatcacttgagtacttactatatgctaggcactatttatatattatttaatatgtaaataatttaatgtactgtgtatttcattaagggggaaataaggaaaaagcagtgtccatcatggtggacatactaactatccactaaaatcagttattcttctgatagtaattaatatgtaggtaggacacagatgctaagctagagggcatacatccccaggctcttttgcagttaggcatggccatgtgtccaagctcttgacaatggaatatggaaggaggcaacatgtgtaaattccacctctcttgcttgaatggaaatcactggacccagattagactctctcccccttctcacagctagactggtcacatcagacctgttcctagacaactataaggagtgaagctgccagtcagataaaaagattaaacttgggacaattatttaatcatttcatgtccattcatttcagcagcttagcctacccaaagtaatagatcacacaggcacacatacacgcatatatatatacatacgcacacatatatattgttttatggtcaattaccagtaagggtttttgtttttactcttgcagacttattaatccactaagttatttaagaatacttactgaccacatgagctatacataaaaccattgttttctgattattatattgttagtgataactaacttcaattatatggttttgaatttgaattttattgtttataaaccttttccaaaaatattcttactttgtcttccttacactctttttattttgtagaccctaaactgaacttcagagtggttaagtaccctggcaaatattactcagttatcaattggcatagactgaactgagccaaaatccacgccctttaaattcatacttcctctttgtgacaatatctttaacctttgacttggtaaatgaaactgatttaaattgtacttttcaaaagggaagtgaattttgcctggtgttgttgtattaaaagttagctaagatcagtcttccctacttctttatatttgagcatgtctggtataatccatagtatgctgaaagatcaaacagacatgtggagaaatatgaaaaaaaaatttatttgaagtttctttgagaaaaagcctccagattatcttcagttttgttagcagagtaactcagtgagatttaaggcattagaaacagaagttaatttaaaataaatacataaatatttatagtgcaaaagcttttttgaaaatcacttttctgccctacaattcagcaaagtgtcactgtgagataattatactttttctgcttcctaagattttctttagggttttcaattcatctactccaatgaaatctaatgttctcctcactactcttccaaattcctcttctgctaaggttcgacaccacacataagtctgtgtattgtggccaagaaccttccaggagcattcttcaccctgtctcatggtgtatttaaacaatacttctcctacccccaaacagaagggaataaaacaatagcttccactaaatactttcttccacagaattacccaacagttctattgctatgcacacaaagcacaaggaagaaagatataattgatttcttatcacgcaaatatcttcatgggttcatattcagatgagacagcttctttgaaggccctggagatgtgcagagctgctcagagcagcatcaaagactttcaggaaaaaataatctaaaactggaacctctgagaaggagaaaagagctcatgagtggaagtctaaaagaaatgaagcctcgatgagttttagattcctcattatattagtctaggtttaggtgattaactttctgatatgttcaatataaatgaaaatattgcaaattcttctaatcctagataattatttatggatccattaagcataaaaggaattattcaacaccagataaattattaaagtcattaattaccaacatagagaattattgttggctgacttgattaagtctctccttaaaaccaacagtgtagagacacttctttcaattaatttgacactagtgatttcagaagctgaaaaacatataaacatggtttaatgaggatgcttttattctgtgttctgttcccattaattgacaaagaaatattcactgatattttggctcaaagtcattgcaaaagctatctttcgcataagagtaaattaaaaattaaaattctttcttaaattagcaagtaatgattgttcaattagaaaagaggaaagcttggctactcctttttaaattgctaaaaggaaagtaatattgttggtgacagaacgaggatcagcatcaagtgtggccaatttcggagaagaaatttcctttaatgactggattgttaaatccctctaaggctatgcaacaggtattataaagcatgcaataaattttataaagacatcaaacctcttttctcccttggctgccagtataccactttgtcccaattctcttctgcactctctaaagactaatcagtattttccagtattgcctgtctgcccccagagttcttttcttattatgccatgtactctcacaagagtacctcatccacagccatgaatcgcactggcaccaatatgttaattaccaaaatccacatcttcaacacaaaccccattctaagctctcaagccttatttttatactacttctatatcacagggacctaaaaacactgagcatctctacttctaaattattatagggatctcaaaatcaacatgtccctaatttgctatatctactccctatcacacattcaaataatctgttagccctcctacattctcccctaaatgagtggtttcagtcttctccttcagggctttgtcagtgttcctcttgagacagcacaggtcccggtagacaagagacacagagctcaggatctccatgggcctcatatgtccgggcatatttcctcccctaccctcttacctcccttaacaagctgacccaagtcacgtagcagaaagctgccccctcctaacttacccggccaagctgaattcctaaccataaaaggcagagcctaacgtttacctccttgaacaatgtctcccaaggttgctaaagtgggactctggtattcctgataagaaactgaccatctcccaaggttacaaaaggaagagtctggcattccccataagaactatgcacacgtaccctaaaacttaaagtataattggaaaaaaaaaaaaaagaactggatcagatccagccagctaaagacaagttggactcagcactggcctttcactgatttttttcctcttcataatctcattataatactaaaatcacacccaggggtgtagatttaacaggccaatgagacatatgacacataaagaagcatgttatcagactgtgcagatgctaaaaattccccacctctacgtgcctacacatcactccttttctcgcttcagcttccttaaaatgacaagagcttagccctttggggagctggcaccaggatctctttcccttatgctcctcccttgtcttgctagagctgcaagcctattaaaccttgcctgagaaaaatttctttttggcgtgatgttaatttctatttatgcaagagccaatatttatctgaactacagtgacactctgggtacctccatcatgagctatggccttcatatcaccagagcaatgccatgtgcgacaggaggaagagggaagaacactaaaatgctccaccctggttcactttgtcccctggagatccatgtagttcagcttatgggcatgtttcacaaatttttcttaaaaacaattctttagcttccaactacagcctttctttctaaaggactcgagtgttgccagtgaagtcacactgagtttacgatgccatgttatcatctgcagctgcccctctctccagcgtcagctcttcaggaaccacacactaacatctcccttgcaggatgctttcctctaaacaagtctacccatgaacaaagaagcctagggaaattgttggtcccatacacccagctacaactggatcacccatacatgcctctctatcaaatatatattttatcaattaattgcaaattagttgatattcctgataggcctctgggactgtagacaacactgtggcttgataaaagtttaacagtggccgggcgccgtggctcacacctgtaatcccagcactttgggaggctgaggagggctgattgcctgaggtcaggagtttgagaccagtctggccaacatggtgaaaccccgtctctactaaaaatacaaaaaaaaaaaaaaaattagccagacatagtggcatgtgcctgtactcccagctactcgggagacggaggcaggagaattgcttgaaccagggaagtagaggttgcagtaagccgagatcgtgccactacactccagcctgggtgacagagcaagactctgtctcaaaaaaaaaaaaaaatttttaacagcatgttgttactaaatctgtgatcaaaaatcaacattcctgtctcaaaataattctaggatattcaggttaatctgacccaatctatccacttttatcaggtgaagcttctcacaaaaaaagtgcatcaagcagcacactaacagcaaagtcagtatcttccctctttattaattctctactgccacatcgcaaattacgacaaacttgacagcttaaaacaatacccacttattagctcacagttctacaggtcagaatttcaggcacaaagagactggtttctctgctcagatcttataggctaaaatcaaggggtcagccaggctgcattctcatccggagctcaagtgctcttccaagaccatgtaatggtagcagaattcagttccttgaagttgtagaactgtggtccccaattcatcactctctgtcagcagaggctgctcagctctgaggggccagctacaattcttgccatagggcccccttcatcctcaaagcaagcaacaaagattctcccttatgtcaaagggatatgtatatcccactcacttagaatccctttctccaggaaatgcccagtctcttttaaaagcttacctgattcggtcaggcttatcaaggatgtttttcttgtcttaaagtcccttttattcacagttctggcccactcttgaaggcagaggattatacaagtatgtacagggggtgaaaatcttgggggttgtcttaaaattctgcctaccacattacccttcctactgataatagtttctttctaccacataatcatgcactaaattgaattatcccctgggtagaaagaaaagaaaaaaaaaaagtaaaagtgaatcatagacatgggaatgaatgtgtgctactggtatggcttctctgatttgacacatatgtgaactttacaaaattctaaaatctatacataatgtagtgtgcatctattaaatccctgaacttctttggtcttcagtttcataatttgtaaaacaatgattgccactttgtatgaaatagtcataaatacagtcataaataaaatatttatattctaaaatttacaaggtgacggaaatgaaaaaaatggtctcaacttatctttctgttaatgtccatgaaaagtaatctctacaacaggttcattaaaaagtagcctcctaaacctttgataaatgatctatttgaccttgcattaaaacattcccctggccaggcgcggtggctcacgcctgtaaccccagcactttgggaggccaaggcgggcggatcacgaggtcaggagatcgagaccattctgcctgacacggtgaaaccctgtctctacgaaaagacacaaaaaattagccgggcgtagtggggggcgcctgtagtcccagctactcgggaggctgaggcaggagaacagcgtgaacccgggaggtggagcttgcagtgaaccgagatcgcgccactgcactccagcctgggcgacagagcgagactccatctcacaaaaaaaattcccctatatattatttctatttatagaattttaagaaaatatttgcaattatttaatcactttaatttttcaagttactttcataattattgtcacattcgttatttaaaaaactatataaaataggtaaaacatgaattactttcttcatttcacaagtggaaaaaaccctgagtctgagaaagaataaatatttttccacagcaagttaggtaaagaaccaagaagcagattccaatttttttcttcaacttgttttttttgttttttattttgtttgtttgtttgtttgttttgatatggagtctctctctgtcacccaggctggagtacggtggtgcaatctcgactcactacaacctccgcctcccaggttcaagtgattctcctgcctcagcctctcaagtagctgggacaacaggagcccgccaccacacctggctaatttttgtatttttagtagagacggggtttcacttttttggccaggcttgtcttgaactgctgacctcaaatgatccgcccgcctcagcctcccaaagtgctgtgattacaggcatgagccaccgcgcccaacctcttcaacttgtattttaagttcaggagtacatgtgcaggatgtgcaggtttgttaggtaggtaaacgtgtgccatggtggtttgctgcacagatcatcccatcacctaggtattaggcccagcatccgttagctattcttcctgatgctctccctcccctcctccccacccccgacaggccccagtgtatgttgttacccccatgtgtccatgtgttctcattgttcagctcccacttataagtgagaatatacagtgtttggttttctgtttcagcattagtttgctgaggataatggcttccaactccatccatatccctgcaaaggacatgatctcattcctttttatggctgcctagtattctatgatgtatttgtaccaaattttcttttatccagactatcattgatggacatttaggttgattctatgtctttgctattgtgagtagtgccacagtgaacatatgtgtgcatgtatctttataatagaacaaattatattcctttgggtatataccagtaatggaatttctgggtcaaatggtatttctgcctctaggttttttctaatgtggcctgaggcacttcctattccactaatgctcctttcatctttagtagtaagcagctatttttttaaggtgtacaaatatcacatcttgtttatcttgcattccaaggggcatagcacagtcaatgtttgttgatgcaaccaacattgagcactgctaagtgccagatatggttccaagcagtgaggcgctggggctatctgacacacatgacacagccctgctttcatgaagcttgtcaagtttagatatttcttccaaggagcatgatttctgactaagtctccaaggagcacttaaacatctgagcacatagaatcttttgatgtaggatatgaagtcaagcaaaggaaacagtaattacatcaagtattgaaataataaccagtcaccaactcatcacagtggaacatttcaattgaattctgaagaatattcaatataaatttaaaatatagcctctaagaataatttatgtcatttagtcattcacaaaaaaggaaacttaacacttaacacaagatatactattaatctgcattgctctacagtgattttttttccatttaatccttgcaacatccctttgagagtaggtgctattactaacctccttttacagatgaggaaaccaaggcaaaaacagaaacttgcccaagatcacacagccagtaaaagccaagatctaaatccccagtatctcattctggaattcaggcttttaaccagtaggctctgttacccagtaaatatttgctgagcatcttctaaattccaggcaccggggattgaaaagctgttttcgttttattaataggattatgaactgaaggagaaatctgatctgatataaatctcgtatgacctgatttgcatatgagcttatctgaatcatttctttgggtggaaaatgcactactacagtttctataagtttctgaatggtaatgacaacttcttccttctatacctccctgctattacaagagtgtcttctcagaagagagtaaaggagtttccaaaaagaagaaaaatacttattggacaccccctagccaaaattcaggtaaacatttttctggggcatatgccatatatatcaggttttctctttggaaatgcctctatccttcaataaaacctctctcctctccgccatgaaagtaaaacaaaataagggtgggttcttatcaatttgagcctgaacaatacttttatagttgcaaacccaaaccacatttgactacaaagacatgaacatcatttacaaataaaattttattctgccattaagaaatttggttcatcttccaaagttttaacataagacagagaaatgtgtcttacactttttaaatatatttttttttgtagcaatggctagctaaatagcagagaaaccagtgtaggagtatctttagtgtattggagtcttaatagattatcttcatcattaacatatctgcaacatttacattgtgttagtaaccttagcatttatgtgacttttttattttttataatctaatttgaattcttcccacactgctgttatttggagaatgctttattctcattgtatgtgtgcttgagtgtgtgtgcttcaaaagacacatacaagaaaagatacatcaatattctcagggtgtttttaaactgaactccaaattcaagagatttatggtttaagtatgagtacacagtacattttcaaaaaagccaacctttcatcaaaatctgtaataggtaagcaaagagaaacaaaatcatctggcaacagcgctacatttttccaacatttcccctcactattttacattccttttcctcctacaattttaaaatccaaatttacaggaaagctttttgagagcacaaaaccacttcccaattatatgcttgatacttaaatacctaacaacttatctaatacttatttaaatgagcccaattatgacaatcattagcatttctccatttactcttctctaattataatagtacagtacaaaggtagagacgtaacacaaacgatgctgagcagagcaatgcaaagtcatttattcacaagaaggagggaagggtctcttggcatatttactaacgcagagtcaaaaatgtttgccaaagcagtgtttggaggtgagtctgcaatcatttttaagagaaaggaaattttgctccccaaaaggagagaaaaagagaatagtcaaaagcaaatttcctccaggggctcattcacgtctgctgattttttcctttctaattagaaggccttatgcttgggcaatcaaaaacactcaggcttagaggtaaaaactggacaaagaagtagtagagttatcagacaaatacaggtcccaaacttacaatagtgagacttccaatttttagactttaaaattttttgagagtgatatgcattcagcagaactatacttcagattttgaattttgatcttttttcagactagcgatatctggtagaatactctttctcccaatgctgaatagcatcaacaagctgcagcacccagtcagccatgcacggaggtaaacaacagggttttgggatcataatgaaaagaaaaaatacactgtgcagccaaacttgataccttcctgaagaacactactcctgctaaaccatcaacaagtgttcataactcagtgttttctatcatctgttctcgagcctccccagaaaagagagaaactgatgatcctgctgcagtagcatcccagacatccagcaattaattttactttgttgcttcatatgttaataacaataaaaaggactggatttcttcaggctaaatatagaaactagccaaagtcacagggaaaagacatctgacataaaacctaaagaaaatgaaaagtgcatctattctgaagctcattgtccttatttcttcttcagatgaaagaactgttttcaatgttatatttgtgttatgttatgttttatcccaagcttagcagattgagataaatctaattaacaatgcttctaggagtataacttgtagaccacgtgtttacaaaagaagcaaaagtagcagaagaaaattgtcctggaggtaaccaatattaattaaattaattaattaattctcatgctggcacaggattctatgattctgagaagtaaacatgtatttgccttaaatatcccatttaaatgccttcttttattcattcattccacattttactatgtgccaatccctgatttaaggattggagatggaatgtagtgtaagacaggcatgatccatgatctcattgagcaaatatttcattggaattatagaattcaaaaagtagaataggtaccatatacctgacataaaatttaaatcaaaatggataacaggcctaaatgtaagagctaaaactgtaagattctgatatggtttgtttctgtgtccccatcctaaactcctgttgaattgtaatttccagtgatgggggagggacctggtggaggtgactagatcatgggggcagatttttcccatgctgttcttgtgatagtgagttctcatgagatctgatggtttaaaagagtgtggcacttccctactcactctttctctttctctcctgccaccatgtgaagaagtttcttgctttcccttctccttctgccatgattgtaagtttcctgaggtctcccaagaagcagaagcatatacagcctgcagaaccatgagcgaattgaaactcttttctttacaaattacccagtctcaggtggttcttcatagcattatgagaacggactaagacagtctcaaaaaaacaaaacaaaacaaaacaaaaacaaaaaaaaaaacaggaaaaagcatcatgacattggatttagcaagattgtttggatatgacatcaaaagcagaggcaacagaagaaaaaaataggtaatttggatttcctcaaggttaaaaacttttgtatgtcagaggacagtatcaacagagtgaaaagacaacccataaaatgagacaaaatatttgccaatcatatacctgataagggaataatatccagcatatataaagaactcctacaactgaataacaacaaaccaaccatccaatttaaaaacggacaaagacttgaatagagatttcttcaaagaatgtatacaaatgggtaataagaatataaaaagatgcttaacatcactaatcattagagaaatgcaaatcaaaaccacaataagataccacttcatacatataaaggatggctattacccaaaaaagggtagggggtggggaatgaatgttagtgaggatgtagagaaaatgaaatcttgctcattgctggagggaaggcaaaatggtattgctactatggaaaacagtattaaaaatagaattactatgtgatccagcaatttcacatctggttatataaccaagagagttgggagcaaggactcaagcagttatctatacacctatattcatagcaacactattcacaatagccaaaatgtaaaagctacccaagtgtccactaacagataaatggataaataaaatgtggtatatacataagatggaataatattcagacataaaaaaggaaccaattctgacacatgctacaatatggattaaccttgaggattttaggctaagtgaaataagccagttacaaaatgacaaataccgtatgattccatttataagaggcacttagagtagtcaaatttgttcatagagacagaaagtagaatggtggttgccaggagctgggtgaaagagaggaatgggaagttagtgcttggtgggtgtagagttatgggactgggaagctgaaaaaagtcatggagatggatagtcatgatggttatacaacaatgtgaatatacttaataccattgaactgtacacttaaaatggttaaaatggtaaatttcagattatgtacactttaccacggtaaaaacaaagtatacaaagataatttcaggcagtaagaagtgctacaaagaaacattgtatcactgaaagtgactggaagaagcccgaaaactacattagaatgagagtactcagtggaaatgacatttgactgaggtctgattgacaagaaagaatcagaaaggtgagacctgggggacaagcatttgaagcagagagtatagcaaatgcaaagtccttgaagcagggatgagctctgcatgttgaagaaacagaaaaaaggcacactagagtggatcctgggaatgtagataagggatgacctacaagggataggtaagatgtggtaggccagggaaggagcctagattttcttctaaggacaatgtaaaacttggaggatttttgagcaggagaattaagtgatctaatttgtttgtaaaagatcactttggccactgtgtaggaaatgaatcataagagggcaagagttgaagcagatccattaggagttgttctaacagtagggacggtggtggcttggaatagatgatagcagtcatgacagagaaaaatggaggcattcaacatatgttttgaaggtaaagccaacaaatcttgctgttttcattataaatagggtaatcatacattccctgtttccctgggacagagctgatttctgtctgttgtcccagtgccctgtatggttagtatctcttttattctcaacagtatcccagtttgaagaataaatcatatggttgccctagctatgaagaacaaaggaaaaataagaatcaagggtaactcctcagcttaaggcaaatttgtagtattgatgtttcaaagatgcactattaacagtattgttaatgaaggaaaaacaacagaactccacatttgttttattcatgagtcctttttgtccatagtcacttaacaatctcacattcctctttccatcccaattcagtagctatgtaaatgtactaaaacttcagaagaaaaaaaaaaacaaggcaaattgaattagccaactaaaagacagttcaagtaattgatcaagaaatacaagagaaaaggagcaattcccaggagacagcagcacgtacaggagtagctcttaggctgtccccggtccttctgctcagacagagacaaagaacatggaaccgggtctttggtctgctaacactgtggtagaaggagctttatcctggatcctggaccagggaagattttatgctacgaagagatagaaaagaagactctcggggaaacagccctgtagagggcctggaccacattaaaaaaaaaaaaaaaaaaagacactggaaattagttagaaaaaagcatcaaaaatgaagaaggctatatgagaattcttcctttgaaggaggattgtggcacaggaatatctagcatctaaaaccaagaaacatatttttctatctggaagctgttatttcctgagataaccctcaaggagtgccaaacacattattattttgcattctgaaaaaaaccacaggctgatgtggcctgagaaaatacctgctacatatgtttttctttctctctctctctctctctctctctatctctgtgtgtgtgtgtgtgtgcacgcgcgcgcacgcatctgtctcacatacacacaaacacacacacagttcttatgatacattattgctttcttcctttatccaaagaagtagcagcaatgaaaaaaatcctctgaagtttgctttcataattctgaagttcaacaaatatccacaaggccaaaatagaacttcaggccaccctgaaataactgttaaacgaaattaacaccaaagcttagtactagaactatccacgtttattaacatttgaaagcaaattcgtcaaaatttacacctcttgttacacaatgaaccgatatacttttttaaagtgatgggtaattgactggggactgtcagtgaatgttatctgggtaaagaagaaaatagattagttgtgtttcaaagggaattactgtatgtcacctgctacccataattttcaggctattttaagccttggttttgtgaccatctacatactatgatttcgaatattaccctaaatagaagaactctagtagtgcccagggactcaaagctgattttttttaaatttcagtaattgttttttgtcagttgatagccctaggatatgaagagcaccaggacttaactaaagtctaaattcagctctaacataaagaaagagtgagagaaagggagcgagcgagggagagaaaggatgggggagacagagagagatacagaaagaatccttttaggccagccaaatctatatttatggcaacctgccccaatattttaaatacatatgattcatggaagcatctgaatgatctttttaaaaccacagagctgaaacaagtaattgctaaagagtcattggattagaaggctaggtgaagcccactatttcttcaggttttcatgatcaacagctgccccaaacatacttgattccacttttgcttatgcaaatatcattcatcttgccaccagcatttgctttagtcccttaacagagttctttaatcgtagttgtttccacagatccatcaaatcgcattcattattgtatcctggactctaaattaagctgaataacactgagatgttatctttcacgtgttatgtgctacccaaatattatcaattctcataagactgcctgaatattgtgagccacacatagctacctccaggccaatgcagtgattgctcattttacctaacattagtctcccttggttttaattcacgttcagatcttggcttttccagtggataaaatttcaacatgattttaaagtagtctccagcctctagtccagcagagttaaactcttggggactttcttcaagaatttcaattaatggactgaattgaaaaagcttttcctataaacaagtgatgagctatataggaaatttgactctgaacaaaatgccttggcagtcatttacacatccataatctaatagatgattttcaaactggaccacatatcaaaattatactgtaaaattaaagaaaaatgtttctactttagaaaaataggagcattttttactgtatgaagaatggtgaagtttctaaacagaacagttggcatcactttgagtagtctgctgatttggaaagagaaagagtgcctcaagactgtgaataagccattttcctttggcaatcaagaaatcgttggggacagaaatagagtcactaccaatcttagcaccagagcctcaaggtcaactgaagaactagactgttctctacctctttcccacaatcatgtgattattccctttttgttcttgctgaacatgacaaatattttttctaaagaatatataaaccctattgcagcattcattttccatggaaaatattctgttagagtaagaagaatgaacaaaagtatctctcttctttggttgttcagtcctttccagaaatctgccacttctgccaacacatttcataaatccaaggataactagtttgggccaaaattatgttttcaataattaagatagaatgatgctggcaaagctgagtttttacctcatatatacagatacttatgcctattttccattgttttgccactttcagagaatttgaacaaaagatttgaatatccagacacattatatatcaaaattaatcaacaggtatttgttgagtgcttcatatgtagcaagcattttgctagaaacaggtacctccttttcttatctcaggtgccaagacaaaaaagttggtttgaagtcccagtccaagttccagcttttcatctaagtagttgtctgcagccattccagtccacagtgaattttttctttctctaagcaactatagcatttatatctgtatttcttattttaattcaaggcagtgaattccatttgatggaattgatgatgttaaataacatcattgcagagcttggcacatgctttgtatgtagtagatatgtatctactgtattaaatactgttaaaattaagtattaaaaatgaatatttgcttccctctttaagataatgtctatacttaaatacatggaactcactatgtaacatatctctaggtacagctcttatatttttataccatgcactttacaatcttgttatcactagaggggtgaagaagaggaaggtcaccaaactacccatgaagctgaggtggtagcagctagaacatcacaactgataggtcagttgatactctgagccagtgattccaatctcatacaacaatttgccatttttatcattacccatacctccaatgcaatcatctgaaggtcctaattaaccgccacatcccctaggtgatcccagacccacgatagtcattcagtgatttgtcaaactcaaggtaaagtgcaagctcaatcacaatactgtttcataactgtctcatatctgctctaggaaagatattttgaaacactttttgaagatttgctattaagtgtttttaataagcttccaaagaaatgtaaagcattctaattgctgtcgacagagtatcaagttgagtgacatattcttttcagctagtcattctttggtgtgacactgaacaataatactgaaccatttgaacatttaaaattatttttaaaagaataactagtacccactgttaaatctaccaacctgttggcatcggtgcccaaaattctaccttctttcttgataatatagataaccagtctgtgctcctagttaagattaacccaccatttgtacacttgattccatccccatgtacctactcaagagcatgggaaccagctcttctccactggctcttacaggaacagattgtcctattaaaccactatataaaaacataaatatgctgtaatttctcttaaataaaaactagtttcttcaccccactccccctgtaacttcatcttctattaccccatttctcttcaactatttccaccaaacctccttgaaggagttatttaaattcctgtctccaatttctagcctttcattctctctaatcagggctttgctcctgccaaaaccattcctatcagggtcacaaatgaccctccagtttgataaatcccacagtcagttcttagccttcatattccttgacatgaataatctaaattctttgaaatgtcatcctcatttgacttctagaataccaaactcatctggttttcctttctactccttcttagcctcctttactggttcctgctctcctctccaacttctaataaccccaatgtctagaaaaggatttgaaatatggtatatgtccaatatgtattttgtgaataagtgaatggataaatcaacctcattaacaaacacctactatagtagattagaagctggctccaaggtcaatgatatgatttttttaacatatccatctgcaaaggaaatattctatcaaggaaagaagggcataatgtttaaacttctctagacagtttcagagatatgggccctgcaaattatcttctcccaaatcccatataatttttaaaccattacaattaagtgaatactcggcacttaccatggtcagccatcagtttccaatcaaatttacatatcagcgaaggctttatttgatataggaaatttgctttttagtccattcgcatcttctttataatcaatacatcagtctatttatggatttttataggatttggtattcaactttattattttagactattacagagaacttggctgttataaattttcttttacaatgctttattgctgaatctctgatttgtttgcttttgagtcattggttaggagcacaaacttgcaacaatattattcttttaggaaaatattaatctgacatatagaaccattttcaggaatgcattgtgatggaaagcaatttacaagtttttattgtaagagactctgtgtacattctgtgggtttatcaaggtaatattaatgatggaaatgaagatttcaaatacatgtaattaaaataataaatgcttaatagcaaggtgcagcacagacaaaatctattgtatattggcattgctagaagtggctttttaacaaatagaatttacacattcaaatgaattttcatttcaaaccggttacatatcttaaaaacaaagaatcagcaagaccccctggggaagtctgtaaattttagctataaaaataataaccactagaatttatacatccaaacaggtattgttcccctcacagtgataaccttgcaaagctgccccacattccagtgttggtgtcatatgctcagaacatttttggaactccatcttcaaaaacagcaccaaagcctacattgcactctttattgccctcagagggccatgtgttcatactttgagggtgtattcttttaaaaaacaagacaaaacaaaattattcagtgttaagaccaacaaatcagataatgataaaattgagtaataccatcatgaatccaaaatgagatttaactacaaaataaaaagtcaaatttccttgtaaaagattgcaaatctgctctgaaggcaagtcccaaagaggaggagatttaagtatgtattgagcaactgaagcaaggttaaaatgaatgtagcctccagggtggctactgtgaagggtaccaatcactttggttttaaattcagaaaactttgttttaaaacttcttttcggtggatattttgtaacttaggtacctaagacactagaagctaatgttccccattcttctcagggttatgcttctcaacttcaaaaatatctgtataattgactaaggtagctcttagctttttattaagaaataattttagcctcactccggaatggaaaaccaaatattgtgtgttctcacttataagtgggagctaagctatgaggatgaaaaggcctaagaatgatataatggactttggagactcaggtggggaggttgggaagaggcggtgaaggacaaaagactacacattgggtagactgtacactgctcagatgacgtgtgcaataaattctcagaaatcaccactgaagaacttacgcatgtaaccaaaaaccacctgtaccccaaaacctttgaaatacaaataaaaatttttaaaaaaagaaataattttagaaagaaatcagtttaccttttaaaattttaaatggataataacagaaaaaatataaaccttaatatcattccaaaattccttaatttacagatttgtttatttattttggctaacattgaatgcttactctatttcagatacttctaaacacattaagcatattcattcattccatctttataagaaacttgtaagatacattctattactagcttcattttacacataaaaaaaatgaagtcagagaaattaagagactaccaaaaatcacatagagccagaacaggaacacaggcaattcaatccagagctgttctttgaactactgcactccattctgagaatattcaccaaattatcaagacatattagaaaaatatatattacaaagataataagatatgcagaaatgaggagaaaagcaacagtaaagcattagccattaacaaattcttctaaattgttcagttttttaaatgctaagaatatttgtaattgtatcattattcctgtttatctaaccccaggcaccaggccacttagataagtccttgctagggaatctgagtgacatagtaaaagtgtccttcgtaggacacttacttattattatacggtcttagaaaactgtcctaccacatgacacatacaactataagagcatcataagaatgctatgataagagtaagaaatgcaaggtctttgagcatcaggcactgtgctaggcactcaggctgcaagtgaaagaagggatataattgccaccctgctggagttaatgtcttaagggatagacagtcgattaacaattaaacaaataaatacgtgagtgttattctaatcatgaggaaaataaacatgacactgtgatagagaataaagtgggtggttaggaaaggtctaaaagaacatggtcaggtccagtgcactgaaattctgtaaggccagatggcatagcaatgaataacattaagaaattgcatagcaagaaattagtatctatatctgagtggcacagctcaaacaaatttcatttagtaaggcagactccgtgagttgatatgtccaattcccatactaacctataaatggttaaaaagcaaaaggccctggttacctaaaggatctctcacctgattttagtaaactttgagtgagcctctgaaaaacaggtggttccaggaatctgcattcaaccctaccataatattgttagtctcatgtgtaggcttgcattgcttattttctggcttcaatcatacaaaggaaaactaatattgctcagaggtaaagaacgctttttgccagtcctcaagtttgaaccagtctttgtgaactgtctttccccagaaagcctctgtgagcatttaatatttaaactgaaatctaaaggatgagaaggagccagttttgcagaacttcaggaaaaagaatgctacaggtctggttcaaaaagcaaacttttacaaagactgatattagcaaaacatctctctaaattggcatatctttactggtcccttttaacattaccatttcccattaccataaagccagcatcccatattaagatgtggaaaccattatcaagggaagcaaaggggtaactgctggttctcttatttggaggtcttatctgcgtttggactcttaatctttaagcacagcccaactcccctgctggatctgggattcctgtcttggtgccagagatgttgcttagattgtgaggtactctttcaaaagccaagcatccacacatcactgataataaaaacactgaagtcacataagtactatagagaaagcaggaaaggtgaaggacctttgctttaactatacctgagtcaaaaggaaactgtttaaaaaatctgagatacacagacacataagatgtcacaacaggatcctattcataaacaagaaaatgcagaacatttgttttttaaaaagcagaggaataaatgaaccagaccaaggtctggtttcttaaaaaaggctttactaaattgggtgtccaggattataaatcccaattactatttgagtctccccttttctaagtatttccagaataagataaatgaccacattttgccttaaaactatgttaatgaaaaaacttctaaagcatacaatgcaatttccaaaattttaataatgataactcagtgtcacaaatgaagccaaatctggtgggtaagccagtgttgaaacataggcacaaatggcttagcttgtcactctcgtgcagtttgcaaacccttccccaagctgccaaactgtactgattgccaggcctctgtaatgtcacacaatttctcttaggggctgttgagcagcaggtacacatacctgtgcatgtcctcatggggcacatgcctgaaatcacacagctccacaccccaagttgcaaaactgttttatggacattttgcatatctctctctctctttgattccccatcagaatgtctcctgtttaacacccccttgctatttctaatctctgtagtcagctgttgcagctgtgtctaattccacaattctgcttctgtttcttcattgattattcaaaaagaatttattaagaattatgtcccaagcactgtgtcaggcaaaaactgaaccaaaaagacatgatctctaattgcaaggagcttaaaatgcagagtagacagatgttaaacaaacaaatatagcattagaacttgcagtaatataatactttgagggggaaggatagaaaggagcttatttggactctggttcctgaaggcatttctgaggaggtaataattaaactaaggcctaacagataaataggaaaaagccagagaaagagtgaagagaagacactgaaggcataaggtgcaacacaggcaaaggcctgaaaccaatgagagcttggcacatgtggggaatggaaataggttggtaaacgggaagagtgaaactggcatgcaatcaagtagcaaaagaagtaggagtcagatcatggcttgtaggtcatgttaaatatttttaacacaagggttggctagtaaacagtattgacatgatctgcttgattatattttaaatggctgtcttgtctgtcctataggacagaactaagaagaaggcaagagtggaagttagaaagtcaattacagggacattgcagtaatgcacgtggactccatctcttctcagtgagtttattctgtctcctccagtcacttatgacccactctgatttttcatggaaaagcttgacttagaggcactggtatccctcagtagttttctcttttcttccatgtggtaaatcaaacaatcagcatgagaaaagttccagcttttctcagctgtgttcaagattcccagaggctgctttgtcatgaaagtttaaagatgtcttaagcttgtgaagctgaaccccggaaaactaaagtctacattccactatattaaaaagagatagtttcatggattctatgtgacaatatatataactttaatatatacttatcagcaagaatttcccattttggaagtgaaaacacatctgtcaaaatttgacttcagtgataaatggtgttgccttaacattttatcacccgggtccttaacttgacatctataaacactaaggaaagaccattaatatcctgaaagagtatgcaaacacttagatgcattcgtgcttgaagacttttctgcagaggtctgtaacactcatcagagtttcagcaggattcaagagtgagtggctgaggtttacctacccatggctagcaagctttctcatcatctcaacaggcacatgaccaaggctggccaatcagaatcttccctgacactgataaacggatatgaagagaaaaaagctaggttttcgctggaattcctaagcttgggctgcagtggctatgttccctgccatgtggaaaaatccttccaaaataggacaaaagtatcaaaaaatagacatttaggttaaaaacaaacaaacaaaacaggcagagacagacagatttctgccatcattaaattaaggctctaattcttgcctctgttcctccagttctggaatctaccccagtatccttccaagctacttgagctgattaattctctttttgttaagctagcttgagttggaagtctacgcctcttgcaagaaaattagtcctggcttataaaataatactcaaatccttaagaattatctcttcagtgtaatgatctgatatcgaaatccatcagagacttaaagatattaaaattgaaattgaataaaaatatgaattcatatttgaccacttaactttcagagatattactatgactacctacagatattttaccagatttagttctagcagcagaaattaaagcctaattagacacctgtgggaagcttattaaattatatttacacattaaatgtttgcttaataatctaataaaccataagaccacttgaggttacaaactagatggcatattttagacaaatttaatggaattaggtagctcacataaaattatttaatccagtacatgtcataaaagacctaaaatgccatgacagaaagagacttgtaatttcattttagtggtaatgatgatataaggagtaaaaactggtaaatcacaaaatatagaaacactctgcctaatcaatagtgtaagtctatagaacatcctccaaatcaatatgatatataataatgacaagaagcacgtaaatgaaaaaaaaagtgaattgtctcccagcccagaactattatccgtactatattaaaagagcatttaacacaaaaatgtgatcagtcttcttaactgcagtagcactgacaataaataaaatttatctttccttcttcataatagagagttataacgctccagaaacctcacaaaactagaaaacaaatagttttgagaatcttagaccacactagcacttaactacagactcacacctgcaggcttttggcaatatttagaacattcaaagtttataattactgagttcaatgaccatttatgcataggatgtgcattataaatttaacttccagtcggagaaatagcaatgcagtaaaatctcattgagaatggagcattttagataaataaattttgccaagcatatgaggaggcaaataatacaccaagagccagcaatatgccaggcccttgctggctgcacttcacatatatgatgtcatcccagccccgtggcacccctgcatggtgggaagtatccccttcactttacagatcagtaaaccaaagctcagagcataagtaacttgcccacatcacttcagcctaagagatggatctggatgcaaatacagtctgactctgagtcagaaaaatttttttcatttagatgatgttttattcaataaatgcttataaaatgagaacaaattatagatgtaaatattcttttaaagtagaaaatattgaatgtattttctcaaagtctcaaggataattatcaatatgaatttttttatttttcttgttatccctcaaggtcaagtttttgattattccacttcctgtcattatgtctgccacaaacactgcctcttcataatagcaactccctctacacacacacacacacacacacacacacacacagcccttcaagtttgttctttcaatcttctctgggtgggaaacgagaacaccatgttgtttaactattatatgttcattgagagccattaaaattctggaagaactgaaaaagtcaattccatgttaccaaagtctttgaaaccactatgtcagaggcctccttggtttattcccttactcctagtaacatttacatcccaaaggactgaaatttcagaaatgaaggctggagatagaaaattgcttccaaatacatgaaaagtggctgtatttatacccctgtacagtttggtctgagatttctggtatactagctaacttctaaatatagactccagcaatgatttatggactagatcatatttgcaatcccttacccacctgttagatcacttgaaaatcttgttatagcctatatcatacatctcatcccatccagtcatcctaaaagaacagtgtagacctttctataacaatgaagatcatcacttgtgtacttcttgaatgtcaagcactgcactaggcactctgcatgcagtgactcactaatctcataagcaaacagttctgcccattgtggtatgcacattgtgctcttcaaaacttttgagtgccagttatatggactactaggtgagtggtactccttgcaaatgtacaatgcccaacctacacagtggcataaaggtaggtattattggattcccatggcacagaaattgaggaaactgaagcgtaaaagtttaagtgatataggtatgtcaggaaaaaaggtcttaatcactgtgttatactgcaccctacattttcctacagaataatgttgagttttgataccttaaaacatacccatacttgcagacacttcagatatatctatacacaagcactcagaatgcagaaatggcctaggttagtagattacccaacaacaactatctacttctcaagagtgccccagaataaaccaggacccagaagagtcctgatgatcctaagagacccctcaaatataagaacagctccatagattagattatggaacgaattacccatgcccacctaagatccctaagagccaatacatacatgactaatggatttaaccaatacagtgccatggctgacatcaaattatcaaactaattcctaaatgagtctataggtgctaagaactgatacatctctgatccataaccatgtccagtacgaatttggacttagctggaaatatacactgaatacactttgcatttacctggagatgcacactcatcatgcaatacttggtaaccaaatttccctagattgttagttcttccataagcccaaacgtaactcttattcagaaaggtaaacactgtagagttcaagcaggttccaaggcagctctgcagctgataagccacagaaccttttgtgcagcttctataagagcaatccatcagatggcatgtaccatcactaccctacacagtaagttctacttcagcacagtaggaatggaccatttctggagtctatttgagagccctttcatttatctcaatttttactgtttactgagtacctactctaagtctaatactagccaatggtatagcactagccaatggtatattgaaatgaaagtgtagcactagccaatggtatattgaaatgaaaaggaatagtccctgtcctcaaagaacccacaggaaaaggaaggaggaagatgtaaaaatagataaatcctaaaacacatagtagtgctgacaaaatggtgaaagagcaattagctctgcctgtgggtgggacaggaggttggagaaagattcatagaaaaaaaaaagtgacagtactaatgggtcttggaggacaagtaggagtttgcctagttaagaagctgaggtggagagcaggtgggagaaagctgtttcttgctatataattaactgcaagagcataaaaggaaattttcttcctgctttcattatacttgtgctttgtcctcccttgattatattttctttgagtttaaagtaagcaatcaggggagattcactagaatgttatttggattgaagtggaatggtctgggttcaggtagaaactattgctatttttaaaatatttttctgggtccattaaaaaatcagctgcaatatcatgacttttcaacagttcatgttgtgaaaacatgagatatttttcttcagaaaagtgtaacttgaaggtcacaattaaattaaacatcaacatttattaagatcaagttaatactctctgaaaattagattactccccccagtgtgtatttaaattgacagctggtgactagggtaacgtgttccacattgttgcaccatagcaacatagaaatctttacagaatgtacaatgattgctgaaatggtgattcctgagatcttttccagtaaaccccatgagctgaactacttcctaaacagcagtgtcagaagtgttctaaactacatggctttatagagaactccagagctacctcctaaatctgaacaattcctgtattatgatacaataatgtactctggacccaatttcctcatcagcttaaagaaagagaaaaatactaagatgtattacggtagaggaaaaataagctagcacatatttaggtaaatcatatatctaccatgtttaatactcatagacttcacttaagaagactctagggctgtcctgagcacagttggtccatcgcctttgtatctgtcttatcagcagtctactacagtctctccaaagaggagagaaacttatgtttcccacatatattctgggtagtactagcctcgacttctctttctacagcacatccttgtgctcatgcaacctctagccctgctgacaatagatgtgtgaactcaatttcatgactcccattcatctgatcagagttcacactcagaaaagttgaagaaaagcatcttttaacactgtcatcttacactcattacagctgaaatcagaagcatcgcactggaggaaacgttgaccaaaatcctgtttgctgttcattcagaaatgttgcttccccagaacttctggcattcaccttgctaacactgactacttcttcaaatctgtaatatttgctgtatgtctagctggatgttttcatttccaatttcatcctaaggtcaaaatcacacacttaccccatcagaaccagcaatgatctgttattatccagtccaatatatgaagggtgtcttcaaacagcaactagagttgtgcagaatggcttattaaagactacatgcttccggccaggcatggtggctcacacctgtaatcccagcattacagggaggctgaggcagatggatcacctgaggtcaggagttcgagaccagcctgaccaacatggagaaatcccatctctactaaaaatataaaattaaccaggtgtgatggcgtatgcctgtagtcccagctactcgggagcctgaggcaggagaaccgcttgaacccgggaggcggaggttgcggtgagccaagattgcgccattgaactccagcctgggcaacaagcatgaaactccttctcaaaaagaaaaaaaaaaaaaagactacatgcttcctcataaacacctgggaactggaggggcaggatggtatgcattgataggaaatgatacaaatgataaatgaacaatgtctaattattcaggcattgctcagactcagagacaaaagcaggaaaactgagagttagggatgaaactccatcctcctctaaccctattgtgcctgtgtactgcagtacatattaaagtaacatcaagacctatttttagacttctgcaattccacaggcataaatcattcctgtaccacaagtcacctttgagttggcaatgccaagtttaacattttgcagaatcctacaatataattgaaagcaagtgatatttaaaatgaatagtgataattttaatagaataaaattagcctaaatatagcttgtttgagggaatttattgagtaataattaaaaggaaaagtgacaaacgtgccatttagctaatcctatcttcacaatagctttcacagttgaatttggaatgctgttcttctgaagcaaaaaaaaaaaaagctaatgtaatggtctttttctttttacataatattgattaaccctcagcgattttagacaccagggtttgctctgaattgcgcatctgattaaagaaggaaaagcatagtacaactaaagtcacaagctggtcaaagtgttactttttatattagcccgtgtcttttgttgaggagaattaaaaacaaaatcttttcccaacccagaaatcttatccataaaagtagcaagaaagaaaacatttttaccattgaataagcattaaaccaaaatggaatgtgcatcataggtaatctgcttagagattccagagaatgaaagaaatctcactcttgtatacagccacacagatacaaatcattacatacatattttcaagataagcaataactagtcctcaactaagaggacttgatggtacaatttgtcatgcacgcttcatcctaaatttacctggtaatcggggtgaccatcggtgtaagctaactggctttctctaggggagagcaaacttctcatctctttatgacaaggtgattttgaggctcaagtttggctcctacgtctcacagaaactgagagattgagttgctatctccctggatgtttacatttcaaaacgttggctgccaagtccttgagggggtaaactgacaaaaagtctatttagttttcaaaaggatttacatacatttcaaagagaggagaaagtacttataattacaagtttcctaaagtaaaggaagggggaaaggtctcccttttttttgttttgttttgttttctacagagagaattaagcctcttattttcaacttttatttgtccttacaccatacaggtttggtgtgattaccataatgcaaactcatttacagaagatatgtgactgctccgagtccccagaagagaaaatcaaaaacaaaaagaacaaaatgaaaatggtttctaaaccattaaatcagcacaaattaatatgtcatgccaaaccacatgcattatagactgcaatgattattgataatgtatttcaccagggggaaaaagcaaattcttaataagcctttgttttcctgcctgtttctgacagggatgatgatttcatttttaatttgttcagaagtaagtttataatgataaccaaagggaaacaatttgctcccctgtatgagattatctatagtatcattagccattaaaaatgtattagattgagtacaaaggggagttttgtattcatctaaataatgcatgttactctaccaaatacaaaatgtataacagagatgagttaaatgagtcaacttaccaaaatttcaaatcagtgctcatgttagaacttatttagctgatacatttggctgatgacgcatcccagatacgtagttcaaactatttaatgaactttctacctatatacagtaatttcccactaagtgctctgataaagcaccatctaatgttagcattaagagggatgtgtaatacgaatcaatagccaaataaaacaaaaccaccagaagtcagaaggggataatgcagagagtaatgctttctgatgagacctttctttagagggcaacatcaaaaggaatcatccagcgtctgctgccattagcagatcacatgcaaccgttaggaagttgctaacagagttcctatttaatgaaaaataggtgcactcttagctcttgctaactgtgtttcaatttatcttggaaagtgctacggtaaaaagaaatgtcataaagaaaagtataggccgggcgcggtggctcacgcctgtaatcccagcacttagggaggccaaggtgggcagatcacctcaggtcaggagtttgagaccagcctggccaacatggtgaaaccccatctctgctaaaaataaaaaaaaatagccgggtgtggtggtgggcgcctgtaatcccagctactcaagaggctgaggcagaaaaatcgcttgaacctgggaggcagacattgcagtgagccgagatcatgccactgcactccagcctaagcaacagagtgagactccatctcaaaaaagaacaaaaaacaaaaaacaaaaacaaaaaaacaaaaacaaaaacaaacgaacaaacaaaaactataaaggtttaaggcgaacactaaggagagtcctaaattcagacgttatccaaaaagttaactggtttggggtttctgggaaaataaagggagaggcagaagggaagggatgcttcgaattcctgacttgaattttaattctgtcaattctaaaatctgccctccaatctgatgtgtttggcaaattaaaagaaagcgtagaaaaattgctatagatgacactgtggcctgcttgatgagaatctgtagagtaacagtaaacttttctttagtatactcccctttaatttacatgaaaagagaagctgtttctccaacactcgcccctaacatcccactgtgaagacagctgccttatttgcctttcagcaaattaaaagttaaaatagcttcactgtcaggagtagcagcagcaattgaaagacttgtaaaagagctcattttactgcaatagagcgttctgttttccaaaggatcaccgtaccttttttttattattatttcagcacagtcttcgaagaaatgacacccttcctctattatcaccctctctgctgttccccctgttgacataggtcaagacaaaattccaaaagcagaacgagaaaggttctgctttcttaatgttcctcacgcagagttttgatttcattttcttatattgttaagattcacttctatctacctcccagtaatgaaagtaattaatagaagttaaacgtacaacaaaaatgcaggtcattctctacttcagacaaaagtgtaaaatatctctggtatttctccacccacccgccccccaacccactcccacatgcacacatacacttttttaaaaaagggatgagaatggaggaccaatcagagttgataaagctactggaagaactatatacatcatttcctcaaaatgccagaagagaaaaaaggaaaaactaccaaagggaagagcaaataaattctaccagagtcttaagtttggcttctactctatttttccaaataaaccaaattctgtccccaaaataaaaataaagtagtgaactcaaaaacattattaaagccatattttcttaattttggtcttgtcaattttagcctagggacctcaaaagttaacttttccttagatatttttcagaattctgacttaccaaaatgagctaagattattttcttaagtaaggtttgcattcagaaaggaaactgaaatagaagatctggaagaataattatttaattaggatgccattgctggactttttaactcttctgtgttcattttttttagtgcaaattcataacagcctcctctttccttacttagcatagaaaaccttaccatttacttttagtttaaaatctcctggatgactgaaataagaatactactaaataaaatacaaattactgtagtatttgttactttaatgttattattagtatctgcaagaggccataaaaattatcttctttttcctattttgcttaatatgctgtaaagagtattgtctaaagaatttaattgtttcatttcttaccttttcatggcttttttaccacacttttaattcacttccatataaaagctttttttatatacactttaagttctgggatacatgtgcagaacgtgcaggtttcttacgtaggtatacacgtgccatggtggtttgctgcacccctcaacctgtcatctacattagatatttctcctaatgctatccctcctctagtcccccaccccccaacaggccccagtgtgtgatgttcccctccctgtatccatgtgttctcactgttcaactcccacttatgagtgagaacatgcgatgtttggttttctgttcctgtgctagtttgctgagaatgatggtttccagcttcatccatgtccctgcaaaggacatgaactcatcccttttttggctgcatagaattccatggtgtatatgtgccacattttctttatccagtttatccagtttaatgagcatttgggttggtcccaagtctttgctattgtgaacaatggtgcattaaatgtacatgtgtatatgtctttacagtagaatttataatcctttgggtacatacccagtaaggggattgctgggtcaaatggtatttctggttctagatccttgaggaatcgccacactgtcttccacaatggttgaactaatttacactcccaccaacagtgtaaaagcgttcctatttctccacatcctctccagtatctgttgtttcctgactttttaatgatcacaattctaactggtgtgagatggtatctcattatggttttgatttgcatttctctaatgaccagtgatggtgagtttttttacatatgttttttggccacataaatgccttattttgagaagtgtctgttcatatccttcacccactttttgaaggagttgtttttttcttctaaatttaagttccttgtagattctggatattagccctttgtcagatggaaagattgcaaaatttttctcccattctgtagcttgctggttcattctgatgacagtttattttgctatgcagaagctctttagtttaattagatccaatttgtcaattttggcttttgttgccattgcttttggtgttttagtcattaagtctttgcccatgcctatgtcctgaatggtattgcctaggttttcttctaggatttttatggttttaggttttacgtttaagtctttaattcatcttgagttaatttttgtataaggtgtaaggaaggggtccagtttcagttttctgcatgtggctagccagttctcccaacaccatttattaaataaagaatcctttccccattgcttgtttttgtcaggtttgtcgaagatcagatcgttgtagatgtgtagcattatttctgaggcctctgttctgttccattggtctatatatctgttttggtaccagtaccatgctgttttggttactgtagccttgtagtatagtttgaagtcaggtagtatgatgcctccacctttgttatttttgcttaggactgtcttggctatgccggctcttttttggtttcacatgaaatttaaagtggttttttctaattctgtgaagaaagtcattggtagcttgatggggataacattgaatctgtaaattactttgggctgtatgtatattgtcacaatattgattcttcctatccatgagcatgaatgtttttccatttgtttgtgttctctcttattccttgagcaatggtttgtagttctcctcaaagaggtccttcacatctcttgtaagttgtactcctaggtattttattctctttatagtaattgtgaatgggagtccactcatgatttggctctctgtttgtctgttaatggtgtataggaatgcctgtgatttttgcacattgattttgtatcctgagactttgctgaagttgtttatcagtttaaggagatttggggctgagacaatggggttttctaaatatacaatcatgtcatctgcaaacagagtgaatgtgacttcctctcttcctatttgaataccctttatttctttctcttgcctggttgccctggccagaacttctaatactatgttgaataggagtggtgagagagggcatccttgtcatgttttcgttttcaaaggtaatgctccagcttttgcccattcagtatgatattggctgtgggttagtcataaatagctcttattattttcagatgtgttccatctatacctagtttattgagagtttttagcatgaagggatgttgaattttatcgaaggccttttctgcatctactgaaataatcatgtggttttcgtcattgcttctgtttatataatggattctctttattgatttgtgtatgttgaaccagccttgcatcccagagatgaagccgacttgatggtgctggataagctttttgatgtgctgctggattcagtttgcaagtattttattgaggattttcaccttgatgttcatcagggatattggcctggaattttctttttttcttgggtctctgtgaggttttggtaacagaatgatgctggcctcataaaatgagttagggaggactccctctttttctattgtttggaataatttcagaaggaatggcaccagcttccttttgcacctctggtagaattcagctgtgaatccatctggtcctgggctttttttttttttttttttggttggtaggctattaattactgcctcaatttcagaacttgttattggtctattcagggattcaacttcttcctggtttagtcttgggagggtgtatgtgtccaggtgtttgttcatttcttctagattttcaagtttctatacatagaggtgtttatagtattctctggtggtagtttatattgctgtgggatcagcagtgatatcccctttatcattttttattgtgtctatttgattcttctctctttccttctttattagtctgtctagcagtctattttgttaatcttttcaaaaaaacagcttctggattcattgatttttttgaagggttttttgtgtctgtattctccttcagttctgctctcatcttagttatttgtcttctgctagcttttgtatttgttttctcttgcttctctagttctttcaattttgatgttagggtgttgattttagatctttcccactttctcctgtgggcatttagtgctattaagtttccctctaaatactgctttaactgtgtcccagagattctggtacattgtgtctttgttctcattggtttcaaagaacttatttatttctcccttaattttgttatttacccagtagtcattcaggaccaggttgttcagtttccatgtagttgtgcagttttgactgagtttcttaatcctaaattctaatttgattacactgtggtctgagagattgtttgttatgatttccattcttttgcatttgctgaggagtgttttacttccaagtatgtggtcaattttagaacaaatacaatgtggtgctgagaagaatgtattttctgttgatttgcggtggagatttctgtagatgtctattaggtctgctttgtccagagctgagttcaagtcctgaatatccttgttaattttctgtctcattgatctgtctaatactgacagtgtggtattaaaatctcccactattattgtgtgatagtgtaagtctctttgtaggtctctaagaacttgctgtatgaatctaggtgctcctgtattgggtacatatatatttagtatagttagctcttcttgttgaattgatccctttaccaatgtaattcccttctttgtctttttttatctttgttggtttaaagtctgttttatcagagagtaggattgcaacccctactttttcttttgctttctatttgcttggtaaataatcctccatccctttattttgagcctatgtgtgtctttgcacgtgagataggtctcttgaatacagaacactgatgtgtcttgactctttatccaatttgccagtatgtgtcttttaattagggcatttggctcatttacatttaaggttaatattgttatgtgtgaatttgatcctgtcattatgatggtagctggttattttgcccattagttgatgcagtttcttcatagtgtcgatggtctttacaatttggtgtgtttttgcagtggctggtaccagtctttcctttccatatttagtgcttccttcaggagctcttgtaaggcaggtctggtggtgacaaaatctctcagtatttgcttgtctgtaaaggattttatttctcctttgcttatgaagcttagtttggctggatatgaaattctgtgttgaaaattattttctttaagaatgttgaatattggctccactctcttctggcttgtagggtttctgcagagagatctgctgttagtctgatggacttccctttgtgggtaacccgacctttctctctggctgcccttaacattttttccttcatttcaaccttggttaatctgatgattatgtgtcttgggattgctcttctcaaggagtatctttgtggtgttctctgtatttctaatttgaatgttggcctgtctttctaggctgaggaagttctcctggataatatcctgaagaatttccaacttggttcccttctcccagtcacttttaggtacaccaatgaaacgtaggtttggtcttttcacacagtcccatatttcttggaggctttcttcgttccttttcattcttttttctctaatctcatcttcaagctttatttcattaagttgatcttcaatctcgtatcttttcttccacttgatcaatttggctattgatatttgtgtatgcttcaagaagttctcatgctgtgtttttcagctccactaggtcatttatgttcttctctaaactgattattctagttagcagtttctctaaccttttatcagggttcttagcttccttgcactgggttagaacatgctcctttaactcagaggagtttgttattacccaccttctgaagcctacttctgtcaatttgtcaaactcattctccatccagttttcttcccttgctggcaaggagttatgatcctttgaaggagaagagggattctgtttttggaattttcaggctttttgggctggtttttcctcatcttggtgaatttatatacctttgttctttgatgtcagtgatcttcggatcgggtgtttgtgtggctgtcctttttgttgatgttgatgctattcctttctgtttgttagttttctttctaacagtcaggaccctctgctgcaggtctgctggagtttgctgaaagtccactccagaccccgtttccctgggtatcaccagcagaagctgcagagcagcaaagattgctgcctgttccttcctctggaagcttcatcccagagagccacccaccagatgccagccagagctctcctatatgaggtgcctgtcgacccctgctgagaagtgtctcccagtcaggaggcacaggaggcacggagttcagggactcacttgaggaggcagtctgtcccttagcagagcttgagtactgtgctaggagatccactgctcttctgagccagcagacaggtacgttcaagtctgctgaagctgcgcccagagctgccccttcccccaggtgctctgtcccagggagatgaaagttttatctataagcccctgactgggactgctgcctttctttcagagatgccctgcccagagaggagaaaaatagagaggcagtctggctacaacagctttgcagagctgcaatgggcactccccagtttaaacttcctggcggctttgtttacaatgtgagggaaaaaccacctactcaagcctcagtagtgctgaccgcccctcccccaaccaagctcgagcatccaggtcgacttcagactgctgtactggcagtaagaatttcatcccaatggatctgagcttgctgggctccatggggttgggatccactgagctagaccacttggctccctggcttacgcccctttccaagggagtgaatgattctgtctcgctggcattccaggtgccaccagggtgtgaaaaaaaacctcctgcagcagctcggtgtctgcccaaacagccacccaattttgtgcttgaaacccagggccctggtagtgtaggtacccaagggaatctcctggtctgcaagttgtgaagaccatgggaaaagcgtagtatctgggccagaatgcaccattcctcaagacacagtctctcatggcttcccttggctaggggagggagttccctgaccccttgtgcttcccaggtaaggtgatgccccaccctgctttggctcgtcctccgtgggctgcacccactgtctaaccagtcccaatgagatgagctgggtacctcagttagaaatgtagaaatcacctaccttctgcattgatctcactgggagctgcaaataggagctgttcctattcggccatcttgcccaggtcccctcataaaacttttgtcatatatcaatgatttataatgtgtaacaaaattgtttaagaatgcaaaaattataatgtctcaataattgatgatattttatttaactaagaacaatgtttatatcatgggtcatgttgctaaaagacctccaattaccattgccaggcatattaattatgtagtcagatttaatatcccaatactgtggagcgtgtccatattcccattttacagaaaggcaaagtacatggccgaggttcacaaaggtactaaactatagggccagcctttgaatcagagtatacctgaatccaaaatccatacttttaaccattccttaatattaccaggcacatttatacaaagtctcactattatatttgtacaggttgcttttcttggtataattcatagcaccaagggtccccaaagattcctccaataactcaatttttattagtaatttttgtcatagctcttacatgggccatattctaattcaaggggctcgtttaattaaaaattgactgatcttatgcagtgtgactttggtcatttagaccaacattaaattctaaaaccaatgcaatatcttcatttttacatattttctcaaaacattgacctcctttgggtaatttcttccctataatttgtctattttccattttaattttaattctaagcctagaattttaattctaagcctagaaaagaaactactaagatcatcctgaccagaacaggtcagttatcaaactgaaaacaccaaaatttgcaccctttgcaccaaaattgtgtatgtctccttccccaggccccactttccaagtgtatgtatcagatcaactccatgctgcagcaggaggccagtaattcacactgcactgattttttttctatttatgacagcatattacagcgctatggtaagatttttaaagttcatgagcctctagccttggatcaagccatgccgcagctcaatctttttcagtctttgttagcagtgcacatcatgtctaaactaaaatatacggaatatagagtgtcatgtccaaatcacagtctgtaagctcaggtgggcaagaagtaccactttttgtatatttatgtttttataactgtgtgatgaaaatgtcatctcagtacatttaaagatgtatcccctcccaaccctcacacccactctcacctcccacagtcctgcttcccacggttgtgtctggtttgtaccagatggagggagcttacttaactgcacaggaaggagaaagtgaatctgattcgcaaactctatttatctgcagtggtatccactctgacatccagcttcctttcttgtccttggtcactggcccaagcaggtgattacacggtgttcctcaggaccatccacattagccccattacgtctagctggctcaacttcagtaaaatcatttgaccctgttgttctctgcatccttctgtgtggtctagcctcccagataaaggacagtcaagggaataacagaaagtcatatggagagaaaaaggaatcattaactaatctaggaaagtaacattttaaataaaattgaatattagttctttagtctgttactgaaaaaaaatgaaaataactggcaccagattttcacaaaatttggagggtgtgcttggaactctttgacttcaaatacgtacagtgtggctaacccaaattccactttgaagggacctgagaagtacctcaaacaagacagatagctatctttcacagcagcatacactgagatgcacgaagcccatgtggctacaattggaggagacatacctgaggcatgcatacacagaggaaagcctgtgtgagagccagggagaaaacacagtaagaccttgtggacagagaaaacgtagtggttctaaatataagcccacaatcattatcacaacgacagatgcttctaattacaggtgttccattgccattaaactgctctcatgtgcaaacctccataaagtatcttgtaggctctggcgtatgtggcagcagggatttatttatttaacagtggttaattttttcaaacaattaagaaggaagcctttagtcctcaataaaaatgacagggatttagggataatggcacttgcaaatgtaaaatttttcctctaattttgggtctttgctgctttctcacgtacatctgtgatgtacagactgtaggctttactgttgtgtcccagcagaacctagaacgggacctggaaaacagcagacactaattatggagttaagtcgtgggaatcacagtaacagaaatggaggttgtaatgggctgatctgtgttcctcctaaactcatatgctgaagccccagcccctagttcctcaaaatgtaaccttatttggagataaatgaggttgtctatttggccacttttatctatttggccattttaaataagttaaaattaggctgttggggtaggaccctaatccaccatgactggtatccttaaaagaagaggagacaccggggatgcatacacagaggaaagactaggtgaggatccagggagaaaatggccaactgcaagccaaagaaagaggcctcaagagaaaccaaatctgccaactcttgatcttggacttctatcttccggaaactttgaaatttctgttctttaatatcactcagtctgtagtattttgttatggcaaccctaacaaacagatgtgaataagtatctgggcttcattacaaaatagtatttacaaattctaaagactgccagttgcttttgtaagctgaaattcctactcgttttattggttagttcctgtgtttgtttggatcttgcatatgccctcattatattggcattgtgttatatttgcaataattcacaatagttttaattttgctattctagaatgcttccaattttgttttctaaatataaaaaaaaagtggtgcattttaggaactatgttttagtaaattagatatttagatctgaaattccacatattgactcacagtattcagcctgggaccccacatatttccaacagatgtgtttaggctgattatttaaatgctcaacacttcaaatgttccaagtatcttatctgtattaaaactggtttcagtactgtctcaattttttctttagaaaatatataaaatataatttaagtgagcaccaagaaaatgtagtagaatgagtcctatgtttccttttttatgtgatagacacagataacctgggaatgagttcttaaagctgtttttcttataacatacaatctaaacatgcattgataaataatataaaaatagcaacaaaatagagcctgccatgccaactcttaaaatatagctaaaaactgaatttccttaatattcatctattttgggaactagttcatctttttttcctctttgtacttcaggtgcacagaattggattaataataatccgtggcttataacatactctcagcattggtaattgtatgacccacttttatctatttggccatttttaataatgtgataagtacacatgaattttcccaaaacaaatattggggctctgattgcaacccacattcaactatgcagtcacctcatatgacatccctctgaatcttcagatttgaggcaataaccaaatttcatcccatactcattattccctttattcccttgctgttgtacacaaagaataattacatatatatgtatctaaagggatattttagtttttaactctataaaatggtatcattaattttttagaacttgctatttttgtgcagtattatattgctaaaatttattcatatttgtaaatgctgtacttcattcattttactactgtgtcatattttaatgtgaatataccacagtttattcatccactctcctactgatgtctatttagattgtttccaggctattccattccaagtggcaatgatgttaacatctttacacatatttttgttgtatatgtaaatgagttttattggatatctaggagtataattctgaagtcatatgatatatgaatgttcaatttttccaaattgtttaatgttttttaaaatgattgcaccaatttgccctccagtcagcgaagaacattcagtggacctatttcctctccaataattgacactatcaggcttttatattttcttccaaaagaacagtgtaaatttatgttgtattattatgtttctttgtgttttcatgatcactaatggatgtgatatcgtgtaataaacatctcttcatatgtttgttagtcatatgagttttctcttctgtgtctatttataacttttgctacttttcttactgatttgtagataattttttgtgctcttaacaccaatcctttgtccgttatgtagattgtcaactagtttgtgacagtacttctcactttaagacatctctttaatgaactaaagcttttaattttaatatagcaaaatatatgtcttttcttttatagttaacatgttttatgccttatttaagaaatatctttctacatcctagacctaaaaaccattcatctggattatctactaagtgtttaaagatttgcttttgatacttaaatccttaatctatatggagttgttttttcatgtagtgtgagggaaggacctagtgtcatgttttcatagacatttaatgaattatttactcttcaggcattgatctgtagttactggaaattattattacattattcttaaaaaaacactcccaaattttactacttacataaaattctaattagttatataatgttttcttaaatgaaaaaaaatttgcatagtaggagttgaggttaccaatactatcaaatacaatcagaatgattataaaaagaagagaaacaagaagatgatttccccgaagcatccccaatcgtctcaacaaggcatatttaaaaatctgttttgactaactggaacacacacaaattcacacatacatatatacacatacaccatacacaaaagtaaccacaatatgggaaaggcaagcataatcattgctccacatatccacttctattttcatttttgcattcctactatgacataatttgttttacctcatttttgtattagctcttttgaacgctgctttaaatgaaaccgaattaacctgtaccttatagataagtaggtcacaaatgaagaaaaggcacaccaaaaagtaaattaattgccacatatccactatttcagaggagctcttgtttctctgtttctgctccatcatggtatgactgcatctctgtaaaagcaaaagggtttggccgggcacggtggctcacacctataatcccagcattttgggaggccgagacggttggatcaccagaggtcaggagtttgagaccagcctgaccaacatggagaaaccctatctctactagaaatacaaaattagctgggtgtggtggtgcaagcctgtaatcccagctactcaggagattgaggcaggagaatcacttgaacctgggaggcagaagttctggtgcgccattgcactccagcctggggaaaaagagcgaaactccatctcaaaaaaaaacattaaaaaaaaaagtaaaagtgtttaatttccaaaccatttaacaaacatctattaaacatctactatgagaaagtgctgtgctagatactgtaaagaacaaaaatttgctccacaatataatcagggagccataaataaatctaaaataggcccatctatgtcgttccacaactgatatacccacaaatgttgactgacttcaactacgtctgtaattactaagcacgtaagaggatatggcattgtacatttcaatggtctcattaaataggcatttgtatttctttttaaagattccatttagtaatttcattatgtaggaaatttaaaatagaagcagtcaatagcggtaaaatttttaaacaacatccatttccagacatgcttcagactataatgtaaacattggcatagaaaatgttgaatattactaacatatttgatgaagacttttctccaaaactagagaagaagagaaagtaagaaatagtctttccaaactcttccttcgtgtggtatgtacagtcaaacacaactccagcctactcagttacttggctttaggtttccagctgacccaacagcatgaccagcttcacataaaggtatgaaaatctataatgcccactccaggctctctattttccagtctctcctgttctatctctttatgcactcctgcctttactccagagtctctagtggggtatcccatctaggccttccatttccaatggctgcattatggtttctttattattattattattatttattttatttatttatttatttttggagatggagtttcgctcttattgcccacgctggagtgcaatggcgtgatctcggctcactgcagcctctgcctcctgggttcaagcattctcctgcctcagcctcccgaataggtgggattacagacgcatgccaccaggcccagctaattttgtatttttagtagagacggggtttctccatgttggtcaggctggtctcaaactcctgacctccggtgatctggctgcatcatgatttctatgaactaccctaggtaagttcaatctctcctcacctcaaggttctgctcagtatcacattccctatgaatccctcttggggtcttccatgataacccctacctaatctcataaacatatatacaccaatatgaggaagttagaaagactttattcctgccgggggagtgagtatcatcataaggctttcaagtcagatatttaaaaagtatagtgccacaaaaatttgcgcttgtagtcagagacctcagattaagtccaaagtccacaatgatttgtgtgtaacattgagccagtgattcaactttactgagactcagtgactaaatctattagttatgagaaataacgaattcccatgaatgctgtcagaaattacatgatgtatgagagagtatttttaaactataacgtgatctaaagtataagtgattttcatcttatggcaatgattcaaccaccaggaaagatattaaatttggcatctctcaagatattctgtagtaataacctgtttcaactatgctaaggataggacagccaacaaatttgtgagaaaaagagataattatctaaatcatgcctctattcaatcactgacccattcatttgagggtaaaagcaaatgtaaggttcaggagataggacagtgaccaaggtagacataacccctgttctcatggagcttatattctgtccatggttcaaaacaactagaaaatgtgggaaagctgcaagcacaagcatgaccattgaattcccaggtgaacatcactcttcctgaaatcagtgtcacctttgtattttactgaaaccagaaagaacagagatggagcttagcaaattaacacaggaacagaaaaccaactaccacacattctcacttataagtggaagctaaatgatgagaacacatgaacacacaaaagggaacaacacacactggggcctttggagggtgaagggtggaaggagggagaggatcaggaaaaataactaatcggtactaggtttaatacctgggtgatgaaataacctgcacaacaaatccccatgacacaagtttacctatgtaaaaaacctgcacttgtatccctgaacttataagtttttttaaaagcccatgctatctgatttacctcaatgaatccgcctgtgagatcagcatatgatctgctccatcattctcaaagagcaaaagacaaagtagtctagatgaaacccaggatgttcataacgaaaagcctaatggaatatttctacacttgaaaaagtaggatatttccttctgttagagcaacacatcagctctttgaggataacagctaacactcaggctctaggtgctcctttaagcattgactttttatctcatttagccattacaactccaggtagtaggtactatcattatcgtgtggttttataaatgagggggaaataaggcataaagaggttaataacttgagctaggtcacacagttattttctgatgaacccaagattccaatgtattacatagtccatatatacccaccgtactgcactgcctctgtatagattcctctcaatgagtgattgataacatacaaagggctaggaaccactcactgttccatataaccccaatcaccacagaattcattctagggcactgggtacattgagaaacaccattcacactggcttggtgtgaactgcaccgcataggggtatgcagcacacaaacagcataatcccacactgtgacctgcagccccatcataaaccataccttcttttccatggcctttcttatgttgcttttctaccatggagaaccctcttctctcatctcaacatgcataaaaccagtcatcatctagctcatatcacccttgaagcttttctaggctcttccagctacaggtatctacatatttctcctctgaacacctatttcatattcactttatggacattttgaactactgcttagcatttagatacataacattttgtattttaccaaatacgcttatatactcagccacatttaagtttatcgaggacagaaaacagcttttattccctctctcaactgcatactctctctctatgcccacactccacacctcatatagcactagaagctcaataagtctgtttggatagttggtggactaattgattaatctattgaataaacattcacctaaacttaaataatctccaagagttgctatctcagatgtaggtgcacacacaatgtgtgggcctgtaaggtaatagactgaagaagggaataaaaaaaaaagctttcactgggaaattgccctaaatataaaaatcacaagaaatggaaatgtataagaattcaatctgaaaacttttaaagggagaacaggctaactggaaaagtaagaaaaaaaaagtggtcagatcttttcaggatctgaaaatcaaatgcttctcctcatcatttctgtcatttttcttcagaagatgtaatatatcccccacatttgaagtatatattaaaattcaaatggttaacactttatacttcttcattctactttctccctctctctcacacacacacacacatacattctgaaccctcccccaacacacacacacacacacctaccccacatattctcaaatctcccccaccacacacatacacacacacacacacacacacacacacacaccaccttttgagggagaactagttctaaaccatcaaaatcgctcctgagattggttcatgaacttgggctccctctgctgggtctgcagcagtacaacagacaagtctgtagagttaggaggttacagaacttattcatcaaatattctcctgtttaaactcgaatttaagctgactagcctacaagatgcaacaatttggaaacagaaaagatttagaagttggataaattagtaacaataactcaagacaagtggtttttaaaccactgcgaatcagtatttttgcccctgcttatttccatttgtagaagaatggtagaattcatcagagaatcgcaaagattgcaaagataatgatataaaactgtacagaaaaaaaagcttcaagagataagctctggattacatatgtatttgtcagaaataaatgcagatgagtatgaccaaaggtcatataaggtctctaagtaagatttctgaggaagttaaaaaaaaaagggagttaagaagtattactaaaagaatacaaatcaaagctgttgataacatcactgaaatatattagccaacccaagagtagagtatattgagcctacagtcacacacaccaagaaataaaagaaaatggaatcacaaagtgcattccacatttactaaggataacagaaatgtaacttatacatcaaaagggaaatagtaaatattgattgctgttaaaaggaaatgttatctctcattgaattgatttggtgtttattataaaaggagaatggttaaattggcctaaaacaaaccatcagaccagaaaaaaagaatgaaaatagatctaagacctttaaaaattaggaaattatatataactgtctgtaatattattttccttaagataggctagtattcaacaataaatacatcttaaatcaatcccagcgtgatcttgcagaatcgtcaaatacacagggaattggatattccacggcttagaaattccagtacagatattggcagaacctctagttactggtgtagccagcccatatcctttctctattgtcaaataatgcactgttgtaaagggtcaatcaagactccagcccataactcactacataatttgaaatagccagtgcaaaatgaaaatgcagggccccttgttcaaaaaaagtaccaagaatttcaaaacagtgaaaacggagcaggaacccaaccaagtcaactcttctaagcacagctcttttaagatgggtgatagtgaactttcatgtacatagaaagaggttggggaaaaagccaaaaaggattctatgagcacctgagttgtaaaacagacgttcactccctctgcagaattgtataccttttatttttttaaaaaattaataattacaggaatatgattgataggaattcacccttcccctctggagtcctcacccttagaaatatccagggactgactgattgaaaacagagcaggaaccaaaccaagcaaactgctctaagcacagctcttctaagtatggggccctgtgtgactacacagatcacatgcccatgaagctggcccggctctgccctagtttagttgaaggttagcaataacatatcttcatgcatccccaacctcagcattcacagacgaagacactcatcttaccgtcgtgaagaatttcctttcagagagacatctttactaaaacggttcagtttagtttagttcccaaatgctaaacggttcagtttagtttcccaaatgctcactgaacctgttaatagggcatatttgtgttctgtctatccaagtttggtatgagagacagagcacatgtttagagaacctaagataactcccgcagatattttttttcttttgtttcctgtgaggagtcgcacaacttaagttgttaaaacacaatcttcagcgtcgaactgcctgggttcaaattccatctccaccactgaccacctgtatgactttgaacaagttacttaaactttttgtttgagtctttctttaaactttctgagtctctgttaccactagcagataataatagtactactcatagggttgtttattgggatatactgaggcattatttataaagagtttaactcagtgcttggcatataataagtgaatctgatattatcatcatataataaatttttttcgcatatattagaatccagatcacggaaaaccagctggttgtctgtgggccacttggcatttgaaaaccagttgtcttagtgtggtttaatggattattcgctataaaataatttgaaatatagctccccatattctccatattttaaaagtctttattaattcattgattttataaacatacattgattctctactcgctgacaagcattatgctgaatagtagggatgaaaagatgaaaaagattacctttctgccctaaatgagctcaccaaccagacacttaagtggataattttaatacaatgtgccaagtgcatcagctgttgggagacaattctccatgggtggctcccatttctgcactttccaagcaaaggcattaacatatatttcgttccagattagctgttcaggaatgtttttatgtcaaactgccttggaaggtagaaatagtgtctctttccagggcagaaggcaggtttgttttctcactaggataataaagatattttttctttccagggtaaagtttgagcaggtttgctggcatccttttgaaaacatggaggtttccaaagtttgagattcttccgttgtgccacaaaccccctctatgtgcatagaaggggaaagttgatattccatgctgagagaatcaaggtatgaaacagcatagtatgaatgcataagtataaacgatgcagtaatgctgacaaattagagatgagatgagaagagggaagagatgacgccggagagccacagaaggacagaaccttggggactttacaggccaggtataaacttacttcataataatcatttagctaacaattttacaattatagctcttgaaaagttatgccagtttttgaacaaatctttctttttcagtagagaaatcttttcccccaagatccactaaataaatacacataagacatgatatagtaatattacagtttcagggagacatggtcacccatgtacttgactagccagagaatatcttataggacacatttgaattaaacatcacatttggatgaacccaaacacttcttaagtaagttgaaaagaaagtatcagtctattatacatatatgtatgtgctagtttcatcatgggtttatgtattactacatgtggtctcaagtcaggcctttattttgccctaaaggtatgctatcagttacaaagtaaagtttgagtgcaaggttatcagaaacccaaaaaggctgctgaaggattggtttagaaaacgggtcagaaggaagattgcaccttccgaagaatgattcaattgcaccccacccacctccatcattccctacccactcctaagtctttcctttctccattggcaggtataataaacctttattttttgtagaaattggacttacttatttttgcattcttgttgttgagttatatacactcattttcagtattgaattgctatcttttttctgtgaaaactggttcatcttaagttgtgacaaaatccattataatttttcttattaaaattaataaaagtttttacctttagtttttcatttagcaaaaagtttttcagaaatgaattaaagtcattaatgggggatggacgtactttgaacttcacggtaggctttgaggagaccatgaaggtcttaaacacaagggcttgagcaagttatgagccagtgctcccaagtcaaaatgcctggggctaaaatgtgtctctgccacattctaggtatgttacctagagcaagtttcttcttgtgccttgtctttcttgtctggatttcttgtctgtgaaataaaggtaataatagttctaatatcatactgctgtaaaaatggaaagatttagaaaaataccaagtacatagtaagtactcaattaaatgttgtctgctaatattattattttcttcacatttttagtgtctgtaattcacactgacagcacagtggggaacacatttgagggtatcaagaccatcaagaaagaaatccatgggaggcacaatcaaggcaagaaaaaaaatgggtagggaataagaagcaagcatatggtggaaaataatgtgttttattttggacatgttgcgattaaggtgcctgagtaaaattcttttacttctatctcagcagtttgttcaggtcaattttatcactgccttctaggacaaaaaagattaagtccaattaggattatggtttgagatagaaacagaaataatataggttcaagaattttcattgtctattcgatgttaatctattcagggaaatggtcctagaagccacatgcttgttattgttaactgtgacaaaatcaatgcactggttttgtactcagataattcatttccttggaaactcagaggttgtgaaacaaacataaattaagcttgtgtttaccctgcctttcccaaagctaattattcaacatagctgagacttaagagtttctaacagaaagggctaaaaacaaatccaggtaaagaacaagaggccagcacaggtgtaaattgctttcatgcttatttagccttttaccacgtatatctccccaccactcctgttccgctcaccattctcagtactgccctctccccgctctcccttccctgtccctgacatctctttccatagctgtgcaggatggcaaggactattcataattcatgtttatgccccttgttcccagaatagcatggcacatattaggtgtttaatatgtgcttagttaaaaaggaatcattgttgcataaagccacttcctgatgataagctccttaatcacctcataattgaaaacgtacttccgtggataagatcagggtcacataacaggcagtttctattgtgtaagtctgtatagttgtaaatacgatacattaaatctgaatccatgtgtgaaagaggttactgcagacacataaaattaatttcagtctcatgctttaaacttttattatttttcaaataaatcagtaaacaacatcataaaaagtcctatcttatttactgctctagcctgaatgtgaagaagacagtcctcggtaaatatttaagtcactgaccaataaatagattcctctggttttctacccagaagcaggtatttttcttttttattttcttggactgtatacacaaactttatctaaatggcagaaaaaatgtttttcttcttttttaggttctcctggtaacctaaaaataaaagcatagtacactgtaataacagcagtgctgagagaagtactctttcaataccataccacctattatttttaaaggagattaaaaactcattaagaaagatccagttgtatttccattctgttgtaatgtgaaaagtgaataattttgtctataagaagtaacaattctaactcaaataactgttatgacataagaatcaattgagcctcttcagataactataccacagcataacgtctctacccatctggcaatcaggaatctccacaaaccaacatttctgcagttcaccgatacggtggtaatgaacgttgacaaagacactgaagcactgtaagatgctaaattgttatctaaatcaccaaaaatgctcactgtcatcttgtaattttactaaatcctaatttaattttaaaaaatgttaagtgcagggtagggtctctcaaattcagaactactgacattttggaccagataattatttgctttgaggaccattagtgcacagtaggatgcttagcagcattcctggacttcacccacgaaatgcttctagcacctcttcctttcatccccaggacagtcaaaaatgtctccaggcattaccaaatgtccgctatacggcaaaatactatctgtggtgagaaccactgctgtacaggttataatgtgtggcaactcttgaagatccagaattctaaaacataccatttctcaaccattctggataaataataagttttcatgttatgttttagtagcactccattacccagcatatcagattaacccataaatcccatttcccagttataacaatgataaacataaatccaaagtacttgctctattcaggaacttaactttcttaccttttagcagctatttttaacagtaaattataagacaagggagagttcctctggtaaattgctttcatcttcccaagtgactggaggcctgagggactgtacaaccatagttgcagcctaacacataatgtcccccttagcattttcctttactctccgtaaacaaagtaattcacatcttttcggctgctatcaggaagactttagactttctcttgctgttgcagaaactcatatgaaggaacaaattttgcagagaaggaaaaactttatatttttgttcaaaattaaagtaatgaaattgaaatacacaattcaagggggtaaggaattagtggatatattatattaatataaattaatattgcaaataaagaaagaccagttatgacatttttgctggctaacccgctccccagggtgtatgggggtagggaaatgaatgaaaattagtgttccttattatttcaactttgtgactattcacatgtgttcctcttttcgtttcactggacatttcctgagtacctactatgtggcaggcactgtgctagggacattcacagcggttgacagtatttccacacatagatctatattacatgctccacataatggtcttctctaagtgatacttgaaattcactgacccatatttgatctgttttaagtgttctgattttcaaacacaatatgtttctttgagagggacatgcctatttttggacaagggtcaagaaagggagaagagaggagagaaaatggcatgttgaataacattttattaaactgtgaaaatctctttctgaacaagaaagcgaaaatcatgtcagtggctagcaaactgaaaacttgacaagtgataagcatcaacaaattgcttaacaaaatgttagctactgattacaatgttgatgcagaacggaaaaagccagctgacataaaataacatgttaaaactgaaaaccgcactaatgaaaagggacaatgctctatagctcattggcttttgttgggggtggggaatggcacatatgaagcaatgcaaaaacatacatggcagttcactggagtagctagaaattgagggcacaaaagcaaaatgtcagagcccatcctctgctaagtaattataaaataaatagatcacctacaaccccttaaactgtagggactctgggtggcatccacacacagagaaagaaaaaagaagtaacatttgcaatttctctacgcacttaaccttacccaacagcaaatagttagctcctccctattaagggctggatgccggggcagcgggttgctatgtataatcaattattttgttaaaacatttaaaaagtcctggaattacagggcttcaggcatgttacctgagtagtgttccactaattatctttgaaaaatgttttcaattgtgctcctgcaacactccagattggcttcccaggccatttccaagaccacttttgaagagtggccctgtgtgtactgcaccaaatacattataacaaagcaatagaaacacgatttaaaaaaaattaattcaaggaaacagacaaagtgttcacttgagtgtaaattttgtagcagtagagaaaatctgtttccactatctaaaatgaccattttttaatgttcttttttaatctctactttaaaggagtcagatatgtttgtataacttcagtctgagttagtatatcactgttcaacctattaaataagccaaaccactattccccattttttatttgctgtattccatttctatcctttcattgtttctatgatgactgtttcactagaaatttagtatttctgtcattcctattcacagcttcatggccaggtcagcttttgtatttgaaaacccttgatgttcaaagcatgcatttagtacacagcacaaaaataggaaatggtatgttaaaacaatgaacaagtgagagatgcctacacaaaactgaatcaagtcaaaaaaaaaaaaagaatttaaaatctacattgataagataaaattttcaacatgaaataaaatttgtatcacatttctccccaaattaacttcctttttaaaataaacaattcgagctcacattcacaaaaagttaccttaatctggatttttccctcagaaagcacttaacatgaaaatattaaactctaatcacttctatattaagaaaggcccacagttagcagaaaaaaaaaaaaatgagtttccaggagacactgagggtatctccccagtatctatttcctctctcctgtggcttacagtaaccaggcaatacaggtattgaccctatccccagctccaagagtggtctctgatgtgtctaaaccagttttttcaaccccactaaatgcaatagtccaattatataataaatattttataatggcctctctctatactaaatttttttaataaatacaattatctccacacattttttaaaatcaatacattgctcaaaataaaacaacgtagaaataaacaaaagtaatttgttttaaaatgtattttaatatgtaaatcacaatattgtagtcagatgcatacacctttatatggaattaccatgaagtgagacacctaaaaaacaggtgataaggcatgttgcacagataattcagatgccagatcaccctcccatctgtgatatgatttttcaaatgagcaaacaaatctcagaaaagttctgaacaaagtataatattattacaatacatccatagctacatttctggaaaattcagtgtatgttaaaatactgcccccaaaaatatattttgcagaagtctagattcagattatataaaattatatacaatttttcaccaatattgtgttgtcagtacaacattttcaatacaatattgtccagaagcacattccaagggaatgcagaatgtggaataattatttgtggtacaggcccatcctgtacattgcaagacctccatagcatccttgaccctcatccactatatgtcaattttgacacacaggcacccccagcattgtcacaacccaatatttcccacaaaattccatgtgcatcttccataattttccatgcacacacattcccaaatgttggtataactccctgttgacacactcccaaagactggtataactttccacattggatattctaaataactgggaatatccttgtcaccatggttgtttcagtaataaatatggaacccaggactaagcatgtcagtgtgagtattttcctggctccatgaaggtcaactcagtgagcacaaagctcaggacttataatgaaaattctggaaccctctttccttttggataatgtagatacaaagtccaaaactgggcaaaactaaatcaaagaagaggaaagaactaaaagaagggtagaaaaaaaaatagagagggagatttcctcaatcatcccagaaaccttatctccattatgtgagcaaacagttccgttaaatacgtaagccatattgagctttgtttttccattgcttacaaatgaaagttctcttatcttccccttgccctccaaggatacatgactcagggaaaagagcaagcaagatagagccccatgaaggcaaggaacttgaatacctggtttaattgtttgtccttggactgtagcatggtatgtgggtgccagtaaatattagttagttgaatgaatgaacaaacaaacataggcttggacaaataatcattgagcatataggcttgggctagcttcgtggctttgccatttactacctgagataaccctaggcaaatagcttatccattttcttacctataaaactggaggcagagttctacctgctcacctctctaacttcatctcacgatactctactcctagattattacactccagcaacactaacctctttgcaagaacctcaaacacctcactctcttttctgaggcatggcctctgcaaagaatatttcatctgcttaggacactctttctcttccccttcttatgcttggatttttctggtccttcaagattcaatttaaagtgctgcttcctccaccaagtcatccctgacaaacctacagcctttcccagattgctatcacaatactgttgatacaaactgaatatttgtggagccctaatacccaatatgatggtattagaggtggggctttgggaggtaattagggttaaatgaggtcctaagcatggagcacacgatgagattagtgcccttataaacagaggaggagaccagagcatttgcacatcctctcttcctctctctttccctctctctctccaccccatgtgaggacacagcatgaagacagccatctgaaaaccaagaagatggccatcagcagatactgaatccaccagcactttgaacttggaccttccagcctccagagctgcaagaaaaaatggttgtttaaggcactcagtctacagtagtttgttagcccaagctgagaaagacaactgatagatatcaatagcacttgtcacaatctacactttgtggctatgatttgtttccttgttcatctagtgtctctttcactagaaaggaaaatccatgaaggcagggagcacgtccatctagttaatccatcaccaacacctagcatataattgtcaatacctaatatcgaatgaatggttcctactacttctccagttaacttcatactcctcaatctctatattctctagctatataggccttattttaattcctcaagctgctattgcacattccattccccctgcctgaagccttctttcatcccagcactgtaacattacctactttcttcctgatctcatctcctttacctgtctaatttctactcttctatcagatcttagtttaacattgttctttttccagaaggctttctctgaccccaaatactaagttaaaaccccctactattcactgcaataattccatgtcataatactaatcacaagtactataataattactaaattacctcttttccatggtaagctctatggagtcaaggactgtgtcttagtcacagctgaaacacatagtaggtgctcaataaaacctattcccttccctcttttgataagactggtacctaaatctgaggttgtcaacaacatcctattgcaagagagagacttttggactattcccaaagtccaaagtctattcaagcaaagccacattcttaacaaaatctgactcctctaacttgatatcaagcaaaatgtcagttctgaaggactagatagttcaataaattgcacagaactccagtgacaggcatcgcaagattgccatcagatttatgatttgaaaactcaactactcaagtaaaaatctcttcatcacaaggttatagggccagcagagtgttactattacaaggttgaaaagattcagaaaattcactatagaaataaagggttatttgaaaataaaattaaacattagaaaaaaacaggtaataaaaaatagatttcacatatggtaaaacaacaaaattaaacaaggaaataggctttctttttagaaagcaaactcagagactgatttaccatctctgaattatttcacttatgaatatcatcagctcaattaagttagtaacaaagcctgcattgcgcaataaagtaaaaaaaaatcatattatgcaaaatgttattaggaaagcttaccttttggctggtcagtagacagttaaaaagtgaggattttcttattctgtgatgtgaactgataaacaacataaatctcaggagaaatcatacatgtatagaagaaatgcatggcttcttcaccctgattgacttttccctgctccccatgtgtctcaggagaagaatgctcttttttatgccagacgcatcatgatgaatgctgatgagacaatatttgactcatcactgcttagatggttattttgcatgcaatctttcaacttcttcatcaattcattggcttgcacacacagcagtatttggggtgcgattcctagttagcaggtgaacatttttgtttttaaattacagggattttattagaagaaaaggtatatttactttcatcagtttagattaagttgatccaagaatcaattaaaagatgcaataatcttcaaagttattttctttaatacagtgacccacaattgttgtgaatcgtttcatgtctatggagatacagatgagctaaatagatataaatctagaatcatacaacatgtggcagtttttgtcttctttatgattcttctgtcaaccctaataatttcagaggaaaatagatctgctttttccctctatgaaactatctcattccaatattcaaaaaatacaaataacagaggacaaaacttttcagaatataatttctcctaaggttttgggaaatcactgcacagaaaaaatgagctatccttgtaattcacaatggcagttaagcataaggtataaagacatccaaagctttttctgtaaacactatatacgcagagaagtttataattagcagtggttgagggaaccaaagacagaagatattgacaactgagaagccaggataacatcttctaaccacaaagtgttgtgtggtgaaatatttgttaagagaattagcaagagtaggcaacaatttctctcgcatgcagagagtggtatttagagtatagccattggctaagtaaagctttatagaacagtaattggtaatgtttggggggacatgcacccctttgaaaaatgtcataatctaccatttcttattcccagaaaatatatgcatatgcacagaatttttcataaaatttgaagagattccctgaggctctcaagtctgtccttagaactttcctccatcctccacccccatccccagcagaagtctctactttggagagaaccctcaccttaaacatgggactgaagcttacagggagaaaaaagtactatgctgttaggaatttgtcttcaatacaatcacacctatttagcagaaaagctcctgtttcttacccctgctacctcaaggacagatatgtagagaaatgtcctgcaccgattcttcctgaagagtcaagggaacatatttacagttcatgggcaaataaacttacactgtaaatgatcatatataagctaatgaggaattgaaggaaagtaatatttatgaagtatttaggtatgctaagccctctatgagctgctttaatacaaattaccacattaaatcttcacaagaaccctgggagctagttattattattcctactcaagaataaatggaaacaatggttccaagaagttaactaacctgcacaaggtcacactgctggttgaggatggaatttaggttctaactcggaattatctcattccaaagctcatcttctttcctttaccttctatttcttcatggctaagtttatggcatggtcatccactgtgcttggaaaacacgttagagcttagggcctttctcatggagtacataactaatccactcaaaagaatcccaacccctccccaccacctccactccaaccaccctgatacaaagcatcatcatctccccctggattattgtaatggcctcctcactagtcctgcagcttcctccctgaccctcatacagcccatactcaacacagcagccaaagtgatgctttaagaacaaaagttagatcacagcatcgctcctgtattcaaaccctgcaatggctctccaacatgctcagaataaaaactgcatgccttatgaaagcctacaaagtccaatttcatcaggtctcagacctgcctctctgacctcaccttagatcttcaaaatcctcctgtctagcctcattagcctgcttgatgcactcttcaattttgtactgcttatcccctctgtctggaatgctcttcccccatatctctatcacaaactcctcaaatcttatgtctttgcctcaaatgccgcctcctttatgagggcttccccagttatgctatttaaaattgcacatcagccaggtgtggtggcacccgcctgttgtccaaagctacttgaaaggatgaggcaagaggatggtttgagcccaggagttcaaagttacagtgagctatgattgtaccactgcactcctgcctaggcaacacagtgggaccctgtctctaaaaaataaaataaaataaaattgtgcaccaactaataccccaatgttccttattctcctacccttctttattttttccatggtatgtattatcatttgatatacctttaatagcactcatatgcttatgttctccttcttgcctcctgtagaatataagtttcataagcgcaggaattgttgcctgatagtttactgctatagttttagttcctgaaacaattccaggcacacagtatgtgcacaattaatgtttgatgaatgaataagtaaataaatggtcactggcactccaagtcttaattgacagaccaacagaacacactgaactgtgcagtcttctagagtctacttgcatgataactgctgtaataggagggctgcctctcaacactccactgcacgccaattaaatgcagcctgtgagtgtgtgcacagtccccagcaaagtttggcctcccctggtacaaccaaagggctcctgcatgtcatcttttcagttcagtgcaccacttaagacatctaaatcaatggaaacagaaacgttcattttaatttaaaatagcctttgcagaagaggtgtgagctttacattttaagcaagtttgccaactttatccttagttaaataataagtgccacaagaattaatagatttcatgccacccagagatcagaaataaggtgaaaaaaacagtttccttccttttccatggagtaattagatatataagtgaggacatctatggttttaagaaattgttagatatggttaaatgcttgggggcgggggagaggatgagaagaagaatcctcccaaagctgtttacctttaccaacctaggaaaagatcttgtcaatctctgctaaaaggtgtgttaggggaaaataaaataaagacaaataagcaaatgtgttttaatactcctgaaaaaactaatagtcagcaagatagtcagtattataattacttgtgctgtcacaaacagggcttccagcagtgcaaaatgagtacaccttactgaattactgaatgttataaaatgcttaagtattttgcagaattcattttccccatttacggattgtcattgacaaagtgaaataaaatgaaacattacaccccagagtgtcaactcaggttgttcttagtggaaaagcaaaatacaaaattttataatagaatgtgagaattatgcctaccatgttatagtttatacattaatctaatataaaatcaaacatagcaattcaaagaattaattaatacctcttctcctggtttgggacagaagaagggatactttagccaacatctgcaccagagaaacattttctccatttaggaggctgtgtgagcagtagcatgcatcttagtaacaagcattacttgaaccatagcatgtgataaaaagaaaaaaagactaaggccaacactttggggagaggctttcttattattcaaaaggcataacacattagagctgcaagggatctagaccaatttcctcactatacagacaagaaaatgggggtttggatttgagaagtgactcgcccaaggtcacacagtgacttagccaggacaaaaatcacgtctcctaactcccaatccaattatcttttcactaccatgtgggtactcaataaacattggtttctctttcttttaagcagcaggaggaaagacagagagaaaggacattgccatttattattgttttttgtattttttaatataaggactttagaaagacaataccaaagcggcaatgtgtattttatttccccagagcatgatgtgttcttgggtaaatgtgttttatgaagagatttgtcctgggaagttggcagattttactgtaaatattttaacagtttcctattatttagttgtgggattaaatttttatcccagctgccccagaccgatgtctgcaagttataagtggttttgtgagggagtgctggcaagaattatggctttcttctttaaagaatgttttggtagacattcaaagaagaacttctcctgtctgcaagaaatcagctctcagcttcttcagcttcccaccagcttcagagaactgctgtgctgcaggtcaaggccttctggtgctatccatatctggtgaccaagcaagacatgaggagtagaaaggcttagacagtttgaccaacgcagaagagctctgatgaacagtactcacttcagagctccctgacagtgatcaaggctttttcagacccacatcacaattcaaattctccctccacccaatatgcttctcctcttaaccttcataaaggttaatctctaataaatatctcataggcagaactctgcctcactgtctgcttccactcaatccaacctgcaacaaatgtctgcttggtttctcaggcagacactctagccacaagttttcagccagcctagggtggtgcccagttcatactagaaccagcttccccagggctgccaggaccatcagaagtaggttttatgtcctataggaacagggaaatacaagagactagctgatcaaagactataggccttgcttgcatcacatcaaaaagttagcacatggggtcaaattaaaacagccttgactgtagagagaacagatgagcccctggtagacaccagggaagaacccactgttcatgttttatcttgatcagcttctcaggatcaggtgctgtgctgagtgctttacatatgttgtgcctttaaatcctcacaaccaccttctgttctaaggcagatttctttatcctcattttacagttttaaaaatagtctcagagaagttaagtaaattgtccaaggttaccagtcagatcacagatgcctgaaataccttgaacaatgaacaaagttcttcattttacacagagaaggtgggcttaaagcccctaagcatctctgaggaggaaagttcagagagaacaatgactgggtttctgaagcctgtgtgttctgtctatgtagactgatcgtgtaattgacctatagcactgcgagaatggggcttactgcagtgaacagctttgcttttctctgaagtggttccagttgtttctgcttgcctcgaaggttccagttcctagcaccgttggtcaggctctccaaagaggtgcatgcagcttcaacctgcagaagctttacctgccatcttctatgtctctgttcccttctttgaggataaacctcagacttgctattcatgccattcaaacaaagaattttgcctgacattttgactgctatttcagtgtttaaattttactatacattgcagttcaatggttttgtcttttttagtgagtaatcttttgatttggctttatattattatattgttacttctgctttttaaaactttcctaaactgtaaacactaagagatatgcaagccaaacaattatgctaacagccatgccccaaacagggggagctgaatgactattttatatagttagttctgcacagggcttttctttatccctaaggaagactcctaggcaagccccagtaaacattaaattcagtcaactaagaaaaattgacagagccacactcatcactgatcttgatcatttgggaaaaccacaaacaaaatcttcctatggaaatgcattgaaactgtccctaacactaggttatcattgtttctgtaagtattaacaaccacgtattgagtgcccactaatgccaggcatcacacggtctcctcaccatccaacagggaagcacctttatgttcatatgtgctagctaccagtaggattacgttccccttcttataaatgaagaaactggggctcagaaaggttaagtaacttgccactttataagcttgtgatcttaaggaagctatttaacctatctgagacagttttgtcatgtatacaatgagaaaaataataactacctgagcctggtgtagtgcccacacccctaatgctctgcctggcccacagcaggccttcaattaacatttgttgaataaacgaaagtcataagaattgaataggatgagaattataaatactgtaagaaaactgactaggacagtgtgtggcaaatggtggctatgttattgtcatttcatagtggtaagtagttacaaatgcctatgttcctttcactccatgacatcatgtttcagatcatggcactgtaatgttttcagaaaaaaaactggagcctaactaaaaacatactaccacagtgacaattcatagtgtcttccatgcatgactacccaatattggccaatattgcagagcagctacaccacacttagaggagagagtaggagaaaagttctacccaagtcagatctttctattaaatgcctctgctttatctcaagcaaagtttcccatggtatttgctggaagagggtataaaagtctttaattaaattatgagaatcctctttaaatcttggtggcttcttgaaaaactccaatgaaaaagatccaccttttgtcaaagcagtgtgtcacagataatttctttaatgtttaatatttactggattgtaactatttgctgggcaatgttttaaccacctggtgcagattaacatctttaatccttatgagaacgctattatataagtactactattgttttcattttccagaggaaaaaagtgaagcacagagaggtcaaggaatgtactcaaagctatactgtgaataagggcttacccaaagttcaaatccaggattctacggatatcactatgctatacaacccctccatacctgcctttccaaacttctttgtttttaaggagacctaagcactggctaagtttaaaattttgcctagcaaggtttttcaacacggagatggctgcaacatgtagggttacctcccagcctcctcttgcaccagccatggccagataagaatccttccaagactaacagccttctttatctccctaaaaatgctaacccccttcagcagaagaatcccccatggatgagtagtcaattggagaaagtctcctaattgcatttgcaaattgacttgggaaagaaccaggtatcattaaggccatgcctgatctacaaagtaatcagtatacagagcttaggccttaaaactaattataaaacggaattttttcccctgctgaaattcttaaagaatctgaccagcccaaggactatctaactaagaactttgtttcatctataaaacctgtccagggtaacatccctagggacaccacacagcttgactccagcatgtgccattcatgtgatctatgtgaaggtagctggctagaccaatacagcccacaacctgagcagctttcagcagtagccctgacacttctaatggcagcctctgcccaccccccacaaccttattaaccaaatctcttcttgatgtcatctttcctatagaccctcagtcaaattatcctttagagtcttaaaattcggcagggtgtggtggcttatgtctgtaattctagcactttgggagaccaaggcaggtggatggcttgagctcaggagctcaagaccagcatggacaaagtggcaaaaccctctctctacaaaaaatacaaaaaaaaaattagctgagcatggtggcacatgcctgtggtccaagctactcgggaggctgaggtgggaggatcgcttgagccaaggaggttgaggctgcagtgagctgagatcatgccactgcactccagcctgggtgacagagtgagaccctatcttaaaaaaaaaaaaaaaaaaaaaaaagtcctaaaactctcatacgatgaccatagagttgatagttttccttctctgcaggaaacaaatggaactggcaaactgtgactattgcctcttgttcttaagtaagatctgtgtgtccttctctagaagatacatttcaatatagtacagagaatgagatgttaggcaacctcctgtaagaaacatctctgtccaaaattatgctaggttagtgttgaatatcactattgaaaagcagaaagtggcctgcctctggaaccaccactatagaggcatgcagtcatgactggatatcgttcctgccagttacttctgtcgcaggagagctcaaaaaagaggtaaggtcacctaagccccatgaaggaatgattctatccctccctccaccaaaaaaaaaagatccaaatctagttgtatatttgtggaaaaaaattttttcaagaaccagcacagagctgacaccattgtggtagtacacaaattgtggatacagaagcagccacagagcaactctactgatttgcctcttggggaattgttacatttcttttttgtcttaataaaaacattaagatacaaacattcagattatccaaaagaaggcacccttaatatttggcatacatttaaagcaatgtcccaggcccttaagtagaacccaacctatgtcctatgtcataggatgccaccatcccaaggctggcagttttttttattaaaccactgccttcccaggatggactggttgagaaagccttatatcccatttcataagaaatcggtctagtagttatgcctcaaccaaatgaacttgccttgatgtccagtctagcaatactgatcaatggtcaactacttgtaatcagttaatgtcaaagcttgtacttggtgaggtatatgtataaaatggattttacttttctccaaagccttctaagtggatgttcccttcaacaataatcaaaggtgatgatcatttaacaccttaggtagacaccataacttcttattcagcttttgtttataatagtttgtccaatctaatgttccagtcgcctaccaaattcaaagcttgtctttcccccatcactgtttagtttgtgctacatggcaggggtccccatccaccaggccgcagactggtacttgtccctagactgttaggaaagaggccacacaacaggtgagcggtagtccagagagcagtaccgcctgagctctgcctcctgtcagttggcggtggcctcagattctcgtaggagccagaaccctactgtgaactgcgcatgcaaggaatccgggatgcgtgctccttatgaaaatctaactaatgcctgatgatgtgaggtggaagagtttcatcccgaaaccatcctccgcacccccgtccgtggaaaaattgtcttccacgaaaccggagtctgttgccaaaaatgttggggaccactgatataagggacctaaagaagtggaagaaaatatattcatgaactcatcctcctccttcaccttggaatgaaaagcagtagcctccctctgggacattctcctccctgttcggagcctccgcctattcaggagaaagagagaagggtcttttattaatacttgaatggcactatctaccactagctggctgcggatgcccagtctggagaaaatatccaactcctcactctcttggtgaggcatgcacatgaattctctagctgattcagcaaggcatcctcgcttgacataatggaatttagttgtgacttaacctttgctagtgtgctatcaactcctatcccaagtgttataccccacagccttttgctgttggcgatacccccttgggtaggataccaggaaggcagcttaagcacaactattctttggtatctacataaccaatgaaaaattcatgcttccttccttgccatgccaaatgatgggaatgttggttactatgcctcctcttcaccctactctttcactccagttctccatttccccactggcataagcacagttctttgccaaatctaacatctatcctggagtaacagtttccccgtcatgaaggatccctcaagtttctgtgaagaggtttcttggaggccctctcatctcacctcaagaaggggaagcaccttaattctcccatccatatgccataccactgccctcctaaggttgctttgccttcaaagctttctcccctttgctgctttttttttttttttttttgacaggatctggctctgttgcccaggctggagtgcagtggcacaatcttggctccctgcagcctcgacctctgaggctcaagtgatcctcctacctcagcctcccaagtagctgggactacaggcatgccaccacaaccagctaatgttttgtatttttttgtagagactgtttcatcatgttgcctaggctgccacttctcctttaatcggctggaaataggaagtggtcttgggaaatgactggaggtaggaaggcttctggttcttaaccctgaatgaattgtatggctccctataacgatggctctcttaagaatgggaggtacttaacctctctgtccctaattttgatatctagtccctgtatcccaggcaatatgaaaagtgccatgcaacatcctgttacaaatagaaacacaatccagggcttttagaggcaaagagctaccttttccatgaccctgacagttctctggaatacacctgataaaaattaataatctcaagatatgtaagatatagcctctaacctgataatcttcttttgggagctttaaaactatttgtttgtatagagactaagatcctagagagttactccctcttggtaaagtttgggtcctttattaaaatatgaccactaatactggtataaaaatagacacacagaccagtggaacagaatggagacccctgaaataaagctgcatacctacaaccaactgatctttgacaaagtcagcaaaaatgaaccatgaggaaaggatactctattcaataaagagtgttaggaaaactggttaaccaggcacagaagactgaaactagatccatacctctcactatatacaaaaattaactcaagatggattaaaggttaaaggtaagtcctcaaactataaaagttccagaagaaaaccaaatacatatatatatatgtatatatgtatgtgtatatatatgtgtgtgtgtatatatatgtatgtatatatgtatgcatgtgtgtgtgtgtgtatgtatgtatatatatatatatatatatatatatatatatatatatatatagcaaatgcaacaaaaacaaaaattgacacctgagacctaatttaaccaaagagcttctgcacaacagaagaaactatcggccgggcatggtggctcacgcctgtaatcccagcactttggaggctgaggcgggcagatcacaaggtcaggagatcaagaccatcctggctaacacagtgaacccttgtctctactaaaaaatacaaaaaattagccaggcacggtggcgggggcctgtagtcccagctacttgggaggctgaggcaggagaatggggtgaacccgggaggcggagcttgcagtgagccaagatcccgccactgcactccagcctgggcaacagagcaagactctgtctcaaaaaaaaaaaaaaaaaaaaaagaaaccattaacagaataaacagacaacctacagaatgtgaaaaaatatttgcaaattatgcatctgacaagggactaatatccagaattaataaggaacttaaaaacatcaacaagaaaaaaataaccgcaataagaagttggcaaaggacatgagcagaaacttctcaaaagaaggcatacaagtgatcaacgaacatatggaaaaaaatgttcaacatcactgatcatcagagaaatgcaaatcaagaccacaataagataccatcgaacgccagtcagaatggctattactaaaaagtcaaaaaaaagcagatgttggcgagcttgcagagaaaaatgtatgcttatacactgttggtgggaatgcaaattattaaagttcctgtggaaaccagtttgagatttctcaaaaaactaaaaataaaattaccattcaatccagcaatcccaaaggaaaataagtcattctaccaaaaatacacttgcacttataaattcataacagcactattcacaatggcaaagacatagaattaaaccaggtgcccatcaatggtgggttggataaagaaaatgtggcatatatacaacatggaatactatgcagccataaaaagggtaaaaccaagttttttgcagcaacatgaatatagctggagaccactatcctaagcgaattgatatagaaacagaaaaccaaataccacatgttcccactatcagtgggagctaaacattcagtacacacagacataaagttgggaacaataaacactagagattccaaaagaggggaaggaggaaggagggcaagagttgaaaaactacctatcagatactatgttcactacttgggcaacaggaacattagaagcccaaaccccagcatcactcaatatacccatataacatacctgcacatgtaccctctggatctaaaattaaataaatcaataagtaaaatatgaccactaagaaatgtagagacaaagggttttgtctcactaatcttgagtaaccttaaagagatttttctgagtaaccggtatactcaattggaattcagtccttctaatgccaatatgaccctgtctccaattaaaaaataatacatatgtcttaatgtatatgcaggtctccccttgttgaggtattcatggatttttgagacattccaatctaattgcctttcaagtttttctttgatcccattacctagcattataatcttaggttcacctggaattcttttctaggccttgcctaaccagtacctcagctagaatggaccacaccctcagcctgatccagagctaggccttagcacagacttacagcatttattaacgtatcatttgctttcagttccaagacaaaaagattcatgaacccactatgtattcttgatatgaactctagtaatattccttcaggttctttcttgtaattacttaagaatcaatatggataggaattggctctcgagaattaaaatccaggtcctgttcaatggtgtagaataaaggataagacatagatctaggcaatgctaaagcccttaaaaagagttttaaaatctgtgctctgcagagcctggggttcctcagaggtatcataggagctttcacagaggggggaaattcagaagtgaggctctccttgctctctctcccacattctgaaccgaaaggattttattttacatgctttatatatcaggcttctaactaagattttatatgaaaatacagttttgctgccaaaaaataaacatttgctatatgaatttccttaaatagaatatatatattctatttatatatatatacacattatatatatatatatactcttgacttatcaaatgagaataaattctgccttaaggagaagctgaacttaattttacaaattactatcataaaaaaagtatattaataactatgacaaaatataagcatcatttttaaggttcattcttcaatattcagctgtactaaatactttcctccaactctcactcagccacaaaaatgctttcacagactataatttaatattatgccttggcctttatcagaggttgatacaaggaactgcaatatgacaaacatttctgccttatttgtgaaattgctgttgaagataccatccatctcccttttataaagatcgacgcaattactctccttaaagctaagggacagaaaactcttctctttcctatttttgaaattccaagaaacctgtaatcccttaggtttgcctttagcctccagtaaactgaaagttaaatttagtgtttaagcagcaggggatggggcaggggtacattcagatgctgtgttttttgacccaattaccacccagttcttttctaattcagccaacatgaattgagtatttaggtgctaagcactgtgatagacgccaagggcacaaagattattaaaacaagatgctttccctaaaagagatcttggatgagtacctcttgttctttcattttattttcatgatctttctgtatatggacctttatttgtagcctatctcattcctatttttgaaaacagatatggtattagatacaagtaaataaaataaattagcatattctagaaaaagaaggcattgacttaaattcatctagaggcgtagataactaatactatattcttctctcttagcctcctaaatcatctcaaagactgagcccctcttccaacccatcctacacacaatcatctgattaatattctaacaagcctattctaatcatatcattcatcttctactcaaaaatactactgtcagtaccacacacattgccttcaaaataaagtcacaaaacagtagcaaacctggctgggcatggtggctcacacctgtaatcacagcactttgggaggccgaggctgttggatcatttgaggtcaggagttcgagaccagcctagccaacatggtgaaaccccatctctaccaaaaaaatacaaaaacttcgccaggcatggtggtgtgtgcctgtagttccagatactcaggaggctgaggcacaagaatcacttgaacccaggagacggaggttgtgctactgcacttcagcctgggcaacacagtgagaccctgtccaaaaaaaaaaaaactgcttcatccctcataagcacttatcaatggatggggctgggttacccattcctagactgaaataggcacatccaagtgttgaaggccttgtcaaaaaaaaaaaaagacagtcacagtaaatccacatgaactttcttctaaaacactaatttctttatttagccatttgggatcttacatatcaaccacataagttattaacattatttctcacgtctgttcaaattcacatcaccaccatcaccttcttttaggcaggaagggtattcttcttgccctttacaaactcaacaactggagcaaacccagatccgaggtcacctggctaatcagtacctatcttgcttgcttcctcctgatgtgcctctaagaagcagaatgcagcccatgctgaaggccacccacagtgactgcctgctgtccatgaaggcattcctcttgcgggttagtccttggttgaaagtctttcgccacagaggaagctagtgttcctagattttgtcacttgcagagaaacttaaaatgtgttctctataaaaaggaaggtcttctttactttcaatgtagaagattgcccggaatgacaatatatatggttcatttgcagtagctgatgtttgtgtagttatttagtgtcatagagaaaagacttgatactttatgacgagactttagtgccaatttagtcatgcaaatatatagtggcatagagacaaaaatcctttagctatttattctgattccaactgtaatttttccactgttcttgccagaaaagtgttagtaaactaatttctttcttccccagacttgtgtatcttgtacataaaatagaaatctctacttctaatcatgctttagtccaacagggcttctaagccatacattagaatagactctattatttaaagaagtatatttacggggttaagaatactaagaagactcaagaaataaattcttcagttatgtttcatttagctatcagatacagttacctagtgaactagtgaaacaaagtaatgttagcctttagaggtttatggttctagggaggaatagggaaaaccatggaaagctgtagtgcaaaatattttcaataaagtggacatttttgatttagtgtattcctctgaaacagcaggcccatctgtaaaatacacaacagaatgctattgctttgggaaatgtgtaagcatccttacactgcagtcaactctatctagaggagaaaaaaagatgatctctagaagctttttcctgccacactcattagagagcattttttaattacattcacattctcagatactgttttgtatgcacagtgaacaatgcagagaaaaaatttaaaatgaatatgattttctgcaaactactggaagaaatgtcagtttcttacacagataaaacagcacaggcataagaaaacccccaggaagataagtcaccctgacattcccaaaattcagaaattcactagacccaaatgacaccacgaaaatgtgatgaatcattcactccttagagattttacttatgcatggattgattgcctgtggcataaaggggtcccaagttctctggagacttgtaatccaaaattgtttagtctggatttgaaggatagacaagaatattttaacaatgttctcttttgcatgataatttatctcctgcttaaagatgtgtgttatgctattccaaaattcagggtcactctcccatagaagtgaggcataaagctctgatgggggcagtgaataattttaggctagttgtacacagctgcagctacttgcatgggtaattgcttttgcccaaatcaccagcattattgtggctctaaaagacatatatttaaaagccattgaagtgccaaatcatattacaacaatagagccagttctccagaaaatattcatgttttaattttaaccaatctccacgaatgtgttgagcccttgctataggacaaaaagctgccaaggtattgtgatacgttgatgtctagcatgacaaacagagaaagggtgttgaaactgcatatactaccggactctaagtttccatgatggaaaggatctattaataatgctagcaccaccgcctcacccagcttttggcataaaaaagacattcaataatttttttaatgaatgaatacaatgtctaattcccacaattgaaattggaaatttgcaagttgaaagcagaaggtccagctatgatgcatgagagtggctggtggtggctgtggaaagtaaggtggtgactacaacaaaaatggatttatctgctacccatgcaggtgtttgtcacacttgaactatcacatcccattattatattatgtgatataagacatacaagaagtggaacattattccttgctctggaaaatgttccaatctaattagacaagatttctgagaagaataataacaggaacatacaatcaaagtgccagtatcagtggtcagctgtggtggctcacacctgtaatcccagcactttgggagacaatggtgggaggatcacttgaagctaggagtttgagaccagtctgggcaacagagcaagaccccatctctacaaaaaaaattaacattaaaaattagccaggtgtgataacgcgcaactgtcatcctagctactttggaggctgaggcaggaggaccgcttaacccctggagtttgaggccacagtcagctatgattgaacccctgcactccagccgggtgacagagtaagaccttgtctcaaaaaaaaaaaggcaacatcaattgtgtgctataaataaagcaatgtcgtatagtggaaaagagtataggatgcggaataaaaagacatctttaagtcccaaagactgacacttaggtgctgtgtgctcttagtcaaatcactgaaactctagatataaagtttacacctatatatttagagatggaagtctcattatattgcccaagttggagtgagcacagtgtctatacacaggcatgaacataacaaaattatgttatgttatgttatgttatgttatgttatgttatgttatgttatgttatgttatgttgttttgtactagagcctcatactcctggaatcaaatgatcctttgcctcaacctcctgagtagctgaacctacaggcacctgccaccacacctggctaaataatgtattttattattaaaggaatgcatgtggataaacaaatgtgatggttatttgttttcatacaagaagtccaggagtaaagggctgctggagttggtttaatgatttaaggctgccaaggtcatagtcactagagttctcttgatctttccctctggtcccaagaaatctataacagctctaactattgtgtctgtgatatatgaaggaaggatgggggaagcaggagaataggggagaagcttttttggaggagacaaagctttccagatcagagtcaggcttccactaatagctcattggctacatttatgtcacatgctacccctgataacaagggaagttagaaaatgtaggctcttaaagctagacacatttctagcccagttaaaattagggttatgttagtacagaaaagaaggatgggaatgaataggccactaatagtgtctttgtcaatatttagagagttggtgtaaagaattataagagataatatatttgaaagtgttttgttaaccataaagttaaggaagtcaatttatttttgaatgcactaagtgttataccattttcacgtgcatccggtatcatgaaaaagacctttaaataaaacatttacgataatttttctaatgtataaacattacctaatatatgttagctcacacacatacacacacacaaacacacacattgctgactcaaacaggaggagtgactttctttttcctgtatattttagacaatataaattaaaaacatatgtgattcacagcattccccatgacaggtgaaataggacaaggtgcccactctcagcactcctcttcaacatagtactggaagtcctagccagagcaatcagacaagagaaagaaataaagggcatccaatcggtaaagaggacatcaaactgtccctgtttgcagacaatgtggtcatttaccttgaaacccctaaagactcctccagaaagctcctagaactgataaaagaattcagcaaagtttccagatacaagattaatgtacacaaatcagtagctcttctatacaccaacagcaaccaagtggagaatcaaatcaagaactcaacctcttttacaatagctgcaaaaatatatacataatgcttaggaatatacctaaccaaggagtcgaaagacctctacaagtaaaactacaaaataatactgaaagaaatcatagatgacacaaacaaatagagacacatcccatgctcatggatgggtagtatcaacactgtgaaaatggccatactaacaaaagcaatctacaaattcaatgcaatccccatcaaaacaccatcattcttcacagaattggaaaaaaaaattctaaaattcatatagaaccaaaagagagcccacatagccaaatcaagactaagcaaaatgaacaaacctggaggcatcacactacctgacttcaaactatactataaggccatatcaccaaaacagcatggtactggtataaaaataggcacatagaccaatggaacagaatagagaacccaaaataaacccaaatacttacagccaactgatcttcaacaaagcaaacaaaaacctaaagtggggaaaggacacccttttcaacaaatggtgctgggataactggctagccacatgtaggagaatgaaactggatcttcatctctcaccttatacaaaaatcaactcaagatggattaaggatttaaaactaagacctgaaactatgaaaatcttagaagataacattggaaaaacccttctagacattggcctaggcaaggatttcatgatcgagaacccaaaagcaaatgcaataaaaccaaagataaataattgggacttaattagactgaagagcttttgcatgccaaaaagaacagtcagtagagtaaacagacaacccacagagtgggagaaaatcttcacaatctatacatctgacacaggactaatatccagaatctacaacaaactcaaacaaatcagtaagaaagaaagaaacaatcccatcaaaaagtgggctaaggacatgaatagacaattctcaaaagaagatatacaaatggccaacaaacatatgaaaaaatgctcaacatcactaatgattagggaaatgcaaatcaaaatcacaatgcgataccaccttactcctgcaagaacgtccataatcaaaacatctaaaaacagtagatgttggtatggatgccgtgatcagtgaacactgccacactgctggtgggaatgtaaacgagtacagccactgtggaaaacagtgtggagatttcttaaagaactaaaagtagaactaccacttgatccagcaatcccactactaggtatctacccagaggaaaagaaattactatatgaaaaagatacttgcacacacatgtttatagcagcacaattcacaatttcaaaaccgtggaaccaacccaaatgcccattaatcaacaagaggataaagaaactgtaatatatatataatatatatgatgaaatactacttagccataaaaaggaatgaattaacagcatttgcagcgacctggatgagattggagattattgttctcagtgaaataactcaagaatggacaaccagacatcatatgctctcactgatatgtgggagctaagctatgaagacggataaaagactacaaatacggtgcagtgtacactgcttggatgttgggtgcaccaaaatctcacaaattaccaataaggaacttactcatgtaactaaataccgcctgtaccccaataacttaagggaaaaaaatttaaaaactatatgtgattcactatggtctataatttaaggcacagtataataggattttttttactctttgctttatttctttaagtacattatttgccttggatgactaaattttgtctaaaattgggtatatatgcccttagacctcatttgcaagtgataaaattaaactgtaattatgcagtttgtgaattaaaatgcctgaagcacaatgctcttcaaaaaatgaaggacaataataaaaaatgttaagtacaatttttttacaattatcttcaatatccaacaacatataatagacttattgtgtttttttctttcaagaagcctatgaattttttcatatatcaaaaaatgatttgggaagaggatttttttttatttaaaaaaagtcaatgtaggaaagaagaaactaggaaaatattctgtctctttgacaatataattacagtgccctatgaagaaagaagttggcacagtaatctgatttttattgaataccaaagcacacatgaacattaaaatgcaatttgaacatgcatggtgtcagagtagtcaggaatcttaaggagcagattgtttggaaagcatctgaaaacaccttatcttcacctacagctcaccacggctgatgaaccactctgcggtccagtctgccctacctggctccacctctatctacctcactgagtcacaccaggtcattcccagatcagggcttttgcacttgctgtccgctcctcagttttctacatggctgtctccttggtattccagtgctggctcaaatgtcacctcctcaccactgtgaccatcctgactaaagtagctaacatcctccagcccctccttccctaaacgagtcaccctccatccccctgcttttatctcttcatacaatttaccattatctgtcatatcttaactgggtttatttgtgtctcttacgtcttcccgctgattagactataacctccacaaaagcaggggcactgtctgtcttgtttagagctctatctccaaatacatagaactgggttcatcacaaagtgcaccataaatacttgtcaggtgaaaatttacatatctatatgtcttatatataaataatacatatatgacatttctcattcttatgtgactctgatagtcataggttaaatcacattccctataaacttttctggaaaaaaagtcaatacattcatggtttatcccaaataaattctttaaaccacaatcaacattctatactttgtataatctaaagagatagagcctggcacatagtagatctcaataattatttgctgaattgcattaattcaaattttgtttctatttaatatttaaatatgacaaagtaaaaagagaatatttggaaaggaataagctgttgtatataggtgtatatagtaggcagtatctcagatcataaatgtaattcttcctcaaataatattttgttaaaacacattcttttggtactagtctaaaagggagagagtctaaatacctaaagaaaacagctaaacagctgacccaggtcttctcctggtgagttcttcgcaatttattagcacgtaagaagctatttttccagatgctgtcaattctcaatggaaacagtgtaaagtgagtcctctcaaacctatgagctaactttcctagactaaggactcttaaattgctgtatcatcttaaatcttcattgcaaactttggttctgttctgttccaagttccttcctacccagcccagtgattgtgaaacagttgtaaaaatgtaactgatcttaatttgaacaagtttcttttttaaaagcaaatgtccattctcccttctttagtttccaagacagtatgggaaaggtaagatatctacttaaaagcaaaacagaatgttaatctcctgagttgtctccattacttaaacaaggttcatgtgcttacaaagtctaaagacccagcacaagtgatacagaaaaggcatcagaagaggcattcaataccttcaactaatttgaagcaaggaaaaagggaatgttcatctttacttgaaatactccagtttagaaggaaaaagttgtaactttacagattatacaggtatgataacaaaatctttaattaaatatagagttccaaaaaaatcattagagttcaggctgttgacaggaaacataatttcttcctgtcccatggtataatttagcatggcactgaagagctcttctgtttctgtaaatgcgttagatgtggctaaaagacacgtttttaaggttgaagttgtttccttaaagcattgccacatgcagagtcactcgccaaaaggtgggtgcaggagagaataaaacaaacacaagtaactagccaaaggattctaataattctgaagaaactaacattcagtgtaatggccattaataaaaatatttgtgctatcattaccagcagaacagccaccataaactgagtagactatggtgaattactgagtatcataaaattcttaagtatcttgtaagatgcatttcccccatttaggaattacaactcaggaagaaacattctaaaaggaacagactgttcctttgagtgtcagaagccacaataaatatttttacagtagaatctaaataaatgcttgcattttccaacaagtctcagcttttaaactaaacttagtccaatcaagataaaattgtagggaaattctttttctattttgtcttgattggactgagtttaggagctaagctatgaggactgcaaggcataagaatgacacagtggactttagggacttgggggaagagtgggagggggatgagggataaaagactacaaatatggtacagtgtatactgctcgggtgatgggtgcaccaaaatctcacaaatcaccactaaagagcttactcatgtaactaaacaccacctgtaccccaataacttgtggaaaaaataaagtaataattattattataagataaaatagtaggggaagactgtattggatgttcttagactccccatgatatgcgtgtttctgcacttcttgggcatcctgcccctgctactctatgtattttagcttctcctctcactctttacccatactcaagtcattcagctcaagaaataagtaatgaacatcatctgcgtgccagttcccatacagtcccatagtgttagagctcaaagaggcaaactagtgggtgttgagaaaatatctgaagctctttttgtcaaatctcctgggaacccagccatgcagctgccctttcctcccactagagatgtccctgttgggctttcttctctccctaacagatccatgatcccaaaaaatgattaggtacaagaaaaatccaatgtgtctatgagtatgcattgaggcagctcatgggagaaatttttacaaaggtccaatgttacctcctaaggaaagctttccagaatccttcaggtaattactcacttgcttctttgagctctcagatcatttcgttcatacttctattaaaggccttggccagttgcattgcaattacctggtttctcctagtaaactgtgacctctgcatttgtctttgtacccctaacccttagcacggtgcctacgtcacagtaagtattaaataaatgttgctaaatgtgaaggagttagaaattgtgttttgcctgccatccaaggccccaagtcatgcaaagtcatgtcataacttcagcatatgacagacgcttctgacttcctcaacatgatcacctgcagttgggggccattatctatgtagagtttacacgttctccccatgtctgcgtgagttatctccaggtactctgatttcctcccacgttctatacccattaggtaaatcatcatatctaaatggtcccagtctaagtgagtgtaggtgggtatgtgtgtgagtttgccctgcgatggtctggtatccagtccagtgctggtgccccccttgcaccctgagctgtgggagagactccagccacccaagactccaaagtggaataagtgaactggaaaatgaatgaatgaatgaatgaatgaatacagattattgtaaaataaaaatctgtcaagtctgcaagaatcatatgaatgtatgacaattaaagatacggtacaaaagtactcagtgagcctactctatttgttattatttggttttgaactaccctgtggtaggaggtattccttacaactttcgctttgcaaacatctatttcttgatttaattcaccaccactacaaatgccatcactcactgattcatcaaaaatcagataaataccaaagaaaaagaaatcaatatatcaaaaagatactcacactcatttttatcacatcactattcacatcgcaaagatatggaatcaacctaagtgtccatcagtggataactgcataaagaaaatatggtgtctatatataatggaatactattcagccataaaaagaacaaagtcatgtgttttgcagcaacatggatggaactgaagatcattatcttgagtgaaacaagccagacaaagtcaaatatcacatgttctcacccataagtgggagctaaacaatgtgtacacatggacatagagagtggaatgatagaggatggagactcagaatggtgagagggcaggagggggtgatgctgagagatgacttaatgggtgcagtgtaggttattcaggtgatggatgccctgaaagccctgacttggccactacacaatctacacttgtaacaaaattgtacttgtacccataaatttatacaaatttctaaaagggtaaaataaaaaaagacaaatgtaaacactcttttgttctttattttaaaattgtgtaaataattatcttgtgtgattttattaatctttcttaaatgtctatataccacacatgtatttcaatgtttaatattataagtgtttggggtctttatttagaaatttgatgatgtttttatgaccagaaatatgtcataggagttaactcttgtctaaatcaattagcctatggtaaaattgatttcattatacatcatttcacttaagtcacagtttctaagaacctataaatgctattaagtgaagacttgctgaaatgtgttaagttctttctctgtctctttgaaatgtatgtaaatccttctaaatgctaaataagacttttgctagttttaagactcaggaatgtctttctcaaggacccaggagccatctcttggaaatctaaactttagggaagatagagccctatctctcagtttctgtgggaagataggagtccagcttcagcaagcatctcgctctacattgtagaactatctctcatcataaatatgtgagaaatttatttttcctttacataaaacttcttagctaacactgatggtagctctaattaccaggtacacttaggatgagctatgtgcaacaaatgctgctgtcaagtcctcttactggagaagtagttcctgtttatcttgaaactgtgtatatagtggggtttacctgcttagctatataagactgagatttcctgtctttgcaatcccttagcagattacccgtgatgcatatcacctacttttaatgtttattcaataataaaactgttttccttctcttctacctttgtaaagaggttttctgggatgaaggagttcttgtctttaattacatctctccaacagtatcatatgtgaactgtggacactgaaatgtctggtccactgcaggctttctctggccccaactagtctgccttgtcaatttgactgggattccccattgatatctgatgtcatggaataataaaatcttataatttgaaaggaatttagatcaacaaatagaaatttagatcaattaaaagaactctatattactatatgaatacctctctgtgggattttcccccaaaagaagaaaaaagtggtcagcttctgcttgagaacttccagagttcatggaagaaatggtacttaaggtctgaagaatggggaagatttatccaaaggcataaatcaaaaaaggcagcactgcaaatagaagacacagcatgaacaaagcacaaaggaggaaaaataaaggatttttgtaaatgctgagtagtctaatcatattaaaatattgagtatgcataggagctggaagacaaaaccagtaatggaagtcaggacaatagacagagaaccaaatgccaggataaagactttctgctcgactactaaaatagaactctacttgtctctgaaaggagtaacatgactttacaaggatctcgccccagaaatatgatgaggtatgttcagtaccaggctccctttacaattctgcaaaaatgagcctcagttctagaaaaaatctccaaacactgaaagaaaacacgaatcacaactttccattgctcttaggagctgggtttttgtttttgtttttgtttttatctgacagcaattatctgctttatctccataacagctaacagcagtttggggtgttgtactaagatggcatggctgtttaaaagagccattttttgttctcaagtccttaacttttgggccagaagcaaccattgctatcacttttcttatgctgtctcccacagtggctaaggcaagtggttttagtttttctttgaccttccttctcatattcagggaggtgtcttacctatttaaagatgatttgttgaaaccaaatgagcagtcacggaaatgtaagtgcccacagaatgtcctctttcatttgtaaaatctgtattccaagacagatgcttttagagaggctatttaaatatggcaaatatatcagtttgtcttcaaactaatgtaaatccctcattggtttatcctaactgcaaagaatcttcaaaaagctggacaaagtaaaaaaaatagccatcagcaataaccatctgtattaacgtgtagtatttcttttgaagggtacattaaaaacacagagattgggagatggggagaagtaagaaaaaaagttcctttttaactttttcttaggactttattaaaaggattttcacttcaacagatacttctataatcatagctgagatataatttatttttggaaaacagaaaatgaaaatgttatgaatagtcttgtttcaggcaatcaaagagagtggaacaagaaatcttgtatttgatttgttttcacaagtacgattcaaagaacatctgtgcttatgccatgaatccttctgcatagcgctcttccttagaagttttagtaatagctgagtccattgatctgcgatttggtaaacttgaggtttttgaagggcagccaaagtttcacttagtttctcaacaactctctctcttgaacatgagaacatctatcttgttcctcgagaacttaagatccatttttatactctggacatcatagtgctggaacttgcagacaaaagccaggcagccttactgagacactgagttgtttttaaataattatttcatttagattcttaatcaattatcagtttttagaagaaatatgcccaaaattgcaagtgctacttcccgtgggcatttccatgttttaaatctagttaaggctcaggccttaacacacacgattcactcatgatttgagatagacaaaataatctgtacaacaaaccctcgtgacatgagtttacccatatgacaaacctgtacgtgtacctgtgaacctaaaaaacaagataattattgttatttctaaaagtccacccagcaattaaccaaagtggaaacattttcagacataatcttggttaattcagagtagtttctaattgttaacgcttctgttagcttccagaatgaccatgaaactttaaatagaaaggacattgaggatcacataaatgaaagaataggtgtaaaataattagtacaaggcctggcacagagggctaaacaaataatagctcctaatttagtagtgcaatagtggcaacagtagccctacatcctcttcaacagtccaatttacagatgaaacccagagaaattaaatgattttcccaaagctacaaagcttgttagtggcagagctgaaactgaaatggaagttccttaactagtctaatactgtccccaataccttggggaaaatcattttttcaattatgctgaattggtctctcatataaaacatacagagggcgagacttcacatatcttcagatagcaaaccttctcagtggctattctgattaatttgtaatttcagaatctgatggcctttcccagccctctcttcttttaacctttctgctgcatttagcaaccattgcttacactgccctttaacctgagcaacaccacgctaaaccaacttctacctctctgtctacttacctccctctgtatttactttcttcctccttcctcatgtactcaaggcatggaactttccaaagctccactcttgaatctctacactcatccttgagagatcccatatattcccaaataatctctgtatgaagataacctcaaaacatttatcttgagccctagtctttcctgaaatttagccacaaatttccagtttcctattggatgttactacctagatgttgtgatattatctcaaaattaccatgtccagaatcagtcatcatttccctcaaaagtagctcaaaatctttactttcatggtgtaacagtcccataattcctccagtcttgaaaccatagagatatctctgtgtttcctcacccttcgtaagtaatctgccacaaattccatcatatcctttctttttacttccttcccatttccactgacatcacatcagttcagtttctcaccaccaaggccagaactactccaagagcttcttaactgatggctgtgtctttagtcctcacaatcttacaaactccccaagttaggggacccagcttagggacatagaatttaacatgttgccagtttaaacttaatacagtctctctctctctctcttcctctctctctctctctctctcacacacacacacacacacacacacacacacacagacgcaaacattacagaatttgcaaaaatgatctgaattctgactcctcaggctgtttagagactggtgtcatgaatgtcccccaggaaagctattggctaaatccctctgtgaagaaacacatccacgagagtggttccttaattttctcatcttttcttatattttatctatttttcttttatgtatttcttattctttaaaaaaattatctctctaatgcaaatttaaattatactgaaacactagttctcacctataagattggcataaatggaaaatttgacaacatattcttttggcaatttggtataacaattggcagtttatacactgctggtgttaacacaaaatagcaacccctatggagagacatttggcaaaattacatgtagttttagcctttgatccaacaatatcacttctgggaatccatcacaaagtaatactggcaaaaatacaagagctcatttttgttgcactatttaataatagtaaaggaatggtaatatttccaaatggattaaagcaaaccccagtttcccttgcttcaacttttgcttcctttccctttttttctcatctttttccctttcccctctgtttgctacctccacctcccctgaaacttgacaaactgcaaggattgcaaaatagctctttaaagaactactctggcaattgccagaaggggattgtcccagtgatcccaaacaagaagcatgaagaatgaaaaccatctccatctgttccagtcacaagttccacatagttagaagttgagcaacatgaccaatacacaacaacacataccctcatcttcttcttgcactataaaattccaatcgtgacacagcttgaagaattatctggtcttcatgtgctccctgatacacgccagtgaaataaaacctttgatctctattcaaatcatttcagctattattttctttgacaaacccaaatgtatgtcaaaaaggactggctaaataaactatgctacatgcacaaatgaagtgccatgcagctgtaaaaaaatgacttagcgatgtttccatatgccacaatggaatgatctccgaaaacactaagtgaaaaaaaaatcaatggagaaaaagttgtgtggagtatgttatcagttatctaaggtattggacataaatatacatatgtatttatgtatatatttttcttaaattataaaccaaaatttctaaagttacttatagagaaagaaagaaaggaagatgaaggggacaaggacagaagctaaacttctctgaatatgtcttgttttcaacgtaaatatcttacataataaaaaattaaattttaaaaagcaagctttaaaaactaaaagcaacatgaaccaatgaatctctgtaacaaaccagcagtataaccagagagaaactgttaactaatgttacgtgcttttagtaatcatttttggtagtagtgttagtattgtcattcggagactgttgtatgtacattgcaggataaaacaaataaacaattatattggtgtcattgatatccaggatttcaagcgtggaagaaggtacagacataaatcaaagaaattaagttaaaaccctttagccctaaacttgaactggaggtattattatgactttataatacattttatctttaaaagttcacatatcctagtactatacactggaaaggctttgaaataacattcaacctaaaaaacaacagatgtccctagctcccagactgtagttctaaatttctagtcattcctactaaaaggagccatggcttcttgggaaaatcatttattacagatttggggaaggaaaagtaaaagacacacttgaatcatcttgtcatattaaaaatcaggttgttcaaaaagactcacaacccaacttgaaaagatgcttactgaccaaagatagggcaatttgagcctcaatgaaaataatatctgcaatggattgaaatacatgaaatatggctaaattctataaattcataatcatactttctttaaaaaactcattagcaatctttgaaagatgctaaagattccactaatatttaaaaacacataaacatttgtgtgtgtctgtgtgtgtgcatgtgtctgagtgtgtgtctagcctgcctttcctgtattgtacctctgggtaagtgattagctgacaaggagaaatttctctttatagagatagtctcaccaataaataaaaaaggaatcatagaattcttatatcacgactttgtaacccatcactaattaatagatttaggaactgagcattagtggctactagcatcaataaagatacacaactatacaccaccacctatgaaatattcttgcccaaaaaaatctaaattgaatatgatcaagcttcttgtttgaactaccaattaaccaaaacagagaacaaataaagaggttaaaaacatggcaaagattcaatcagcaaaattcagactgagaaattctactggacaaatgacctaaattattctgctgataaactgcaaagaaaaggaaaaaagatatgagggggaagtacaggccaacagttatttaaggccaggtgtcatgactcatgcttacaatcccagaactttgggaggctgaggcagaaggatctcttaagcccaggcgtttgagaccagtctgggcaatatggcaagacccagtctctaaacaaaacattttaaaattagctgagcatggaggcgtgcacctgtggtcccaagtactctggaggctgaggtgggaggatcacttgagcacaggaggtagaggctgcagtgagttatgattgcaccactgcactccagcctagacaacagagcaagatgttgtcaaaaacaaacaaacaaacaaacaaaacaggcatatcaacaaatgactgtatggacctcttttggaccctaattgaaacaagcactcactctctcattctcactcactctctacacacacacacacacacacacacacatatttttaaaaccccatatatgtatatatttaaaaattggggaaatttcaacactgattagctatttgataatgtttgggaattaatgttaactttttaggtgtgatgacattattgtggttaaatattttctggaagagtcattatcttttagagagatactgaaatatttacaaaataaatgatagatatcttgaaccttctacaaaataatggatgggtagaggaatgtgcctagttctaaatgaaacaatctagccataagctggccttgtaaaagttaggtgatctggccaataccacacatctagtaagcaatggagttagcactccaatactagttgtctgattccaaagtctatgttatcttcaatacacctacgatgcctctcaaaagcacccctacagataactggcacacaaccacttgtaaactgatgaatagctgtattacctggctctgcagggttttctgtgccttaaatacgtatttagtaaaaattttgtaagtgtttattggttataataattcgtaaagccacctagaagaggtgatacattagacttagaaaagcatcacaagaaatagatgttttaggccgggcacagtggctcacgcctgtaatcccagcattttgggaggccgaggcgggcagatcacgaggtcaggagatcgagaccatcctggctaatgcagtgaaaccctgtcgctactaaaaatacaaaaaattagcctggcatagtggtgagtgcctgaagaccaagctactggggaggctgaggcaggagaatggcatgaacccgggaggcggagcttgcagtgagctgagatcacgccactacactccagactgggcgacagggcgagactccgtctcaaaaaaaaaaaaaaaaaaagaaatgttttaaaataaatagcaggtcttctttaataaatgcttttgttaatttgttctacccaaaactgatagtagctgtataataaaaatgagcctaagatatataatagaaatgagcttacaagcacatatcgaaaaaccaagttaagattctaagataatttatatattatattgctttccgagttccttaaaaaccataaatgctctcttgtttatcttgttgtgccagtgatttgtggaagccaaaagtgaaaactgcagtcacaaggaccctagggcaagacttaatagtacccttgatgactaaaataattgatatctctctttgaaatgtggaacaaaggaaactatatgttgaggtccagtgttatcataataataataataagtaaaaatatgtttaagtcaggtgaacctgatgttaagtcattagcatcacattgggtgaggacttgaggcaatctctttgaggaaagaaatcttctactgatatggctagcgtcaaggtgcaccttcttctgaaatgttgccaagacatgaaagaaatactagttttgaaacttgtccaacttgtacatcaagtcagtcaggatcttgagatagatcactctgctttgatgcttttccattttcatgtttgcttatttactgtgccagagttatgtgtgtgtttattacttctctataggattcactcactaaagagggaccatctagatctattcacctcaaatactatatggggtttttctatttgtatcaatttaaggggtacacatgcagtttttttacatcgatacaatgcagagtggcgaagtctgtgtctctattgtaaccattacctgaataatgtacattgcacccattaagtaaattctcatccctcaaatcccttacctccttcccaccctccatcctttctagcctccaatgtctattattctacactctgtgttcatgtgtacacattacaatatgggtttcatcaggtagcagattaccttggccgttggcttattgttatgtctctaaccaagaacattttgtagtcacaatttttaaaactaggtttactcttaattttatacttacactcctgtagcatttctaaattgatccatagtttaggacaaataagtagtttaccatctaacatcaatatattattcactttattatgactcatgacatttaatataattgtgacactttaaatgtaacatttaaggtgtcacaattatacccttgttgttattattttagtataatccccattattattattattattaacattttattcttaatcatcacctctcaattaataagtaactcatgtggacaacctatagtatttgaagaaaaaggataaaagaaagaacataaataagcaaatcctccatgcaccatttttgtgttccactctactaaaattttacactgcagaacaattccagatcctgtaacttaggtcctgtatgttgacagtatttaaagaaaatgccagctgtgactacagcaaagttgcagcaataacaagaaacttctgctatatggcatttcctttggtaattgctatggtctaaatgtgtcccccgaaatttatgtgttggggtcctggccctcaaaatcatgttaggagatggagcctttgggatatgatcagataatgagggcacatgggattagtgtccttataaaagaggccgaagggagcttgcttgcccttttcaccatgtgaggacacagcaaggggtgccttctacaaggaaccgtccctcaccagacaccagatctgtcagtgccttgatcttgaacttcccagcgtccatagctttgagaaataaattgctattgtttataagctaccagtttatgttattttattatagcagtccaaataaactaagacaataataaatcatctagaaaaagtataccccctaccaacagacaaaaatttcacagagtactttaaagaacttgtttccttcttttgtgatgcattgcatgctgataattctgagatcaagcaaggataaatatatttatctattataatactaagaaactggccagaagcccacatatatcactttttaaaattcatggaggattaggaaaatggtcagagtgtatctgtattgtctcttataaatgtatttttagtataactagaaacctactgaagcaaattatcacaaaatctctgtgtcaaaaagaaaaacagtatagatcatgagtttaaaaatgattcttttaaaaaagaaaacatttcagacaaatttaatattcttctttgacaaaattataggtttaggatataaaaaacaaggatgccttcctccctcccttcctcccttccttcctcccttccttcatcctccgctttattaagagacaaaaatgtgccaggaaatgtgcaaagaacagttcctgtcccaaggatcatataatctaatgactaaagcaaacaaataagcaatttcattacaataaggtgtcttcgatgtaaattgaagttgtgtatgtgtccaaaagagggccccaaaagctccacatagaaggaagtctctcctgatgttacttgaatgatatagtcatcaatatgccaaaaaaagtttctaagagcatgtaactccaacagttgattagaagaaatgaagtaccacaggcactaatcttgattcagaggagtttttctgtgacattcatgatggaccaaacaaaatgctcagtaacactgtagccaactatgtcaaaagttatttcaaggtaggggctgacttctgcctctttttaacaggtaaaatgctcagtataaacacaaagtaggtgcctaatacagactaattgcacactgaaagctaaaggaacacgcaaaatattttcacatattaagatagaatttaaatgctagtaaccttgataaatttaaaatatcaagagaaaataaatgaagactgaagcaatgctttgcctttaaattcaaaccacctgtgttcaattccaatttagtcactgaataagctcagtggcctttagctgggtatttagcttatttgactctcaactatctaaccataaaatgaggatattgatactgatcccttaggcttgggtctttgtgaggaatacatgaactaatatattaaggttcctaactcaaggcatggcccaatgtagggtactcaagaaatgttagcttcatgtccttattacatacacggaaaaaagatttccaaaaagtgtaaaaggctgggtgtggtggctcatgcctgtaatcccagcactttgggaggccgaggcgggaggatcacctgaggtcaggagtttgagaacagcctggccaacatggtgaaaccctgtctctactaaaaatacgaaaaaaattagctgcacgtcgtgcgcgcctgtaatcccagctactcggaggctgaggcaggagaatcacttgaacccaggaggcggaggttgtggtgagccaagatcacaccactgcactccagcctgggtgacagagcaagactccatctcaaaaagaaaaaaaaatagtgtgaaagaccttaaagggtctcctcgtcaatttccctttaagacattctaaactgaaagtacatagagaaggtcattctacaatataccccatcatatggtttcatctttctaggaagcagcacaaaagaaagtggcctgagtatctagcataaacctcatcaattcgtttatttaacatttattaagtatctcccacatgccatggattattttccagacaagtgtcatttaaacctgtgtccaagtttctgatctatatgaaccaatgaatgctaagtatcaaacaacctctagtgttggaaattcatcattttctttaacaattcttagtctttggacagatttcagtattatttactgatgcaggaaaacggagaagagttcagagagaacaggaaatgagctctatctgagattgctgagtttgagattaatctgagatatccagatggagagacatagcgtataggtggaaaatcagaccaaaaggtcttaccaggaaccttagatttggaaattgtcaacacatatgcagtagttaagtgatgagaataaatgagatcaataagaaaatgttggccaggcgtggtggttcatgcctgtaatgccagcactttgggaggccaaggtgggcggatcgcttgaggccaggagttcaagaccagactggccaacacagtgaaactccgtcactaccaaaaaatacaaaaattagccggtgtggtggcgcacgcctgtagtcccagctactcacacgcctgtagtcccagctactcaggaggctgaggcaggagaatcgcttgaacctgggaagtggaagttgtagtgagctgggattgcaccactgccctccagctgggcgacagggtgagacccagactcaaaaaaaaaagaagaagaaggaaacgttggtaagagagacatatcgagaacaggctgctggggaacaccaatatttcaaggaaaggctgaggaagaggagccagcaaggaggctttaaagaaagtatcatagaaataaggagagaaccacagatactgtttcataagcctaggagtggagggaaattgagttggaaagaaagggagtggtcacctacatcaaatgtgagggatatcaaacaaaattaaggataaataaaatccactaaagaatttaatctacctatcaggcagttcaaagaaagataatttaataaagggtccatctaaaatttgaatgccctcaaaataatgctgtcttgggaactgtccagttgcacttttatgaacactcccagtgttaaaactttaccacttaatgaaacccttaatctttacacggctctaaatattatcaaaatcttcctcattttgaatacgaatatttctccttatataactgtccactgatacaataccgttttcaaatatttgaagataacttttctaatatagcacttatcataatttgcagatctatttgtgtatatgtcaatacatacagatatattcttgattataaactccgagagtaatgatgctccctgtttcactaagtatccacagcacatagcacagtgcctgaaacctattagatgctccacatacaacgattgaattaataagtgtattgatgagcagggatttagactccagaattaattattgaatgaaattttagcattcctttccctgtggattttttttcttaattggatcaatgcttatgtaacttctaagtcaatgcaagaaagcaagatatattgggtgccctctcaaacttccttccagaactttgattctgtgaaaagctgacaaagattacatgcagtgggaacatctcattggaaaattaggaaacctgggtcccagacacaggtctgtcactatttctgtgctcttcaataagcctggctacttctctgggccttgggaccacatttataaagtgaaccttttgtatctacacactccaaggtctttttctagtttaatatataagactataaaaaatgtaaatattataatatactgtgtaaagaaagatacctgaaatgcctagtcattgctctgattatattatcatttcttcaaacttcacatttctcttttttttgaagctattgtatagctataataagctccttttataccatattttcactttgccacatcttcaatcatctgaaatacaactgccctatcatctctaacaaagtagttcttcaaattgaattacattgttgttttctatgacactgaatctattctttcaaaaggggcctttctcttagcctcagctaggaagttttattgctagttataattctaaagcacaatctatagcaatacttattgataattaaggcgaattatcaacaattactattccattatataagcaacaattctaatgagaccaagaaagtgaattaagtatacaaagaacatattatatatatatatatattaaattacaagaaaatttgcctgatacctctcatctattaaaaaaaaagaattcaacctgttcccacctttttcagcaatatttctaagacattcaaaagaaaatacaacataggtgtaatacactgctcctcctttgatgttgccatattaaagacatccataaacttcaagaatagaaatccactattacaataccatcatattacaccatcatattaccatacaatatctgctgcctgcattgtcatattattagaaaaaatctatttacatatatattttggttttattctgccatttgttacaaataaaattaatttaaaatagatttacttggaaagggattgtctgaattcttcccatataactaatgttttcataaggctttgtcattaatcaaaaaattaaaagattgcattgttcatcactcacccagcatttagcatctaactagtcttctattgatgttctacaaatgcaactgagttctgcaccagaactgctgcatagactattcccaccctacccccaagaaacccatttcttacacagcaaagagcccaagagaggttttcagaaggtaaatgtaatcgtacattttggcctgagtttaaattccagaaaaagacacactttggctcacatttattgaagagttagagcttttttttcaattcgaatgaataaatatttgagtacataacatgaatttttcaaatttccttagatgctagttccttattttaatacataacaacgcttttcatcaaatgaaattggagaatcatagaaatgcatttataggaaatctgagacatattcaaagaatgctatggatgttatggtataattttaactgaacaattctaaaattgaaaaagggggtcctacttagcatttccagatacaaataatttgaaccaaaagaattctctaaccagcattctgttaagcagaatgaatctaatgttctaatggtatgattgagatgcaatactgtgtggttaaaaactcagctctgaaggcagaacatctgattcaagactcatgtttgcttcctacaagctgtgtggccttggtcaagccacttgcttataaaataggaaggacactagtcccttactcttgaattgctgtgtgagtttaaaaagatcactcacgtgaagtacttagcacagtgcctggcatgttggtcaggttttaaattcttttaatgtttacagatctccatagaaagcaaagacaacaggggggaaaccttcatcccttcagagtgttcctgtccatgacaactatgcaggggcacagcctcagtgcacaatgacactcaagtggtaacagaaagcaaaatggaaatacagaactctgggcatgctcctcactttcatccatggctctctcttcctgccaccaccaacttgtctaggcagcagaatgctgctagaaaagtggacttcatggtctatgaggccaagttgctgcaagctgggcaaaaactcaggaagacaacaatagagagagaggtgactttctgctgacatttttaaagctaagttcttttatacacattattgttccccaaatctctctccttggtgttaagacatttcctgggagatctcaaccattcagaggatttcagctgctaacagtacactaatgacttccaaacctgtgtatttaagccgtaattctgttctgaacttcaaacccaaatttaccattactcacatttcctcttgggtatcgcaaaggtacctcaaactcaaaatgcttaaaattaaaccaattatcttcatctaggtgggctacagttgctctggggatctcattttataacccccagcagtcacctaagccaggacccattattgactcttttctctcccactaccacatattcagtctccaagaccagttcgtttcatctcctacctctcaactgttccttcttttccacctttcttccacctcttttcttcaaacttttgccagttctcaccagaatgactgaatagctctgtagctggtgtcactggcttcctactctcccctccatggagtctatcccctatattctcaccaaagcatctttctaaatatcagaggagggtaagcctcaaagagaccacagttaggcacggcagctcacacctgtaatcacagcactttgggaggctgagacaagaggatcacttgaggccaggagttcaaaaccagcctgggcaacataacaagaccccatctctataaaaaattgaaaaattagccaggcatggtggtgcaagtctgtagtcctaactttttggaaggctgaggcaggaggatcacttgagcccgagagatcgaggctgcagtcagctatgattgtacctctgcgctccagcctgaatgacagagtctctaaaaaataaaataaaatatgaaaaaagaaagagacctcagtggggcagtaataaaattctgtcaggagtataaaaggtcaccgtttatgttataatttttcttagagtagctattatagcagacataaactaggaaacaaaggtttactttgatgtgacagagatactatcaagaactctgaagggtctgagagtttaccctatttgcaaactcacaagttagtctaccatatttcacagatcctggcaaaagacacaagattcccagattagagacagaggagtttattattcatcatacagcaagcagcatgaatatcctgtttaagtcagttctctttctccccaagactcacaggtatgacataaaggatcccatgcagatgctgcatgtggcatccctagcacttatggaacccatatcttttataatgggctacaagaagatctgccctttgcctcgaagggagattatttttattatgttggacagtaagtaaatctgccctgtaatccagagacagagattgttttccaagactagtcacttgttaaacatccttgaaaagatattttggaacagaagagtagttagtgttctgagacacttgtagagaatcaggttttgaattcaaacctgcctctggcattcactgtctgtatgatttttacctttctctatcagagtttccttacctgaaattgaggatcgcactcatttctaactcacagccattttacaatatcaaaagaaatcacttgcatacaaatgttttgtaaacaatatagcactatttaagtatagttattatttatgattctggaatgtattttgttgtttcttatggaaatgaaagagaaaaattatttagaatttttaaattatacaattaatgaaacgcttattaaatgccttattaaaggttagatttgggtggtacaaggtgaagaattatgacacattcctcaacctcaagaatttcacattctagggaggaagtcgacagaaaggacaatgaccaagatgtgttcaagtgacagaatagaagcattatatgcttctatagaacttggagaaatctttatagaacttggaagaatctaagtaaccattaaatccaaccctctcatttgccatagagaaaactggtgatgaaaatgatcagtaatttttttccaagggctgatagctatctgtggcagtgtcagaactggaactcattatttttgacttttagtttaataaacaaccttgacagaaatttcttgttcctgaatagaggttttacaagactgaggcaggacactcggtttggctccacgcatttttctctcctctatggtcttacttcagtgcattgccattttacctctttgttccccaagaatttcaatggatttattcttttctaacttcttacttttctcaaaggtcaaggatttcctctttttttagagagaaatctagaacaaacttcccttctgatcttcttttctctcttacttttactccatctggctccctacctgataattcttcctcgttatatcccacaaaatgctaaccctgccaccttctcaatccctgactgccagttattcagtctgcttttttctctcagttcactccggtctgccataccatctgcccagtgaacttgatgcagatttcataaaatgcaaagtaaaatattagctacaaaccctgaagttcaccttaaagactaggtaatcagctgctaggaaaagacagtaagcaaggaaaatcatagctcacccagttttcctagtagtgtaacatggactctgctccaaggtaaaattcaccaatgtgcagtaagcttgatttcaattccatgtattgattttaaatttttttcagtactatacagtacctgaattttttacgaattttcatatttgggattgcattggggaagaagaatagatacatctttttcaataagtaccaccgtagccatagctcaaaaattagattgagcttagagcttagttacacaagtctgagtgttttgggacaatacaaggaaaaatcaggttcattccatttaaagcctttcttgagaatcatcagagaatcccaaaaatattatacttcaaagactaaagacatcatattcaagggttttgagaaagtttctaagtgtgtagcaatgctaatatatacagttataatcttttaaaatacatgcaaagaaaaaatattcaacttttttataatctaataaactgaactttttcaggttttattaaacatatgtgttttttaaataatcaagtacagtcaaagagttttaattttgtggaatcttctatggtggcaagaatttagaagccttacttaactcagaagggtgaaaatgaaatcaataaatatctgagcatattagctatactaaatagcatttagaattagaatagccaaaaaaatttagtatcattgaagccaagaacaatggtatcatggtcaataatgtttctgaagttaacaaaaaaaaagcaaatcccagttcatgataaattacaaaaatggtaattatgtagataagaataaatggctttaaattccctaatgaatgagtcaagttactgacaagagcaatcaaaatatattccatatgtgattaacaacacttaaatttgacattgacaaatattatttaatttatacaacagtagaatcacaagtgtatgtagtctctaagtctccaggttacaataaattatggaaagaatgagaatttcagtcagcatgcttactttatttttgtccttgaccttttgcctagaatgtatttgttaattcgggtgtaggtcagaaaaactggtgccccccgccccctgagtctctctctcacatacacacacgcgtgtgcacacacacataattagaaatgacacttcttcacagaattctcccttcggcattgaagaaacatataaagctacactctatcaatttgtaactatgtaactactgatcccatcttcccattaagtttattaagtacctattagatgccagacactatgctaaacattgagaatcaatagaaatgagatatacatgggtctgcctcacagagcttacagtctaacagattcagtggaatgaattgatatcattcctctgctataagcaaagctattctatatagtagaaacttgtaaacacttagaagaaaaaaactgagtaagatttaatagcatgactattacgaactatattaatcatacaacttgaaagaaaacaaattgcttcactccctcagactgacatgtctaaatctaatctcagtttataattaatacaccagcataaggaaacataagaacttccagagcattgataaaactgatgacgaaatatttcatccagtgaactgagcttgtgacatgaggtcctagacagcagtagaatagagtcacgtaccttagctatgacaccttctgacattagccaaactggcttagggtgagaaaatccttctaatatatgaagataagaagttcaaacttcctaaatcataaagtattatgtcttcaatcctataggaatcacttatggaaagttatttaagattaacagggcaaaatttacaaaaaggaagagatattcattttaaaattgtaagcccaataaatacacaaggaaagcttcatcttttctcaagtccatcccccccccgctacacatagtagctactcaagtagaacaaaaacctagacattatggccaaaattttgacatctaagccctaaaaggaataagtcactattgaaattccaaaaataatttggagaactaaaattgactttgtatactagaatatattgatatataatataatgtcttagttatgaaataaacatctcttcaaactgtaggatgtaaaccaaacttgtattaatatgtgaaaaacaatttctaatttacgtattggaggaaaaatatgttctctaaatggaaggttaaaaaactaagcaaaacacttacaaattctgtgctcctatgaaagagcctatgagaaaaatgtttggagtcagtgaccaggtttgagctgcttgccacagggagaaacctgtcaaaggggtaagagttgaaggcttcccaccttttcgaatgtgcagaataaaatttagtgataaaaatgctttctaaagccatgcaactcaaaccatagtccacgggccaacagtattcagctgggagcttgttaaaaaggcagaatctcaggccctcttccagaaccttcattttagcaaaatttccctggtaatttgtgtacacatagaagtttaaaaggcactgttatgaggaataaggcattctgggactacagagcctgttccaaatattttgcataaatttaaacttctgcatctaccatttgtgtcaccctccatttgaggacagaccttgtgagctagaatcaatccactgcattacatacctcacctcaaatatattctataatatttttcttcacaatccatttcaactcaaatatttaactattttaattatttcttttcagacctatacttcacagctataaataagaatgactaagaagaaaacatacagcacaatacattgttgaaccattccttcagattaatttcaaaactccaagtaatatactaaaatggtaaatatcatgagggcagatgtctgccttttttgtatactaagatagcccaaacacctagagagtgctttctatggactgaatgtttgtgtcttcccaaaattcatatactaaagcctaaatctccaatgtgatggtatttgtaggtgggacctttgagaagtaattatatcatgaaagtggagccctcatgaatagtattattgtcttataagaagagacatgagagagatgatacctgttcccccaccccacaaccaccacatgagggtctagtaagatggtgggtgtctacaagccaggaagatgaccttcaccagacaaatctgctggtgccttgatcttgaacttcccagcctccagaattgtgagaaattactgcttattgtttatcactcagtctgtggttttgtttttgtttgtggtggtagttgttttgatacagggtcttgctctgtcagtcaggctggagtgcagtggcaccatcacagctcactgcagcctcaacctcctgggctcaagcaaacctcccacctcagcctccccagtagctgggactacaggcacttgccaccatgcccggctgatttttgtattttcttgcagagacagggtttcatcatattgcccaggctggtctcaaacttttgggctcaagtgatccacctacttcggcctcccaaagtgttgggattacaagcgtgagtcactgcacccagtcaatctgtggtatttttatcacagcagctcaaactgactaagacagtgcccaataaatacttattgaataaatgaacagacttttccaaggattataaattctcaaaattcatacatagattttgaatgaatatgtttaattatcatataatatatgaagattatttattttctagcctagttgatcgaactaattttatttcagtgactatgaaagccatcagtagagcaaagacatgtaaccctaaaaaacctgagacccatgacctatcacaacttgttttataacaaaacagcatcatgcagataaagcaacattactaaattataagattaaatctgattcaattttatgtcccaaggtctatagcctttagtcatcaccataatcatcattatcatcatcttcatcatctccatctcaatcttacaaagctgaagaacccaaatagcaagctaatgaattttaaccactcaacaaatgacggaaggagcaaacatatcttcaactagaaaagtataaattttgacccaattctgaatgtatattgataagcacaccaatcatcagtctaaaaggggtttacaataatgcttaaatgcatacatatcttagcaggaaacaactgtcatataacagattacttatctattggaaagtatatatgaggtatttaaatgccagaaactatctgctagattttccttgacttcctaactaaaagggaagctccttaaggttaaatatgtcacgctatattattgcacttccatgccatgatacttagtgggtctgaacacacgggaaaaaaaaaattcttttttttttgaggcatagtctcactctgtcacccaggctagagtgcatggtgtgatcacagctcaatgcagctgtgacctcccaggctcaagtgatcctcccccctctcagcctctcaagtagctgggactacaggcacacacacccatgcctggctaatttttttttttttacttttgtaaaggcagggtttcatcatgttgcccggatggtcttgaactcctgggctcaagtgatcctcttgcctcagcttcccaaagtgctgggattacaggcatgagccaccgtgcctggctgaaaaaacactttattttaattgtcttaaaaactccactgaagaaatatgttgctgagaaactgaggcacagagaaataaagtggttttttcatggccacatggttatttattgttagagctacaaagcatctccagagctctcgccactgcaccacactggttttataatagtcaatttcaaaatttatctgctaacccaaatagcaagctaatgaattttaaccactcaacaaatgatggaaggagcaaacataccttcaactaaaaaagtataaattctgacccaattctgaatgtatatttataagcatgccaattatcagtctaataggggttggcaataatgtttaaatacatacatatcttagcaggaaaaaaactgtcatataacagtcattagatttagtccaagaactaaacttttaaaaattaggttaagttttttccttaaagttttccaaaatggggcctctgttttgtggaggatgagatttcaatgccctctcattctccccttggcctttgaattgcttcactgaaatgtggatcgtctacctcttttctctttctacactgtgaaaaagaactaaagttagagctatttcactcaatttgactcaactttccaaagaaaatacaaacaaagctggagaacccaaatagcaagcaagaccagttcacagctactgacttgtctgatagccatttctgagaaattttctgaacactctagcaccaacaaatttgagtatgccatttaccatataactataacaaggtaaaactaaactaagaaagaaatggtaacagtaaccaggtttcctactttaaataaaatagtactggacagtgcctctgtgaaattagaactgtctataagctagtaatgataaaaatataagtataaatgttgtttttctcaagtaatatgaatggccatttctaaattcttgactgatctgaaagtcacaaattcattccatcaatatataatgccctattgtttgtaaggtcctggaaggcctgccctctcaaagaatatattttaataaagtctctttgttctatcactaggtggaagtttgctattaaaattcctataaccacataacccttttaaaaccatggcagagttttcagatatagacaataattttgaatgatcagttttttgtaccagaaggaatctgtctcctcatagcccaggacattctggtttgaaaactttaattccaaagcacaaatgcacctttacaaaaatcttctgttctagtgcccactataatttattttcaaagacttgtttataaagagctgcataatccacccaaagaaagtcaaagtgtttttctttattattaaactcaacagaaagttccatgtgcagctacaggaggccataggcaattaacactgaaaattgaaaggttcagaatgtttgcatgacctttaaagggcaacaccgttgcccattcacatgcatgcaattatgcagtgactagtttgtagcagcaaatatatatatatttatttatatttagtaaaacaaaccttgcattcatcaaaaactactttgaactttccaggcttcatgtagagagttagctttacatagtacaggagacttgttcagctggttctcttcattttgtcaaattactaaattcagcctatcaccgtaattgctagaatgcaacattatcacattattgaatctctctgtagagtttccaaaatctactgcataaagctacgtttaaaagaagcaatataaatataaatttaattgaatgactatgtttgtactattgctggggaaagggagatgtaactttgctaactagccattcaggggaaatcataaaacaattacagctactatggagtaacttaggagattgaaggaagtgattaaaaggactttatctaatataaacatataagctctgattccttagttatatatctcatactccacatgaaccactgaacaaaatagagtattcttcttacagcttaaatatttactcttcatctgatttcaagtaaactagaaaccttatgttttccaatggcaataccaatcaattgcctaagtattccactgactagcttgcctaatattacagcacaggataaaatccaacatatccatgtggtatacacattagaaacaggtggattttggaaaactaacataaatttggagtatgatatcaatatatttctggcaattttgtagataccattttaaacgagaatagtacacgccaatgtaatacatagtttgtgcattgactatggaggtgtatattcaataaagacagcagcacacagatatgttcagcgttcaaaatgtgtcaaaattcccagttgtagtgtcaataaaaacatccacagtgtctccgcattgaggacaaaaatgattttttttgcatttgtagcctagtaaataaaagtatctccaaaagaaaaattcatgagaaaaatagaatgtattaacaatggctcaaacagtaaaactcagttataaatgacgttgtcacactatgcatacagttgtactgcaagtcaaatcatggaaaatagtggaaaaactatgcacctataaaggcagacattctacaaagttgttctgatcaccctgttacgtaaaaccagtattttacatgggtgtcatttaaagcatatgtatgtatgtatgtatgtatgcatgtgcatatatgtatagatacagagattatattgttaggtactacagagaaatatatttaaatactttcacattccaatatgtctaacttatcctcttaaaatttctgtaagattaagaagacaagaattgtttatttcattgacgacactgcactgaatgaatcactgcactgaatgaacaaaatcagaccttctaaaaattacccaataagtcagtggccaatgacaattaaaaaacagaaactaacttctatgtctctgtttgctgggctcacctgtcaatctcctgtttcagattgtgctccgaacctaaagtaaaactgttttctaaagactaatggtaactcagtgtgaaattatttcttctctttcgatggaataattaaatagttcaatatgctcaaagtagttcaaaataaagttaaccaaagaattttcaaataagatggtaaattcaccatattacatggcattataaaatcagtggtccaaaagcaggctatatcatgtgaaattttgtgtaagcatgtggccagatatgaagttgatgcagctggtttggccttcatatctagcagcaggctgtgttaatgcatttcttctctttgtttcgatgaagccctactaataacaggttgatgaattgcatttgcaaatgtcaggcatagatcaaaggggatgacggcttggatgattattttaccccaagttgtgatttttcaccaagaaaacaaaactgcattgcacagtaaggttccttatttttacttgaatcttcaatgaacaaaacagctgcagaaaaatgtgacttaatgaggcatccctaataaaatactgcagaagtaaaagcaggggcactgaactgtttgcactctggttgtttcatcttttcaaatatattagaaataactgatgacactttggaacattccttgtttgggacatgcattagagagttcgtcagtaaatgttcatcagtttgcagtgattgctgaactttggtgcaatctgacaggaccttttcttaggggccaagataagaaatgactgagaaatcctgaagatacatatcttacccttcctgtataaggtaatccataacttgcaattagtgataaatcatccttaaatgtgtattttaacacaaaaatacatttaaaaatgatcatcaaaatactacattgaagacactggatccaggactactaacattttctgataaaatataaaataatttttaaatttttctaccaccctctaaattttatcattttataaatttttaaataggaaaactggccatatctaaaaacatatttttacagccatgtcatcacattttataacttggtggttagtaaataccatattgccatctctaagcaatatgtaatctatttttacataaatccataggcaactcaatgaatcttcattctccaatttgtcattgttaaaatagctaatatttttctaatgcaatatcacatatacttagaagccttaattcccctttagcagaacctgtagcattatataggcatttgctttaatgtcaaaaattctgggttcatctttaagagacacatatcgtagcactctacataaatatgaattcaagcatcctaaagtactaaattttttaaaggcaagaaaagaatcaagattttcacataaaaaaaaaaatgcctaatctgaataaaacaacacactaaagccatttgcctcttaaaagattccctgtgcctaagtattcagttggcagtgacatcaacctcacggacttttagtatctataaataatacaatccaacttttttattgaaaattaggaaaatgaaaatatttataagctccagtgtggtaactgatggcctttaagtggctactggtggctttaaaaattaagattctaaaaagaaaggtcaactcaaacaattgactcaggatgagattcaaaacaaaataaagtaaggaaagagacaaacatgtctgatcttttatttgaaatataggatgttaggtgccaattttgatattgcaaatgattaatcagtctgagagtacaaatgcaaacatggaaaggctggggtaagtacaaataatcttaatcttctgatttttaaagctttagaagtgtttttaatctcctttcctggttattttggtttagcactttacacaaaaatcttaaattaattgttcatttgtcttaacttatatgcctaataaagcagtttaggagtgttaattgacaactctgaatgttgatgtttaaaacaatctagttgagaagacaagaatcagataattatcattcagtcaatagtaactgaaattcatcctgtcctgtgtgaaggaccctgctacactaccaagtactttggggacacttcagagtaaaggttgcttatgagtttgctttgtgtgtgtgtgtgtgtgtgtgtgtgtgtgtgtgtgtgtctgtggtttttaaggttttttttctccacgaaccattttgtaaaatccaagaggggatttcatactcacaaaaagataattttttccctctctctctcttattgccataatcaaactcacgcagcaaaggtgaagagagactagccgctggagtaacattactacacatttgattccaaacgcttcaggcaattgtttaacactcggtcaggacgtggaatactcaatagggaagcctcgcgtccacccaaaggctctacgagcgtctatggttcttccttttcagacaggataactcaacctgcagttctgagagaaatagggcgacggatctcaaactttcctttgcaaagccagtttctgaaaataacacgttcccccattgataagtgaagatcagtagcctcaagaaaacaatacttggtaggcacctggcctttcagaattgaagggggaaggaatggcaaagcagttagcagaaaacccgggtactagtagcaagatccgggagacatctaaccggaaagaaataaaaaaccattagtttcccgaagccattcttattctgaacgctgttcgttaagagaatcatttactaaagctctcttgtagtagcctttacaaaagctttatttcattcagtaagaaagcgccccgtcccaaatctaaataaaccttacatagatgaggctccggaaattatcagcttgattctttatgaagatagttagaggtggataaatcaatagactcgctgaaacacccaccttctgcaaacaggcctgagaattaactaatcagaagtggacaaaaagtagggatttcagaaagatgacctgacacatcccattgatcttccctggaatgcgacccccaactccttattaagagtccaaaatggttaccagccaggatgggtctgggtgaggaatcgaattacaacccacttcaatcctcgacctggtcgtttgctgttattaggagaaatggggcagagagggagggcaccgctcacggagcctcatttcgcatgctccgatcccctctcggcgtccctctactccgcccctaccctgaccgcccgcgagggagacgccggccgatggacccgcatctgccctcacctctcgccttccccgggcgatccctctacagtcccggacccccgagaaaggggaagggagacgtgtgcacacgggggcttccgggaccgcggtcctgcagttgccgctccggtccccagcgctggccggcgacccgaggcgcggctcgcacctacctgcagccccgcttcccggtggcggcaacacctagcgatgctcctgcagcttttgcgggccggcgccagccttatcgctctcgcatcgcttccaagatgccaatccgccgtcaccatccaggggcatagggaaccgaagtctggtgctgtgtgatcgtggagggcggcgtgtgagtgtggccctgagcgtgcgagtgtgcgcgcgcgtgtgtggatgtgtttcctcctccgatggcaaagacggttcaggaatctgacatccaagctggaatccccctgaagcgggtgaaggtgagcctgatccttctccccgcttctttattccacagtgtcaaagtaatcaaaagatttgtttactgaggaaaagccaaagtcccgcagcccttggcagcgcccgcggtcgcctcctgtcctcgccggatgcgcgcggtgcgctcagctccctggactgcaagaatcaaggcggtcttgctgcaattaccgctcttattccatctctgatttgtttgcttttaaggccgactaaagacttttcctctcgcctcacgtcgtctctccctctcacacacacacacactcacacatcctccgttccctctctcccgccctccctcttgttctctggggaaaggcaattggacagaatgattcaccttcaggaaagcagcctcggccacgcacttctcgagttccctggctctcgcaggtaccgggtctccaacgtggcggagttgctgggaagctcgggacaggaaggaggagaggctctgagctcagccgatgtcccccctccagacgcccgcgttcctccgtccaggtgcccctgttcccactgctcgcagataggtccccgctggtgccctcgcggagacttggcgccttccactcgaatccacttagcagcaactcctggccagcttcagcccctcaatcccgcctcgaagtgctgcgggcagagccccacgcagcccacccgctgcccttctaggcatcgtgggctggaaggaagggaaacccgccgatgtccccctggtagcagtgccctggcaccgtcaccaccgaggaggtgcgagttccaacatcgaacacaagcgagcaggtgtcgcctgtgtcactttgctaaaggcgggaggggagaaagaaaggagcggggggagggggccgaggaaacaaatccagatcaccggcggagaaagaagccgtttagcaagcaaagcctcctctccgcgtcccaccccagatgctatactgtcaaaagacactgatgctaatcttttagaaagtcgccataaagggcagagcccctgctccactctagaaccctattccacccagcctggctgtccagtgagtacagagtgacttggctcccccgtatagtgcagcgagaatgcaggagaataggtcctgacactccaggttgagttaagcagtaaaatggaatggcagggccgggcggcgttgcctcgcctctctctcccaacagccagttctgttagccccagcaactgccgttgagagcaaacaacggtcctgcagaaaaagaacgagacagtaaaagatgaggaggcaactggtataaaagctggactatgtctccctctagagggtcaaccggattagaacgctttactagatgtaacagaccagtttctctccataaagaaaaagaaaaaaatatctggtttcagataatttgcatttttacaaattacaacttctcaaggatttagacggaggattttcactgcagccctattaagcaaagcccttgctaaaggaacgtcgtgatattcatgacgctggaaggtcatgtccttacatgtttggtcaaattgggtgtcggtttaagcgctgtgcatatgagctcaaatgaagggtcttctgaggctcacttcgatcatgtttggagatgagcaaaaccttaatctagtgattagaagactattcaaaaatgaataattagtaagaatgaattcagaaaaagaaaatctgaaacaaagaaagggaatgctgacccaggaaattttacaagtcctttacaaggaaagataactcaagaatctggttttggagccagttttcatacctctttttcaactagaccaataatggtcaagatagctaaattccttccagctctaaaggtctgtgcttttatatagctgtgattcactgaaaccattgacaaattaggtatcacaagctctcttcaccagctataaaataaaagtaatactacataccatatttacaaagaaatatagaatatgtgcttcacttagctattttatcttaacatgcttagtaaatcaaccatattttgtatctaaaatgcatcaagtaatttaattatgttgaggtggtcatttttataaaaaatagctccaccgattttataaagttttgttacatcagtccaaatcaagctaggtcccatctgtaaccttaacatttagatttttgtgaacttactatttgagctgggggtttgctttcaaaatgtttctgtatgttcaaaaattgtaaaatgtgtattaaagttattattaaacacccttccattcactctgaatttctggagcagttctattttaacttgataatctaaattagcacagtcataaagaaagaaaagaatgtattttttaaatagctgagactagttgaaatcatttaaaacaaagcaccaaaactaaacaaggcaagttttaccgtaactaattgctctatggcatatttgactttgtctagtagtatacagcaatcatttgtttccaaggatctctcagatagtctctttcaaaagatttatgccatgtgattaaatatttcattccacttacatagtaacttatatccaggaaagcaacgtttacattttaaaacacctggcactgttgcactgcaaatcttacagtatttttttgtctgctgtgttcaatagtgtgatgaaattcaagcaggaatgacattggaaacttggactctgtactagaaagaagtcacttacaaaatcactttagaacattggctttcttttcacacacacacacacacacacacacatacaaaaaaacataaagcatacattataatctttctaccttctaattcattaactttttgtggttgtaatctatagttttgtcatcttgttaaaattttatttgtattgtttaagtgtgggacattttcagccttatttttctaactaaacccactgtgtttttacaatatatgaaaaagtaaagagaacagatatataaattaattacaaaatagaacaaaatttcttatccaatgtcatatgatgctgaaattctatcataacctctgtgctttttgtaaataattcccaataatttttagatcaagatattcctatttccagcatctcctagacaaaataaaatcttttgcattctcttcaaaggaaacaaagtagtaaagattctcctaatttaacagaaattttttgttgatacttcttaccttctacaggcatgcctcaaaaatgttgcaggtttggttccaaaccaccacaaatattgcaataaagtgagtcacacaatttttttggtttctcaacacatgtgaaagttatgtttacaccatactgcagtccattaggtatgcaatagcattttgtcttaaaaatgtacatatcttaccttgaaaatggtttaatgctttttttaaaaaaagtgtactgatgatctgagccttcagtgattcctaatctctttgctgatggagagtcttgtttcagtgttgatggctgctgatggatcagggtagtggttgctgaaggttggaattgctgtggcgatttcttaaaataagacaataatgaggtttgctgtgtcaattgactcttcctttcacaaaagatttctctgtaacatgcaatgctgcttgatagcattttatccacagtagaacttctttcaaaattggagttagtcctctcaactctgccactgctttatcagtcaggtttataaaatattcaaaatcctttgttgtcatttcaacaatattcacagcatcttcaccatgagtaaattccatctcaaaaaaaactactttgctcatccacagaagcaactcttctagcatctagaatggtgaatgatctccagaagcttttcaatttactttgcccagatccatcagaggaatcattatctatgacagatgtagcctagcaaaatatatttcttaaataagaagacttgaaaggcaaaattactccttgacctatgggctgcagaacagatgttgtgttagcaggcatgaaaacaacatgaaccttcttgtacatcttcatcagagctgttggatgaccaaatgtattgtcaataagcagtagtattttgaaaggaatctttttgtgaagccagtagctctcaacagtaggcttaaaatatttaataaaatatgctgtaaacaaatgtgctgctatcaggctttctttttccatttataaaacacaagcagagtagatttattataattcttaagggccatacgattttcagaatagcaaatgagcattggctccaacttaaagtcaccagctgcattatcctctaacaagagagtcatcctgtcctttgaagcttcgaagccaggcactgacttctctctagctgggaaagtcccagatgtcatcctcttccaatataaggatgtttatttacattgaaaatctgttgtttagtgtatccaccttcatcaatgatcttagctagatcttctggataacttgctgcagcttctacctaagcacttactgcctcaccttttactcatgtattatggagacagcttctttctttaaatctcatgaaccaacctctgctagtttcaaatttttcttctgaagattttttacctttctttcagcctttatagaattgaagagagttaaggctttgctctggattagaccctggctaaaaggaatgttgtggctggtttgattttctatctagaccaccaaagctttctctatgtcagcaataagactgttttgcttccttatcattgtgtgttcactggagcagcacttttcatttccttcttgaacttttcctttgcattcacaacttgcctagcagtttggctcaagaggcctagttctcagcttttgacatgccttcctccctattaagcttttgatttaaagtgagagacatgagactcttcctttcatttgaacacttacagaccactgtagggttatattaatgggcctaatttcaatattaggtcagggaatagggagaccccaggagagagagggagttgggggaacagccagttggtgaaacagtcagaaccacacaacatttattaattaagtttgccatcttacataggcacagttcattgcatcctaagacaattataatagtaacatcaaagaccagtgatcacagaccgccataacagatacaagaataatacaaaaagtctgaaatattgtgagaattaccaaaatctaacacagagacatgaagtgagcacatgctgctgaaaaaatggcactgagggacttattcaacacagggttaccacaaaccttaaatttgtaaaaataaaagaaaataataataataaataaaaacaatatttgcaaagtgcagcaaagaaggggtctccaacccccagggactggtaccctccctgttagtaacccagcctcacagcaggggtgagctgtgggcaaatgagcattaccgcctgagctccatctcctgtcagatcagctgcggcattagattctcacaggagcctgaaccctattgtaaactgcacatgcaagggatccaggttgtgcgctccttatgagaatctaatgcctgatgatctgaggtgggatggtttcatcccgaaattatcccccaccaactgtccattgaaaaaaattgtcctccatgaaaccggtccctggtgctgaaaaggttggggactgctgcaataaagtaaggcacaacaagctgaggaatagccatatttgtttaaattgccatcctcctcaagtctaagcagtaaaaaataatttctttaaacactgaacttaactggattgtaactctatcatagctttccatgttctgttcgctaaaaatcactttggtgcacttcaggctttttcttttttgccttttatagaaaattactttattgaagtataattgatatacaatcaactgcatgtatttaaagtgtacaatttgatgagttttgacacatgggtatatctgtgaaactaccaccagtcaaaataccaaatgtttccattcccccaaaagttacctcatgcccatttataatccatatcttcttccagtcctgtctctagcatccactgatctagtttctgtcactatagtttgcattttccacagtttatataaattgaatagtattttatgtgttctttttttgtcaggcttcttcccattggaataattattttcagatcatctgtgttgttgtacatagcaataggtcattcttttttacttccaagtagtatttcacattgtagatataccacaatttctttaaccattcacctcttaatgaacatttgggttacttctagtttggggatattaaaaataaagctgctatgaacatttgtgaagaaggctttgagtgaacctatgttttcattgctcttgggttactacctagaaatgaaatggctggatcatatggtagggtatgtttaacttaaaaacaagaagtattttctaaagtgtctgtgccattttgtattcccatctgctgtggtggagagcttttggagcacttctagctttctacaaaaggctttgtattatatccaaactccttacctcaaatccccacaacatctcataaagcagacgatataaacccacttatcacatgaaaaaaaaaatgagacaatctacctgttattatatattggagctgagattcaaaccagatctatctaaagtcagagccagtcattgattttttgtttggcttggttttgttcttgtttttgttttcccagcctcctctctttctgcctccaacccctgtatcacagggagatcaaactcatttggatctggatatggaaaaggctttagccagagaacctgggttcattagtaagaataaagagaagagattagtaagagagatagaataaggagaaaaattagctctggctccccgcagtgttctgcaagatacggtattataacaattaaattaaaacttacgagtcccagttcatagttcttagcttgtaggattgctacctacaagccattcatccccacttgtctcctcttattttatttgatgttaaccaagttatttctaacttatgcaataatgtgtctctcacttatcttttaaatgttttttaaaaacatttacagaatattttcatgtaatcaagtgaatggaaggaagcacagaattcattccacacaacccaaggttacatgcatgttattaacttatgctatccccatcccctagcatggtaccttacacacaataaatactctataaatactttgtggtcaaaactcaggaaaccaaacaggccaactgaatagacacatgccatggagataagtcaagaagaccatttcacaaagtgatgtgagaaacaactgaggcaggaaaactgtcctacatgtagtaggcaaatataacaaaccaccccaaaacttagttacttaaagaagaaacatttatttagttcacatttctgtggattggcaatttgtttttggctcattcttcccgactcggttgggcttactcatgtgtctgaaatcaactggcagtgcattgcctccgtcattatctgacaattggctgattgtaagctggagtactggggataagtaggccacatgcctttttattttattttacttcattttgttttaagtgcctggatacatgtgcaagacgtctaggtttgttacataggtaaacatgtaccattgtggtttgctgcacctatcaacccatcacctgggtattatacccccatgcataagctatttattctgatactctccctccccacaccctgccaacgccatcaggcccctgtgtgtgttgtttccctccctgtgttcatgtgttcacattgttcagctcccacttataaatgagaacatgcggtgtttggtgttctgttcctgtgttagtttgctgaggataatggctttgggctccatccatttccctgcaaaggacatgatctcattcctttttacagctacatagcattccatggtgtgtgtgtgtgtatgtgtgtgtatatatatatatatgtatgtgtatatatatataaaacattgtctttatcgagtctatcactagtgggaatttgtgtggattctatatctttgctattgtaaatagtattgcaatgaacatatacatgcatgtatctttataatagaatgattgatgttcctttgggtatatacccagtaatggcattgctgggtcaaatggtatttctggtcctaggtctctgaggaatcaccacattgtcttccacaatggttgaactaatttacattcccaccaacagtgtaaaagtgtttctgtttgtccacaacctcaacagcatctgttgtttcttgctttttaataaacactattctgattggtgtgagatgatatctcattgtggtgttaatttgcatttctctaatgatcagtgatgttgagtttttttcacatgcttgttagttgcatatatgtcttctcttgagaagtgtctctgttcaagtcctttgcccactttttaatagggttgtttgttttcttcttgtaaatttgtttaagttccttgtagattctggatattagactttgtcagatggatagactgcaaaattttctctcattctgtagaatgtttgctcactctgatgatagtttcttttgctgtgtagaagctctttggtttaattagatcccatttgtcaatttttccttttgttgcaattgctgtttatgttttcatcatgaaatttttgcccgtgcctatgtactaaatggtattgcctagattttcttctagggtttttatatttttggactttacatttaagtctttaatccatcatgagttaatttttgtacaaggtgtaaggaaagggtccagtttcattttctgcatatggctagccagttatcccagcacagtttattcaacagggtatcctttccctattgctcatttttgtcagatttgtcaaagatcagatggttgtagatatgcaatcttatttctgagatctctattctgttccattggtctattgtctgtttttgtatcagtaccatgctgttttggttactgtagttttgttgtatagtttgaagtcaggtagtgtgatgcctccagctttgttctttatgcttaagattgtcttggctatatgggctcttttttggatccatgttaattttatagtagctttctctaattccgtgaagaatgtcaatggtagtttaatgagaatagcattgaatctctaaattactttgggcggtatggccattgattcttcctatccatgagcatagaatgtttttccatttgtttgtgtcctctcttatttccctgagcagtggttcgtagttctccttgaagaggtcctccacatcccttgttagctgtattcctaggtattttattctctttgtaacaattgtaatgggaattcattcatgatttggctctctgcttgtctattgttgctgtatagaaatacttgtgatttttgtatgtttattttgtatcctgagaccgctgaatttgcatatcagcttaagaagcttttgggctgagatgatggggttttctagatataggatcatgttatctgcaaacagagacagtttgacttcctctcttcctatttgaatatgctttatttctttctcttgcctgacttccctggccagaacttccaatactatgttgaataggagtggtaagagagggcatccttgtcttatgctggttaaaaggaatgctcccagcttttgcctattcagtatgacattggctgtcagtttgtcataaaaggttctttttattttgaggtatgttccatcaatacctagtatattgagagtttttaacatgaagagatgttgaatttcagcaaaagccttttcctatgtctattgagataattatgtggttactgtctttaattctgtttatgtgatgaattatgtttattgatttgcatatgttgaaccagccttgcatcccagggatgaagacaacttgatcatggtggataagctttttgatgtgctgctgcatttgatttgccagttgaggatttttgcattgatgttcatcagggacattggcctgaactttgttgttgttgttgctgttgctgtattgctgcaaggttctggtatcaggatgatgctggcctcaaaagatgagttgggaggggtctctccttttcaattgtctggaatagtttcagaagaaatggtaccagtgcctcttcgtacctctggtagaattcagctgcaaatctgtctggtcctaggctttttttggttggtaggctatttattattgcctcaatttcataaccttttattggtctatttagggattcaaattctttcagattcagtcttcagaggttgtatgtgtccaggaatttatttatttcttccagattttctagtttatttgcatagatgtgtttatagtattctctgacggctgtttgtatttctgtggggtcaatgatgatatcccctttatgattttttattgtgtctattttattcttctctcttttctcctttatgagtttagctaacagtctattttattaatttttttcaaaaaacaagctcctggattagctgattttttaagggtttttcatatccctatctacttcatttctactgtgatcttggttatttcttgtcttctgctagctttggggtttgtttgcccttggttttctagttctattaattgtgatgttagatttgagatctttctagttttttttttttctttttgagacagagtctcgctctgtggcccaggctggagtgcaatgatacgatcttggctcactgcaacttctgcctcccagttcaagtgattctctcgcctcagcctccctagtagctgggcacccaccaccatgcccagctaatttttgtatttttagtagaggtggacagactggtctcaaactcctgacctcagatgatccacctgctttggcctcccaaagtgctgggattacaggcgtgagccactgtgcccggtcctttctagctttttgatgtggcatttagtgttataaatttccctcttaatactgctttaactgcatcccagagatcctggtactttgtctctttgttctgattggtttctaagaacttcttgatttctgccttaatttcattatttacccaggagtcattcacgagcaagttgttcaatttacatgtagctgtgtggttctttttttttttttttttttttttttttagacagtcttgctctgtcacccaggctagagtgcagtggtgcaatcgcagctcactgcaacctccaccccctggctcaagtaattctcatacctcagcctcctttgtagctgggactaaaggcacatgccaacatgcccagctaatttttgtatttctagtagagacacggtttcatcatgttgaccaggctcgtcttgaactcctgacctcaagtgattcacccacctcagcctcccaaagtgctgagattacaggcatgagccaccacacccatcttacatgtagttatgtggttctgagggggtttcttaagtcttgagctctaatttgattgtgctgtggtctgagagactgtttgttatgattttggttcttttgcatttgctgaggagtgttttacttccaattatgtgattaagtttagagtaagcgccatgtggcgccaagaataacgtatattctgttgtttttgggtggagagttctgtagatatttatcaggtccacttgatccagagctgagttcaagtcctgaatatccttgttaattttctgtctcgatcatctgtctaatattgacagtggggtgttaaagtctcccactattattgtgtgggcatctaagtctctatgtaggtctctaagaatttgttttatgaatctgggtcctcctgtattgggtgcctatatatttaggacagttagctcttcttgttgaatttaactctttaccattatgtaatgcccttgtctttttttaatcttcattggtttaaagtctgttttgtcagaaactaggattgcaacccctgctttttttggctttccatttgcttgggaaattctcctccatccctttattttgagcctatgtgtgtcttcgcccatgagctcagtctcttgaatacaacataccaatgggtcttgactctttacccagcttgccattctgtgttttttaattggggcatttagcccatttacgtttaaggttaatgctgttttatgtgaatttgatactgtcatcatgatgctagctggctattttgcagacttgttgatgtagttgcctcatagtgtctttggtctttgtacttcagtgtggttttgtagtggctggtaatggtttttcttttccacatttagtgcttccttcaggagctcttgcaaggcaggcctggtggtggcaaattccctcagcatttgcttgcctggaaaggatcttatttctcctttgctcatgaagcttagtttggccagatatgaaattctgggttggaaattcttttttttttaagaatgttgaatattggcccccaatctcttctggcttgttgggtttctcaggagaagtccacagtgagtctgacgaacttgcctttgtaggtgacctggcctttctctctggctgcccttaacattttttccttcatttcgaccttggagaatctgatgattatgtgtcttggggttgatctcctcatggagtatcttactggtgttctctggatttcgtgaatttgaatgttggcctgtcttgctaagttgggaatgttctcctggatgataacccaaagtatgttttccaatccccttgtctctttcaggtagtgcaatcagttgtaggttcagtctttttacataagcccatagttctcggaggttttgttcattactttttattctttttttctctaatattgtctgcctgtgttatttccacaagatagtctttaagctctgaaattttttcgtctgcttggtctagttggctattgatacttgtggttgcaatgtgaagttcttgtgctgtgtttttcagctccatcaggtcatttatgttcctctctaaccagagaataaccagttattctgtcatgttttatcatggttctcagattctttacattgggttagaacatgctcctttagctcagtgaagttcattattacccactttctgaagcctacttctgtcaattcattcatctcagcttccacccagttctatgcccttgctggggaggtgctatgatcatttggaggagaagaggtattctggctttttgagtcttcagcatgttttcattgattctttctcatcttcatgagtttatttagcttcaactttgagactgctcacctttggatgggtttttatggggacattttgttgatgctgtggttgttgttgttttctgtttgtttttcttttaacagtcaggccccttttccatgggctgctgcagtttgctgggggtctactcaagaccccttcacctgggtccctcctgcacctgtaggtatcaccagtggaggctgcacaatagcaaagatggctgcctgctccttcctctggaagttctgtcccagaggggcactgatataatgccagtgggaatgctcctgtgtaaggtgtctggtgaccactcttgggggggtctcacccagtcaagaggcacaggatcaggaacccacttaataaagcactctggctgccctttggcagagggggtgcactgcacagggggaaatctcactcatccagactgcctggattcctcagagccaacagggagaaagactaagtctgctgacccagagagactttggccactcctcccctcagcagttccatcccagtgatatcagagttctgtttgtaaacccctggctggaattgctgaaattccccagggaggccccacccagtgaggagggatgggtcagggtccagcctaaagagggagtctggccatgatctgccacagccactgtgctgcactgtggggaattcctcctgggtccaaaccgcccagtttccctggcatcagcaggggaaacacagcagactggagtggccataatgactgctgcccttccaggaagccacagtgacaatggttgcccctccccctgcaaactcagtagtcttaggcagtcttcagccaagtggccaccaagaatgtacacagttctgtgtttgggatccaaggccctggtggcatgggctcacaaaggggatcttctgattcatgggttgcacagatctgtggataaggtgtggtttcccaggtggggtagcacaatcactcactgactcccttggttgggagtgaaagctcccttttccccatgcggctcccacatgggctgttactccaccctgcttttcctcgctctccatgggtcacgccaaccgcctagtcagtccgaatgagagaacctggatacctcatttgccggtgcaggagtcactcactgtttttattcttctcaatgggagcctccaaccccagctgtttctagtcagccatcttgacccttccccaccatatgtattttatcagccaaccagccagcctagatatttaacatggagagcagagtattcccatcatagatgaaaggacatctgtcttggataagtacaagaagtttgtctagaatatcaagtgtctggacacactcccatgatcagtgtaattaatgtaatctctccaacagcattcaccaataccatgaaacatgtcttcatattctttttctaagaagtacaaattttccaagatttattattgttttcactttagacacagaattaattccaatgctttattttacaattgaaatctatcaaccttatactaaaattgacttgttatgctagaaatcactagcaacttttttttttttgagacaggttctcactcctgtcacccaggcgggatgcagtggcacaatcacagctcattgcagcctcaatcttccaggctcaagagagcctcctgcctcattttttgacttttttgtagacacgagttctcactgttatccaggctggtctcaaacttctgggctcaagtggtcctcccaccttggcctcccaaagtgctagaattacaggcaagagccactgtgcccagcccactagcaatttttatatggcagtggttatgtcatctttggtgcatggacctgatatcacatattttggttatttaggctttatttgtttacatcctggttttttttaccatgtttcaaagtattgagttcatgatataaagaatatgttataaatggctcctcaaatggacttaattgaaatccttggcaccatcatactgcatctgtcaacaacctcctctgcctagttagctccaactcatttgttaaggctcaggacaagagttatcttctttaggaaaacatacttaattttggtaacccactctattaattatttttcctatgtgttcccaaacatctatacttccctccatcttaacacttatcccattgtgttataattgtcttactttttctagattatccaacattagactgcatgccttttgcagtatacagtgatgtacatctttgtttcacatagtaaacctgcagacataaatgaaggagtaattaatatatttcaatttacaagattagggaaaaatatatggccacatttattttaatatccaataataatgactttaagcctcaatactgctgatcctaagagttacattctcctagctactagagtcccaagtggtttctggaaatcttgaaaaatgctgacatggtctgtaaaattatccctctttcacacacaaacacacacacacacacacatacacgagacaagaagctcaaatgcacccctatggtctcctttgtcttgctgacctccagaggcccacccatttgtttctgttatctacatttagctgcttccatgaactttttagcactaaacctcattttagaattgtaaatgaagtccaattttctccaacatctgaaccacagtggttcctagggtacaggggatgttccacttctccacaatgttatactcaatcaaagatcaaagaaaaataagccctagactccagaagtcccagctcttcatgatcaactcatctgagttacaagcacgtagacattttccccaaggtgtgcccacattgccagagtatctaggtatgaaagagacacagcatcagcttcatgctgaacccagtactgggccctccctgtggtaagtcaggtaacttcggcactgggcttaatcctccttcaatcccaggtctttaatatctagacatcctcattccttgtgaacactgaggtctgccacaaggaggatgaagtgagatgggcaatcttggtctcattccctggctggatgcttgttgaattcagagaccagaacaagaaagagtccatgggaaaatctaacctttttatctagtagtttgaggtaaaatttgaaattagagaaacgggcctgcttcttgtctgaaaaattctgaaaataggaggctagcttatgtgaccaagaacagcagacaaaggagaaaggtcatcaaatagtcaaggagcaattctatcatttcaggggtcaaggacatatgaaccaagtggcatcataaaagatagtggcctaagacattcaggcaataggagaaaaaaaaaagctgtttcttaattgaacttaacagtttgcacccatgaattaatgggctgaacattaggttctatgaatattggtcttttagacattttagttctgtagtataaggcagcagaaaactatttacagacaccacttctagttaaaaaaaaaaggctctttataacatggtaggctgagatctaaggatttctgcaacttggtaggcagcaagtaagtagctataaaatcattgtgaatacctagcatggggctaggattaggcagggactgataaattccaaatttatcaggaaattaatggcccatataatgaatagaatagtctcagaagtaccgattagaggataggattatcaggattgaagatattgtcttacttaatattcccctcttccatcataaaaatatccattggtatgacataggaaatccaggtctttaaaaactttatctcacttaatttattgactgtcttgagccataagattttcataagggttacccagaattagtcctccttcagtctccacctgaggtgtgatacacagcctcctgtcaacactaccagctccaggttatctctctgttgactttgtcatgctggtagtcatcttggacaattaatgtttcttctaatcctctttctttctgcctggtttactagattaacaagatcgcttttggcctctgaatttctttttgccctctttcctctacccacttccccaacacaaggtttttgaaaacaaacagacttccacttcagcaggaaatcaaagacttcacatgctgatacagttaggctttgtgtccctacccaaatctcatcttgaattgcaatccccataatctccataatccccatctgtcaagggattaccaggtggaggtaactgaatcatggggacagtttcctccatgccattctcataatagtgagtaagttctcataagatctgatggttttataaggggctcttcccccttcactcaaaacttcttcttcctgctgccttgtgaaaagagtgccttgcttccccttcaccttctgccatgattgtaagtttcctgaggcctccccagcaatgctgaactgtgagtcaattaaacctcttttctttataaattacccagtctcaggtattttcttatagcaatgtgagaatggactaatacacatgtgaaagtacattctgaaagtacaaaccatggtgaaagtcaattttcagtaccattcttaagaggagcttagctcaaagtcctattcctctgtattatttgctagctaaatagatattagcaatacctaattatgttcatcctcagggctaaaaatgaggagaaggggagtgagagccactgaactatttaactgcactttgaagactggttttaactaaactaagtagaggacgatgtttacaattttttaaccaaaagtgggaaagaaaactaatacttatctctttgtttttgtaatcattctatatgatagatattatctcattttatgacttataaactgaggcttaaagattaagtaacttgcccaagcaattaagttaaaaaataagggcatctggccaggcgcaggggctcacgcctgtaatcccagcaccttgggaggccgagggaggcagatcacgaggtcaggaaatcgagaccatcctggctaacacagtgaaaccccgtctctactaaaaatacaaaaaattagccgggcgtggtggtgggcgcctgtgggaggctaaggcagaaaaatggagtgaacccaggaggcggagcttgcagtgagccgagatcacgccactgctctccagcctgggtgacagagtgagactctgtctctaaataaataaataaataaataaataaataaataaaggcatccagatttacaaatagattattttccctcaagagcatcaacaagaattcttattttctagttcccagttcattgttttttcatttgacatattgttgtgatttaattatttccagaaagcttaagtttaaactctgaaattcctccatccaaactctctatagattcctttacaaattttttgcccacttttaatatgatataggattatttccttcattcaacattgtcaaaatgttgcttgaaaagttaagacagagcttcaaattccttatgcgctttggccacccagcgtcaaaacagggcaactgcaggcagatgctaacatttttagacaagcatcgcagtacatgttgtctgttttatagcaacaaaaataaatcatgccagaggttccggagtctttgaatggcaaaaagcatgtacatattgaagatgcttccacaacagagagaagtacatgaaaatgagcagccaaattttttaatgaaagattttagtagtgaaaaggatgtaccgattccaaaatgctagaaacaatcgaaaggagtaaaaaataataagaatagagaaaatgagatagaacataatcgtatgtgaggaagcagccaaaaataagagaacgtatattgtcttttcacacttttctttaaggtagaagttaattagacagggtaatgacacacacatacaccccccgccccccaaaaaaacggtgaaattgctaatattgtgttattcagagaaatatctagctggaaaactgaaaggaaacctatagaagtcaagttctaccaagctgtagtgacaaattcaagtgagcaatatcagcaagagatctttaggactagtgttagaacactgtcatctgagtggatttactacacatttaattgtacatagatagcacctgccctttgtcgagcacaatctaataaaataaaaatgatgataccaccaaagagagaagttattagctcattaatccaattacatgaatgacaaagaggagtgaatttcagagatgggtatagagtatgtgcttacttaaaatttaaaaagcagaaaaatgggccaggcacagtggctcatgcctgtaatcccagcactttggcaggccaaggcaggtggatcaaggaggtcaggacatcgagaccatcttggctaacatggtgaaaccctatctctactaaaaatacaaaaaattagctgggcgtggtggtgcccgcctttaatcccagctactcgggaggctgaagcaggagaactgcttgaacctgggaggcggaggttgcagtgagccaagattgtgctgctgcactccagcctgggtgacagagcgaggctccgtctcaaaaaaaaaaaaaaaggtagaaaaatggccatagaactctgggtatgataagaaaaggacttttattgttaataggtcttctttcataatcattcaggggttgggcttaggctccctgagtcaaccgctattgtgaaatcctatctttttagggtgtctgcccaagcacagtgcatgaatgtataagactatagatatagattagaccagtggctctcaacatttttatcaggttccatatatgggataggaagcactctcatatatgtacttgagttattcaaaattcctgactcctttcctgaaagttctttctcttccactgaaaaaagcatggttaatgcaagtcagtaaaaagaacaattatagtaactattctactttacatttcaaagtaaatacatcccaaaagtcaatactctgtcagtagtaactttattattagtgacccacttcacaacaaattatcaactagtatgaaacctgtagtcaagcaataaatattgttaaaggtaataatttaattatcctttgtgattcaagatatacagcaaatcagggaaaagcaggtagaaagaaatttggtgtatagtcaccattagctaacagaattggagaggaagtttcaaatagtactcagctttcctttatttccaaaagtttgtattcaaaatatcccagacccaaaaccttcctgtcattttaatgatattcagcaatggaaattcaacaacctctccaagaatccacctataaagaggtgtttcattgagccctgtatttcacacataagcctacttcttcaggttttgccctttaaggggtttggataagcacattttcatctctttatgatcatgattcatattccccagggataccctctaggaataactcctttctgcccccattagacacttttcgagcttgcaaactattatagctgagcctaccaaagtcgtctgacatccatgaaggaaaagtccctcttctcctctgtctgctgaataacgattctctaaatatgtgtcctcttttcttggtagatagaattgctttcctttgaaaccctgttacaatagttgagattctcatatgctctgccgaaaaaaggtactaataaaagcgaaacatttgaaaaatcctcttttttattcatttggcattctaaattatcaaaggtgtaagccatttctcaagagaaataaataaattataactgtactgatacaacagatttcttaatgattgcattaatgagagcaaaaaatacacctaaccacatgaatccaaaagatataaatgttaaggtaaaaattattaacagaagattaaaacttttaatattagagtgcttaaagatgcctgaaaataagcctaaatatattattgctatctgaagtctttgcttcatatgctagttctaaaaaaagtgcaattatgaaattatataaaatagaggccgcaaattttggcccatctctgaatcaattcatacccgggagccactataaatgcctgtcttttcttttggatttacaccaggcagctgctcatataccccaccacggttcattcccttcttacttgggtaagggtcacagttagagaagtagtaagaaggatgaatggaatagtgttaaagccatgcttcagaattcaggtaaaaacaaaatccctaggtgtactctgtttatggataagctgcctagttttcaagatgattacctgaaccatttaggtaagttcaatttgttaaataattattaaaagtataagttgcagctgggcgtggtggctcacacctgtaatcccagcattttgggaggccgaggtgggcagatcatgaggtcaagagattgagaccatcctgatcaacatggtgaaaccccgtctgtactaaaaatacaaaaattagctgggcatggtggcgcgtgcctgtagtcccagctgctcaggaggctaaggcaggagaatcacttgaacccatgaagcagaggttgcagtgagccgagatcgtgccactgcactccagtctggtgacagactgagactctgtctcaaaaaaaaaaaaaagtgtaagttgccattaggtactcctgtgtgtggtgctgtgccttgttaatacacatggtcttgtctttcagaatttacaatccaagttaaataataaatacttatcatccactgaaattcattaaactcaattattcttctttactccaagagtaggtagcctcaacttgtgaataagatacctttcaagatttttatatattgttttgaactcagaatgtccccatcctatagaaactcattaagatggaaactaggttcctagacctgtgtacaaacaaacaaaaaactattaaacacagagatatcgaatcaagttcccagtttgcatcattaccagtatgtaaacactatttggactcttagccttttggggaactaagaacctaatgaaagcatgtacttctaaaatttcacaaaccattaagatgcaccaggttaagaagggttgatttagccccttgtttatttaggaatttaactgccaatgtgagaaataatcccccttataagaggctgacttatggcccctaaccccaatatggtttggctgtatgcccacccaaatctcatcttgaattcccatgtgttgtgggaggtaattgaattacgggggcagttctttcctgtgctgttttcatgatagggaataagtctcacgagatctgatggttttcaaaatgggagttcccctgcacaagctcgctctctctttgcctgccaccacccatttaagatgtgacttgctcctccttccttctgccatgattgtgaggcctccccagccatgtggaactgtaagtccattaaaccattttttcttcccagtcttgggtatgtctttaccagcagcatgaaaatgaattaatacacccccaaaaatttatatgttgaagtcctaactcctactatctcagaatgtaactgtatttggagataagatcttttttaaagtaattaaattaaaatgaggtctttagggtgggacttaatcgaatatgactggtgcccttgtgcccgtggacacagacatgcacacacacagcaatatcatagaaagatagccaaataaaaaggccttggaaaaaatgaacctgctgaccccttgctctgagaaatctagtctccagaactgtgagaaagtgaatttctgttgtttaagacatcagtctatggtactttgttatggcatccctcacaaactaacacacacacccattatccccaccttctaatataatatgcctcaaagcagtgataagaagggataccactctagagatactatctttaaaggctccatttattttgataaccatttctacttacatccctgcaccaattctgagacccactctcctgactcaaaggggccagactagagagaaaaggaagttgtgcaactctcacctaagagagagtactaagaagtgaaatcattacttttgcacaagctatctctgtatatcctcataagagaccaaaactttccaagacaatcatacctccaggttttggaattgaagaacaaaagtcaatgtctacttgttcacattttgggttattggtaagtcaatttttcacaaattgtttattaattgaatgcagatgtgcagtcaccaaaagcagccctgtgtgtcttatctctaaatcatttgagttttcccttctcagtagttgctccaacagtaggaataacctgaaatgggaaaaggcaaggtaataggatacaagaataacaaattttccagaacatctcatagcctggggaagtactgacattttcaccaagctcttgctattcaactctgctttttagacacaaaaaattaaataagtacaatcttactcagggaaaatttactgcagccacagtctctgctggaaaaaagaaagaacttgtctttcaaaaaaaaaaaaaaaaggggcggaagaacttgtttctcttgcttaagagaaacaactcgtttatcaaaaaaaaaaaaaaacaagaggaagaacttgtttttcttgcttaagaggaagaacttgtttctcttgcttaagagaaacaacttgtttctcttgcttaagagaaacaacttgtttctcaaaaaaaaaaaaaaaaagagatatgacacttgcaagttacattttgtgtgacctaaactccctgaatcttggtttcttatttgtagacagagagctcttatataatagcagctactctaatgataatggttgtcatgagcatcaaatgaaattttataagaattgctatttgtaaagaccagtgggttttgcccatcaaaagatggggtttctagagaccctgtatcaccatggcaagtgaataaagtaacagtttcctcaatccttccccaaggggacagtaccaaaagccattttctcaactaagaaaatacccaaatgtttcaaggacttttggacacagagtctgagttgacactaaagcatcattacattcctctgttagagaaccagcatatgggggtaaagtaacaaatggagtctggccaagtgctatccaattgcgggtccacacacctatccagtagtcactactgccattgctaattgaataacaatagtggacatgcttggtaattagcagaacccccatgttggtaccttagactgtggaataagacccatatagtagagaaaggtaattttaaactctgaaactgctccttcccaagacagtaaattttaacaaacagcatttcatctgtttgttagtgtgggtattggggaagtggtggcagagattaatgacacctttaaaaacctacataatatttggttgctgattttcatcctattccctttcaactgaccagcaaggaccctacaaaaaacagacatatcttggagaatgacagtaaagtaaggcaaactcgatcagaaaagtagttccaactatagatgttgtcccagatgtggcttctttgctagagcagattaccacaaattcttaatacacagtatactattgttgatctgaaaaacgctttattttccaatcttattggaaagatcagaaatggtttgaattcacttgaaacagataggtgtatatgtttacagtcttacccaaagctaggttaattcttttgccctctgacataatgtatttcaaagatgcccgaactggtcatttgtcaaaacatagcattggttcactatttcagtggtaccatattaattggactagacaagcaagaagttagcatatacattacggtataccatatgcattccagagtgcgggagctaaaccctataagggttcagggaaatgccatgtaggtagtatatgggagtccagtgatctggtacaagctgcgacatcctctctaaatgaaacaaattattgtatcttatatgtctctccgcaaaaagggaagcaccatgcctggtattctggtattcctctttggctaacatgtttaacatattacatattggcaaatactgcttttacccaccctctagatagcatgaaaggctacaagctttgagtggggtccaaagcagcagacagccctgcagcaggtacagggagtacttgggccatatgatccagcagacctttcagtatgaaaagcatcagtaataggaaaagataatatgtggagtttatggcaaggccctaaagtaaaaccacaatgtaaatacctaggattctggatcaaaccactccatctgaagtaaggagttacacaccattttttaaaataaaagctctctgcagtgcaactgggccctggtagacagagagaaaagacaaagagtctaattacagaagatcaagtgattaatggactaaaactgtctgttatgaggtaggttctcccagagctgcccaagtcagctgaagaaagcctcttgcccaagatcaagtccctttccagagggaagctcattttcagtgactgatccagatgtaaagttataaggcccagcccttccttcaaagtaggccaactctgaagggccatacctgttccagagcttccctcgaggtggctgaagccattatcacaattgcatcacagctcagctctcccatgaatattcttacttcctctgctctctcacagatatcgatcccaaggacattcttcagtaaacttctttcagacaaatttgcatcttagaatcttttttcccaagcaaacatacctgagatgggtacttaccaaaatgctattgagttgagtaagtgaaaatgagccaggagaaaaaagttttacttctgaacttttcaaaactaatgctgattgaatttatctatttttatgtatgtatttatttatttatttatttatttatttatttatttatttatttttgagacagggtctcactctgttgccctggctggactgcagtgatgcgatcatagctcactgcagcctcagcctcctgggctcaatagatcctcccacttcagtctcccaagtagctgggactacaggcacgcaccgtcacaccgggctaactttttaaatttttagtagagatgaggtcttactatgttgcccaggctggtcttgaacccctaaactcaagcaatcctccccgctcagcctcccaaagtgctgggattacaggagtgagccactgcacctggcctgaattttaatttgtaaagaaaaaacagtggaagaaaggaaatgagggaaggaaaggaaaagagtctctcctacccgtgtctgatgaacacatcccctattacttgaaatgctagtatgtgatcagttgggtaggctcacatccctagttatcaaagtgagggataatgttagcctggagaactaccacaatttgctattcagcaaagaaaaagctaaatatcctaacccaacccgtactgtgtttgcctcctgtgaaaattctgaatttcattcactcatttaataaatatttatttagcacctacaatatgtcaagcacagctctatattttataatatagtactactatctttacgatctttatagctttaaatctatgaatgaaatagatgtttcagatattcttggatataatattatacatagccatttattttctttctctttttttttgttgctttctcattgcaagtcacaaagtcaataaatcagtgataatcagagtagatatctaaaggacatttaaattggaatagttttctatttaccaaagatattctgaaggacatttttcaggctgttacacatttacataggagattcaataatatcatacttgcaaagtagctagacattatgacattttggatttgagatgatagaattaaaatgacaatataagaaaactgtaatttacacataattagaaaagatgaggacaaaatagcattttaattactgacaatgaataacataccagggagaatatagcaaaagaaaatttagtgggaaaacatttttgaaaacacacaaaacaacttaagtttctcacagtaagattatatctctgcaaattgatgaataaaaatatgctccagctttgaaaaaaaaaacttaggttaacataaaagaattcaaaaacaaaactaagagaaattcatctgtgaaattacttaaagtgtagagatgaaaaattagcttcggttaaaactgtaaatgaaatcataggtcacaattttattagtctttaatagaaaacttgaagaagttgctaacacaagtgcttttggaaatgcaaagcattggcagatacaggagaaggttagagaatatttacacacagcaaccccagaatttaaattaaatctacagttagtctaaatcacataaacctgaatttttgtataccaaggatgaagttattcgataataatcaaaagttaattttaatagaaaattccaagtcttgttgaattgaacctttgaaattgggtgtttgttataaaagaaacttattttctaaagaaaagtttgttcacttaaagttgtaagcactatttgtcataaggggttgaatttgctcaccaaatttacaattaaatcactgactatataacctaactgcttttaatataaatcactcacccagtacatgaaaactgtgcctccttctattaagttataactatatctgcaagtgttcctctttcaataggttgttaaagtaaagaaatgattctaacacattacctttaaaacacaacacaaaatctcattcttttgcagaaaatactcaacaagctaagctgtagatatgaactatttttaaacccagtgatcagcagatcaaagagaatataagatgaaaactgaaaatacctagtacattttgggaagtggaaaaatctagaagaaagttatggagcatttttaaacaactaaattattgaaatgttaccaaaaataaaacaactgctcagatgcaattgttttatttaataaaggcaaaacctcactagaggcagaaacaagccaccaaataaaaaaaacctaatgaagttagaactagaacaaagtaaaagtcaaatgaaagaaatggaaacaataaactcaaaggaaaaatcattttaaaaactaatcattacttttaaaaaattacaaaattacacccacttactaaaaaggaaaaaactacaaattaataaaatgagaaataaaatataaaaaacaagacaaaaaatttttaaaaatatctaaaacaataatgagataccactacacacctgtaagaatggtcaaaatcaaaacattacaaccccaaatcctggtgaggatatagagcaacaggaactgtcactcactgctggtagtaatgcaaaatagtacagccattttgggagacagttttgcagtttcttacaaaattaattgcggatgcatgtcatcatatatttgtcaaaacccacaaaatatataacatcaagggtggatcctaataataactgtggacattgagtgataatgacgcatcaatgtaagttcattgactgtaacaaatgtaccactctggtgggagatgttgatagtgggggaagagtatgcgtgtgtgtacgcagtggcatatgggatctctctgtactttccactcaaccttgctattaatctaaaactgctaaaaaaaaatagtctatttagagagaaagaaaagaacaaaggaaggaagagcgaaaagaaagaagggaagggggccgggcgcggtggctcacgcctgtaagaccagcactttggtgaggccgaggcgggcggatcacgaggtcaggagtcgagaccatcctcgctaacacggtgaaaccccatctctactaaaaaatagaaaaattagccgggcatggtagcgggcgcctgtagtcccagctagggaggctgaggcaggagaatggcatgaacccgggaggcggagcttgcagtgagccaagtttgtgccactgcactccagcctgagcgacagagcgagactccgtctaaaaaaaaacaaaaacaaaaacaaaaacaaaacacaagggaagggaagggaaaggaagggaaaggtaaggaaggggaggggaggggagaaggaaggagggaaggaaggaaggggggaaggaaggaaggaaggaaggaaggaaggaaggaaggaaggaaggaagtttgaaagaaaagaaacaaaaatattcaccaaaatacccatctccaaatagctagatgtacagatcatttttgtattctttgatattcattgttcaaaaacattgaaaatattagaccaaccaactgatttagtaggcatctaggttggtaacagatactaagacttattactgggctatgataactaagactattagttcagggaaactaatagtctaagtgctattagttcagggaaaaacaaatagatcaatgactcaggatagataactcagaaagatctattcatatatgaatacttaatatatgacagcagtggcacaaaagattggtggtttttagcaaatgggtgtgggataattgggaaaaataaaattggaccctaacctctcattgattcatgagaatcaattccaggaggatcagagaagtaaatataaagacaaaaatgataaagattttagaaaatagaattggaggatatttttatgaccctagagaaggaaatcatttttaaataagatgcaaaaagctctgaccatcaagttaagattgaaaaaatctagtacattaaggtaaagaatttatgttcaccaaataacaacataaaagggtgataagagaaagcttaaagaggggagaatatatttttaacacgcaactacaaagtgctagtattcaaactcttagaaatcagtaagttggagaaaagaaattgccacagtagagatttctaaaccatgtaaagcaaagagtctaagaagatgggagtggacctgaaaaaaagtaagattaaaacaagcaatgtttattttaggaagtcggtctgtttctgtgatagaggggtgaagagagacattgcattgtaagaaccctcacagatgcctacctgtgcctatatgcctacagagaagcaaaggtataataaacacacacacacacacatctggagtcatagggaaatttcacctcacttcaacacagccctggctcattctcagtataagccacctacatgtaccttgtccaggaaaaacttacctccctcaaaatgagtaatcaagaaagaaccagtgcaggatctaatcaaagaaaccaccagagaaaattaatagggagagcttaatgatagacttttttaaaactttcttcaaaaaatactgctgaagtgtaagtgaaaatggtggcccacacattttaccatgaaatcaacataaatattcaaggatattatttattattattattattattattttgagacggagtcttgctctgtcgcccaggctggagtgccgtgatgcgatctcggctcagtgcaagctccacctcccgggtcatgccattctcctgcctcagtctcacgagtagctgggactacaggtgcccgccaccacgcccagctaattttttttttttttttatttttagtagagatggggtttcaccatgttagccaggatggtctcgatctcctgatctcgtgatccgcccgcctgggcctcccaaagtgctgggattacaggcgtgagccattgtgcctggcctcaaggatattatttttgctccatgaactgaaaacaaagaaatgcaatgtcttcatgtacacacacagcaaccaattaaaagatactaagaaaagatcttataacaatttttaaaaagataaaacacctgagaatatactaaacaaaatgtaagcaaaatctatataaagacaattttaaaatgatattaaaggacaaaaaagaagacaaatgaagcaggaaaccatgttcttgattagaaagactcagctgtattaaaatataaagttttcttaaattaatctataaatttaatgcaatctttttaattaggcaagctgattctaagtttgatacataaaaaagtaagtaatatatgatcaaatgatttattttgagacagggtctcactttgtcacccaggctggaatggtgcaggggcatgatcatggctcagctcactgaagcctctacttcttgggctcaaatgatcctcccacctcagcctctcaagaagctgggaccacaagcatgcgccaaccatccctggctaatattttgtgtgtgtggagatgaggtctccgtatgttgtctaggctggcctaaaactcctgggctcaagcaatcccctcacctcggcctcccaaatgaagtgatttttgacaacagtgccaagaccattcaattcagataggacagtcttttcaataaatgatgctgaaaaaaactggatacaaatatgcaaaaaaaacgaagttggatctttacccaacactacatacaaaaatcaactcaaaaatagattaagacctaaatgcaagtgctaaaactacaaaatttgtgattaagacctaaatgtaagagctaaaactacaaaatttgtagtggaaaaaaagggaaacatttcatgatattggatttggcaatgatttcttggatatgtcaccaaaagcacaggaaacaataaaaaatagataagttggactttatcaagtttttaaattttgtgcatcaaaaaacactatcaacatagtgtaaaggaaacataagatagtatgattgctttggaaattagtatactgggtactcaaaaagataaaagaaacatataattaccatatgatccagcaattctatttctgagtatatatccaaaatcattgaaaggagggacttgaatagatatttttacacctataatcttattattcacaatagccaaatagtggaagcaactcaggtatccatcaatggatgaatgaataaacaaaatgtgttttatatgtgcatacacacacacacacacacacacacacacacacacacacaatggaatattattcagccttaaaaaggaaggaaattctgacacatgctaaaacatggaggaggttttaggacattatgtgaagtccatacaaatgcttcataagcataagcatttgtatgattccacctgtatgacgtaccatgttagatgtcttggtgtatttaggctgccacagcaaaataccataatctgggtggcttatcaataatagaaatttatttcttacagttctggaggctgagaaatccaagatcatggtgccagtaaattctgagtctggtgagtgcccactttctgcttcataggtggctgtcttctcactgtgtccttacatggtggaaggggccagggagctctctgaggtctcttaataggggcactaatcttattcatgagggcttcactctcattcgggaggtaattatacctcccaaatgcctcaccccctaataccatcacattgagcattaaaacttaacatatgaattttggggtgacacaaacatttagaccatagcactggagtattaaaattcatagacacaaaaaataaaatggttgccagaggctggggaaagggagggatggggagttattgtttaatgggttcagactttcagtttgggaagatgaacaaagtcctggtaacaggaattgatggtaacagtggttgcacaataatgagtgtacttaatgccactcaactgtatacttaaacattgataaaatagtaaattttacgttatttacattttcgcagatttttaaaattaaaattaaaaaataagtaatgggcaatacatttctgaaaaagaagagcattaaaaagggcttagttccacacgcctgtaatcccagctactcaggaggcagaggcaggagaatcacttgaacccaggaggcggaggttacagtgagctgagatcacaccactgcactccagcctgggcgacagagtgagactccgtctcataaaaaaatttaaaaaaaaaagttggtggggatggtggcgggcttagtttaatcaattaattaagacaatgtggtactagcacaatattagacaaacagctggaagaaatgaactagaatgtccagaaattgatcaaatataatgagaatttagttgcttcaagtcagtagagaatgactactttagcaaatggtgttgggacaataattatccctccaggaaataatgaaattggatacacactttccaccttataacaataaaaattccagactgatcagactcaaatgtaaataaatcataaagaagctataagaaatcatgtgagaaaaactgttataatcttgaaatcagaaaagcctttctaagcgtgcttctaaactgaaaagccataaaagaaagcactgattaattttactagaaattaattttttaaatacatgaaaaaaacccaacaaagttaaaaactggagaaagctattgcaacatacaaataaatgcttaattttccttatatagtaaagattcctccaaatcaatattaaagaaaaaaaatggaaaacagagaaacatcaaaggagacattttatagaaaaggacatacaagtgactcttagtcatatggatacacaaactttctcacaagaaaagaaatatgtataaagataccccaaaatatgaatttttacatgtaagtttgacaaggatcagaaagtttaataacacattcttggcaaaagcatagagaaacaggcagttttatacattgctgattggtgtataaatgggtttaaaatctgtggagggtaatttggcaatatttataaaaatttccaaagtatgtgcattttgaggcagtactcccacatctagaaacttacactacagatgatctcacataacatgcactccatcctcaaagtgtttaggttttgcccctcaggttatacccattgccttcaagaagttttgtttgttggctctttctaagatgttcatagtggtgtgctctctttactttctccagtaagtacctttgcttaaatgctgttgtgttttaggactccagtcttggtctatatctttctcttgattactctttttttttttttttttgagacggagtctcgctctgccgcccaggctggagtgcagtggggtgatctccgctcactgcaagctccacctcctgggttcacgccattctcccgcctctgcctccccagtagctgggactacaggcacccgccaccacgcctggctaattttgtttttgtatttttagtagagacggagtttcactgtgttagccaagatggtctcgatctcctgacctcacgatccaccctcctcggcctcccaaagtgctgggattacaggcgtgagccaccgcacccggccttgattactcttttaagcaatctcattccactctctgggccttaactaccatcagtaggttaatcacctccaaatctttaatactgatacctatcttgaggcttttaaacctgtgtgtaactcaagcccttcaaaccctgaatatctaagagaaagtttaccccactttccatcctccaaacacattcttcctctcatatttccaaaatcaattaatgactctactattcaccaagttacccaaggcaaaaatatggaagtcatctttagtaatttattcttctttacttttcactcacaatcaaatggtgccagttttcccttgtaaacatttctcaaatctggcccgtcccctgtaaccctgctactgctgctttagttcaggcccatcttttttggcctggcatattgcagcagctaaaccacttctcctgctgtgtatagccttgctctcatcaaggtcaccaaagccttggtagtctatctgaaacccagatttcaatatgggaacaccctgcttaaaatccatcagtgaatccccacttccttcagcctgaagcctagactatgtatcatgacataaggtcttcataatccattcccctttccttatcctcactttatttcttgttattccataccttgcactttgtgttctggtggtgtagaatttctggtagtttcttcctcagatcacattattttttccctctaacctctcttacactcttacatttcttcttggctaagccttatttatctctcaagacagaagtcgttaatcatatcccccaaaaagcctgctctgaacttcctggtcggagtaagtatgcagtcctactgtgtacagttacatatgcatacactaaagtgtctggctgatgggacaagcaggggcagcaaactctctggcagaagggtatttgtctttttttgagaaatagctctgcagatcttttgcccattttaaagtaaattatttgttttcttgctattgagctgagtttctcatgcattctggttattactcctttgttggatagataccgagcaatatttcctcccattctgtaggttgtcttttctctttgtggattatttcctttcctgtgtagaagattttagcttgatataataacatttgtctatttgtgcttttgttgcctgtgcttttgaggtcttatccaaaatgtctttgcccagaccaatgtcctgaagcgtttcccaaagttttcttctcatagtctcaatcctagacttaagtatttaatccatttttattttatttgtgtatatggtgagagggctcaagcttcattcttctgcttatggtttgtagttttctcagtatcatttattgaagagactgccctttccccaatgtacgttcttggtgccttttccaaaaatgagttggctgtaaatgtgtggatttatttcttgattctctcttctgttccatgggtctatgtatatgtttttatgtgggtgccatgttgttttggttactatggctttgtagtgtatatatttactttgtatatacacatacacatgtatatatacacgtgtgtacatacacacacacttatctctgaaataattgttttaatttttaatttttttatcgttgcccaagtagtaaacttagcacctgataggtagtttttcaaccctttccctcttcctccctccccacacttggaatccttcgtgtttattgtttccatctatgtgtccatgtgtacggaatgtttagctcccacttataagtcagaacatgcagtatttggctttggcttgggttgatttcatgtctttgctattgtgaatagtgctgtgataaatatatgagtgcaggtgtctttttggtagaatgacttattttcctgtgggtatatacctagtaatggaattgctggatcaaatggtatttcaatttccagttctttgagaaatctccaaactgctttccacagaggctaaactaatttgctttcccaccaacagtgcataagcattcccttttctctgcaacctcaccaacatctgttattttttgacttttttataatagccattctggctagtataagatagtatctcactgtagttttgatttgcacctctctgattatagtatattttgaactcaggtagtgtgatatctcctactttattttttaagttcaggatttttttggttattcaggatcatttgtgctaccatacaaatttgagaattttttctgtgaagaatgtcattggtattttgataggaattgcattgaatctgtagaaaaatttgggtagcattgacattttaatgatattaactcttctaattaatgagtatggaatatcttctatatttatacaccctcttcaacttctttcatcagtgtcttaacaattttccttgtagagaactttcacttctctggttacatttactcctatgtattatatatttttatagctactataaatggaattattcttttttatttctttttcagttggctgttggcatatataaattctactggtttttatatgttgattttgcatcctgcaactttactaaattcatttatcagttctaacaattcttggtggtgtctaggtttttcgaaatatactattatgtcatctgcaaacaaggataatttgacttcttcctttcctgtttggatgccttcaatttatttttcttgcctaattgctcccgttaggacttccagtactagtactacattgaataaaagaggtaaaagtaggcctttttgtctttttccagatctaaaagaatggctttcaatttttccccattcactataatgctagctgttggtttgtcatatgtggcctttatggttttgaggtatgtcttttttataaccagcttgttgagggtttttatcataaagggatgttgaatattgtcaaacactttttcatcatctaatgaaatgatcatatggtttttgttcttgattctgttaaggtaatgcatatttttattgatttgcatatgttgaaccattcttgtattcctgggcttcccatctaatcattatcaattttctttttaatgtgctattgtatttggttgctagtattttgttcaggatttctacatctatgtccatcaggaacacttgcctgtattttcttttttttttaattgtgtctgtctagttttaatgtcaaggtaattcaagatttgtagaattaatttggaaatattccttcctcttcaattttttggaatagtttaggtaaaattgtattagttcttttttaaatgtttggtagaatttagaagtgaagtcatcgtgtcctggatttttgttgttgttgttgttgttgttgttgggagacttttaaattattgctttgatttcattattcattactggtgagttctggttttctgtttcttcatggttcaatgttagtaggttatatgtgtccataaatttttccattccttcaagttttccaatctgttggcatataggtgttcataatagtctttaatgatcctttgcatttctgtggctatgtggttatgttccccttttcatttctgattttatttatttgggtctaattttttttcttagtctagctaaggttatgttggttttgtttatcttttttaaaaactaacttttaattgattttttttggtatcaattgtattttatttcttctctgatctttgttatttctttcattctactaatttttagtttggcatattcttgcttttcttatgatccttgtgatgcatcattaggttggttatctgaaatcgttctatgtttttgatgtaagcatttattgctacaaacttccctcttagtactgcttttactagatcccatagaattgggtatgttgtgttttcattttcatctctttcaagaaatttttgaattttctctctaatttcttcatcagccccttgatcattcaggaggatgttgttttatttccatgatttctatggttttcaaagttcctcttgttattaatttctagtcttattccattgtggtcagaaaagatatttgatattatttagacttttttgaatttgttgaggcttgttttgtggcctaacataaggtctattctaaagaatgtttttgggttttggtttttctttgtttgtttgtttgtttgtttttgatatagggtctcaccctgtcacccaggctggagtgcagtgacacaatcatgacttagtgtaacttcaacctctagggctcacatgatcttcttgcttcggcctctcaactaacagagaccacagtgtgtaccactaggtctgactaattttttatctttcatagagatgaggtatcactatgttacacaggctggtcttgaactcctgggctcaagcgatcctccttccttggcctcccaaagtgctgggattataggcatgagctaccacacccagccaagaatgtttaatatgccaatgagaaaaatatgtattctgcaacagttggataaaattatctgtaaatgtcatttatgtccatttgatccacagtgtagtttaactctgatgtttctgtatttatttttggtctggatgatctattactaagagctgggtgttgaagtcccatactattactgtattgcagtccatctctccctttatatctattaatgtttgctttatatatttgctttatatatttatatgtttgctttatatattctataatgtttgctctatattgtttgctccaatgttgggtgcatatagattcacaattattatatactcttggcctctttatcattaaataatgaccttgtctctttttacagtctttaacttgaagtttattttatctgatataaatatagctacttgtactctttttggttttccatttgtgtgaaatatctttttccatttcttcactttctacgtctttttggtaaagtgagtttcacgtaggcagcatatagttacgttttgatttctatccattcagccactgtcttttaatcagagaattgagtctgtttacattcagtgttattattgataggtaaagacttactactgctattttgttacatgttttttgttttttttaacaaaattttccaaattttattaagactataaagatttagattgaaaaagttcaatgaatcacaaacagaataaatttaagtttaaaaccaaacaaaagcaatcactatacttaagaacggatacgttatgtggtaaaaacaataaatagctaaggcaagattaatcaaaattcagtatagtggttacctctgcagagaaggctggggaactcaaagctttaaatgtattagtacattatttttccttcttttcttttaattttattttttacagagacaaggtcttgctggtctcaaactcctggcctcaagttatcctccaccttggcatcccaaagattacaggcctgatcttaggggtaaataagtatttttattagttttctttttttccttttttctttgaccttcccaatgtgagtgcatttattattaaattggatatatacaaaatatttcttgcaggtgtgatagacatcacaataaatggaaaattaatgaagttcatcattcttcttctgtgttacttataacacaagccagaaacctggaggtcacccttgacctctccctcacctaccaaaaattcagttaactgtcactttcctacttctccttacctccactctcacaccctggccaaagccaccttgactctctcctgaaatactgatatgtccctttctctccattacaccctcactctaatctaatctccacattgcagccaaagaaaacactttcagccttatctctccatcttgaatctatctcaccatcccctttactatcagaagcaagagtgacaagtaaatttcccaagacatctcatagccaggaaatggcagaggcaggattcaaaatctactagagagtccacgtctttgtttgtttgttctgacatggagtctcactcagtcacccaggctggagtgcaatggcacaatctcagctcactgcaacctgtcccccaggttcaagcaattttcccatctcagccccccgagtagctgggattacaggcacccaccatcatgcccggctaatttttgtatttttagtagagatagggtttcaccatgatggccaggctggtcttgaactcctgatttcaggtgatccacccgcctcagcctcccaaagtgctgagattacaggcatgagccaccacacgcagctgagtccacgtcttatccacccactgtcctactttgggtgatactaggaaagacttagccactgcctagcacagggccatctctggataaagacttatttctcctccaatcaccaccccacctccttttatctgccgttagctcctagttttccttaaatatgacttcaaaccacaactttcaagaaatgcctttctaacccccttacccaattgcaagtcctcactatttgtcctcccagcaatttctgcatctcttttttttttttttttttttttttttttttttgagatacagcctcattctgtcactcgggctggagtgcaattgtgccatcctggctcactacaacctccgcctcccacgttcaagtgattatcctgcctcagcctcctgagtaggtgggactataggtgtgtgccaacatgcccggctaatttttgtactttttgtagagatggggtttcaccatgttggccaggctggactctaacttctaacctcaagtgatctgcccacctcagcctcccaaagtgctaggattacaggtgtgagccactgtgttcagcccactttgtgcatttctagtaacatccctcctccactagattgtgacctccacaagagcaggagcctgttttgcccaccattggaatgcacttcatacactcttgatcactctgatcctctccacgtccatttcttggtgaaagtgctagatcatcaaccagacctctcgtcttacataacaagcaatctggtctgctgaccctacccacgaggctgtgtgtgagccaggtgggctggggaacagagaccagccctggcccagtgaacccgagatggcctgctccatggaagggatctggtgccctggtagaaatgaaagattctttgagtatccaagacctcaatccctggggctagtgaatgggtcaaaaatgagccccttctgctcctgttcttttaatcatgtccactcccctcacttgggagcttggatggagggcacctggatgtccatcccaggtatactggggccactagtaacacagaccgaggcagcaaagtaggacagggtcagggtaggggtgggagagcagggcagacacagccaaggctgtgggcttctctagaggcccagataagcttgagcctgtagaggaccagcttatctccttggcagcactgggcacattcagaaattttgtctatgatctttctgctctgcagaggcagggtgccttcatacacctctgaatccttactgtccatgccatagttttcagaagatagagacatgtccaatggtatatgtccaagaaatgggaggtgcagctagccgccatgagtcctttggatctgactgaggcacctccttgagaagtctttcttccctgacacattctttagttatctccatgctcctcgccatgggtccccacagccttggtgctctcagtattgtaggctcaaaaaacatttgctgaatgaatatagaacttgaagactgcctctcctctgagcagttgccaggtccagtgttctctgcctagaatcctcttccttcattcacctaaggaccaggaacaggaccgtcctgctgtccattgttggcccgtgggtctgagggtcctggccaatgagtcttctggtgttgcttgagatggtcagacctcatgaactcttggctgcactgatcacatttatatggtcaatgtctggtgtgtacccacgtatgtcatctacgctcattagaacggaagaaagaccataaacacctttcccgttgcacaaatagggcctctcacccatgtgcttgcactggtggctaacaaggtaggagcgtttggtataagcttttccgcagttctcgtagttgcagcagtaaggccttgcctctgaggagccccgtctaccagtcctttcctgaggcctggagttctgctctgctgtctgtggagcaggtctgggatgctccggtaggaatgggcctgcttgggagtctggctgacttacgagagtcctgagatcctaaaaccagcaatgactgggactcagctcggggcatcccacgatcatgggcatcttgtgggggcaacatctgagccacggagggggcatagcctgggcctcagtggaaggcatggtcgaggccaacaatgtttcatcagaaggtactgtcgagaggccagggtaaggcattgtagggtccccaatatgagacatcactggaattccagtggaagctgagactggcagcctgaaggccctggccacctttggagtactggcctctcctacaggcattatctggggcccactgaaaatcatcatctcttgctgagggggagacactccctgacagtaaatcatccggaaaggagtgggagtcgcttaggggcagtagctcacgccatgctcaggcagtggcatactgaactgtggccccccttcatccacaatcttccctgatgcctcaacagacaacaagggggccctcggcatctctgtcctgtgaggaaagtgctgaatgcttggtaggccatggttccaagaggtgtgcactccggagcttccagaagatgagtcatgttcaagatgggtgctgagttctacttatcctgggcagcctggtgcgccgcctgccactggctcagcttcccagcttcctgctccttctcagcctgtggtcggctgtacatgaagactaggtggtgtctagactctctgctgaacagacagggagcaacccaccacggcatcgcaggtggttatcgggacattgcccctggttgttttgtaactcctttcttcctttattcctttgttactgtcttcctcagtggttaaatgagtttctcatttaatggtaatatgtttaaatttgttgctttttatttttagtggatctattttaggtttttggaggaaggtttgcttgtttgtttttgttttttagagatggggtctcattgtgtcacccaggctggacccttgggctccagagatccttccaccttagcctcctgagtagctgggactacgggttcatggcactgcacccagcctattatagattttttgctttgttattaccataaggctttccaaaaaatgtcttatagacatggcaagttattttaaatagatgacaacttctgtcgcaaagaaaattaaaaaaaaaacaaatgaaggaaaacctaaaagtctctacactttaacttaattcccccactcatacattctgactttgtgttgtctcaagtatatctttttatacttcctatcttttaacagatttctgcagttattatttttgatagatttgtcctttagtccatactagagatatgaaggattgtataccataattacagtactagaatattctgaatttatgcgtgtatttactttaccagcgagtttatgccttcaaatgttttttttcttttttttttcttttttttttttgagccagtctcactctgtcacccaggctggagtgcaatggtgcaatctcggctcactgcaagctccacctcccgggttcacaccattctcctgcctcagcctccccagtagctgggactacaggtgcctgccaccatgcctggctaatttttttgtattattagtagagacagggtttcaccgtgttagccaagatggtctccatctcctgacctcgtgatctacccacctcagcctcccaaagtgctgggattacaggcgtgagccaccgcacccagcccaaatgttttctttttgcatgttagtatccttttccttcagattgaagaactcccttcagtatttcttgtaagacaggtctagcaatgatgaatttcctcagcttttggttgtctgggaagactttatctctgctttatgtttgaaggaaagctttgttaggtacagtattcttgttggataattttttcccttgaccgaatgtcatccaacttcctcctggcaagttgctttccactgagaaatctgctgttagatgaaaatgagctcctttatttgttatttgcttcttttttctcactacttttagaatcccatctttgttcttgacttttgagagtttattatacgccttgaggtagtcttattcgggttgaatctgtttggtgatatgtgaccttcctgtacctgaatatcagtatctttctctaggtttggaaagtttttggttattattttgttgaatagtcattctaccccttgctctttctcaactcttccttgaacaccaatgactcttatatttttctcttttgagtttattttctatatcttgcaggcattctgtgttcctttttattcttttttcttttctggatgtgcatattctaatagcctgtcttttagctcagtaattcttttttcacatgatccattctgttcgccgggcgcggtggctcacgcctgtaatcccagcactttgggaggccgaggcgggcagatcatgaggtcaggagatcgtagatccattctgttgagagcttctaatgcatttttcagtttaacaaacgtatttctctgttccagatttctgtttgactttttaaattattttaatctctttgttaaatttatctagcaaatttatatattgttttgctgtgttatcttggaattcactgagtttccttaaaactgctttttgatttcttgatctgggagcttactattaccatgtcattagaattggttccgggtttcttgctttgtccatttggagatgtcatgattccctgtttgttgttgtttcttataaacatacatgtgttgcttcactttgaagaataatttattctagtctttgctatctggcttgttttcaactttctaggatatgtttacctagagattctttgcagttgcctgtaagtgcccttaatcctagattgctgcttcctttttggcattagatggtgcattaagccccagtttgcttcagctcttgaaatcattcagagcacttcccaacccagattaggggttacagggtcccaaaggggataccctgattgtgtgggaaggttggctaggagttcatgcacagaagaccaatggagggtgcatcctacatcttggtgttgctgaacagccaatctgcttttacgtctctggctgagataaagagcagagtttcatgagctggggtctccagtcctgcctctgttctttgttgctagctagactcaggagtttttctccctataggcatttgcaatgcttcccatgaaataaagcaggaatggttttcctgcaagggaacccaggatggtgggaaaattggctgtctcccttgatgtcactttttatagtgtggaaacaatgggtttccacatggcatctggcagatggaaggaggggcttgatgggtagaaaagtccatttctcttattgtcttctcagagtttctcagtgctttgtggtcctaggggtcatctcagccccaaatttaaattctaggatactgctggctataatcttggcaccagatatttgttttcaattttccgtggggaagagtgaagccagattgcttccacttcacattttggttacatcactcaacaataaccatttgtttttgtgagcactttccatgtgccaggcactgtgctaaatattttacctacattatctcatttaatcctcccaacagctctctgagttaggaactattatgttcctattttacaaatgacaaatctgaggcttggagagataagtaacttgcccagagttagacattttgattccacaatccaaacccttaatactcagtaattttaattgaaaccttcaatttataaatctgaccatcccacaagatttagagcagaaattatactttatttatctttttagccctgataactagcattgtctgaaatattctaagtacttactaaatatttgttgaactaaacctaatctataatgacttgtatttacaagttatcagcagaactacagtatacagtatatggatacgtaggtatgttttctgtatatttatatatatcctaaatgtgactgattatccttggaccactcttgctctgccactgcagcttcctctaagccaattataatccatctttgcaattccagaaaacaaatgtctgattccaagacgatttataaatatgcacgtttttatgaaacagaagaacaaaactttttccaaattccctttgaagactttagatcttttcacagaatttctctttccacagaagccagcctttcactcccttttttccctctgtgccaatttcagttatttctacctccagagttttctccctgactgttcaatctatagtgaagataaatttagctctttctttaggtttattccatttctatctgcaatgggctgattatattttctaaaggtgaccaccacaataaatctcataccacaagcccacctcttaagtgctgttcattcttggttcacatctttttcttgatgtattcttcctaagtaattccaccttatctctgtattttaactaccattagtatgctaatggcccctgaattataagcactgatcctcatctttagacttttacacaaaacattataatacaaatctcattacagaatgacagtgatactcctctcatcaattaatagctcctctttttagttttggtggacaattgtgactagttcaatcaaaagagcagggtaggagtgatgctaaatgactcccaagaacagatcacagaaatgatatgcacttctaccttgttttcttgggatgctccctcttttaacctagccaccatgttgtgaaaaaagaaaaacagctgcttgtagaggccatgtgtaagtgatccatctgaccaagaaccccaactgaggtcctatgcaacagccagtattaaccatcagatatgtgaccgagtgagtcttcaaatgattccaatctcccaccattgagttatacaccaccccatctgatgctgcatgaagcagaagtgagctgtccccactgagcccttttcaaattgaagtttcatgagttaaataaatgattgttgttgttttaagccactaactttcaagtgggttgttacgcagaaaagataactagaatagtcagccaatgcttctctcaacattactaaagatctactctccaagaaggacagagaaagagtataaaaaatgtttctagttatatatattatataacaaatatatatgttgcataattatatatatttatcgtacataaatatatactaaatatgttatataatgataataataaaaacaaaactgggccaggctccgtggctcacatctgtaatcccagcactctgggaggccgatgtgggcggatcacctgaggtcaggagttcaagatcagcctggccaacatgatgaaaccctgtctctattaaaaatacaaaaattagctgggcgtgatggtgtgcacctgtaatcccagctactctggaggctgaggcaggagaatctcttaaacccaggaggcagagattgcagtgagccgagatagcgctatggcactccagcctgggtgacagagcaagactctgtctcagggaaaaaaaaaaaactaacaataattaatttactgtatagtaaacttaatgtagtttgttgtatggtttataattgtaatgctcacatatgcttttaaattattataatgtattatttttgctagtattatttttattaatattatcactaagtcccaagataaagcccttgggaatcatgacaactagttgaatgaatagattccattcaattattttattcaaattttggcatctacaatggttgaccagaaaaatagcatccattatagaatacatccaataaagcaggggttcccaacccccaggccacggaccggtagcagtccatggtctgttaggaaccagactgcagagcaggaagtgagcagtgggcaagtgagagaagctgaggtccaccttctgtcagattagcggcggcattagattctcatagtagcatgaaccatattgtgaacggtgcatgggagggatctaagttgcatgccccttatgagaatctaatgcctgatgatttgaagtgaaatagtttcatcccaaaactattctcccacccaagtttgtggaaaaattgtcctccaggaaaccagtccctggtgccaaaaaaggttggggaccactgttttaaaggcttattctgtctacttttgcaacatgttatataaactccttgaggaagtatgtctgatttcggttttggtaccaaccagcaccaaacacagaacagtagaactcatttctaggctcagacactccctttgcagcacatgaggagagttgcagacccagaatcaagggtagttaagcaagcagcaaagataggaaatactagcaattgttatttggactgtaactatccctatttttcttttgatgccataaaactaatttttcttggctgctaatcaaagaaaagcatgaccattatagcagccaagcatttctccaggagaggtaaatgtaattctcagattcaagaagtttttagcttgacctcaacctgagtggacttaccaggcaaatgatggctgactcaggcagtctgaatttataagtactattgcatttattcgttgcactataatttcttgtttccattgttgtgtaatattttagccagtaaataatacttaattggcttcctaattatcaggcatggagatctaaggtggctttcattgcagagttgttttctgacatagggacttacagattgtaggcttgaataaacccttgaagatttgtatgttacctacatttggaaatattatagctagccagacttttaatattttaaactctacattcaaacatgaaagaaagaatgattaatactgacctgccactgaatatgaccttatcatcacatcctatagacttctaatctcagttttcttcattaaaaacaagcacctcatcaaaattccatgcaacaaacaaatatttattgaatacccacttacacaagtccctgtgctacatgctttaagtgaggtaaaaaaaggatatttttaacaatttgaaggtcaccaggcatagatgaagatagttaagagagttcatactgagcagtgaaagccttcccctctttcctctctttaacttcagagagaagaaaaaaggaaaataaagagaattctaagaatgatgacaaaggaaattaccaagacaatagcaaacatcaaagcagagaatgcaattaattcagactagcagaaggtcagatgtgtccagtgttgatgtttccaaaaaagaaaatggaactgataaattatcttaaagtttaggagtaatgaaaattacactgagacatattttatgaatattttgaaagtatgagaaaattctagccaaattcaaaaaactaataaataaaaattaaaaatcaagcaattatcaacttaaaaaaagaaaaaaggaaaaatgaacaagatagaagataaaagtatagtttaacacttggctcagcagtgatagatatttgcatagccataagatgcagacacagaatagagatttatttgtttattaattttagagatgggtctctgtcacccatgctggaccaccacactgggttgttttgagatgaggaggtctcactgtgttacccaggctggtcttcaactcttggcttcatgtgatcctctctaataagaaattaaggtacaattacatagaagagtgacagaaaggaatgacaagatgtagataagctaaagtttttatgttcccaaacaggaaaacaacagatgtccatgactgataatctagagatggcagtatgcacatattattttttaatggagataaatatctgattaagtttttgaaaagcggcagctttggctgggcatagtctataagggttaaaaagccaagcttcttagtttgagaaaatacagtcctttgaagtaaaattaacatagatggaagtatacatacccttgtaaacataatctatgagtaataggaactaaccaacttttaaaactcccatcaaaaacattttgttaacaaaagcaccttttttcaaacccagattcatttaaacatcctttgaaatgagccattgacctgaaaattggataacaatgtgtgttttaccaaattgtttggaaaactatagcctaaattattaagattttaagccagttatttagattttttaaatattaagctgtttaatatattaagaaaatgaaaatacctgtagttataaaagattttcatgctttgaataagaaagaccagctggaagccagtttctcattacatatttttatattgagacaatgtttgaatgtcaggctgctccacttactaaccttactgataaaagaagcatggcaggaaaatgctttaatacttatgatgctgaacctgcaatatagccctaacaaatttggctttaagaactgcctaattacatatttataaatgcatgttatgtatctactaggctggaatgaagccctatagccatttcagtttatcaagtaaatgaagtaattttttaaaaacattatgcagttgattacacaaagcaacaatacatactcatgactatttgtaaaggctaccacttatggactgattttctgtttcattgtgtgctaaaatgccaggcacttgaaccagcaaaaactaactatatgccagaaagctgagatgatggctcagtagcaatattctctaatcactacagctattatttaacattcgctgcacattggcagcattctaatcattttataaaatgaccctgcccagtgaatttacagttaacatcaaacaaagttaagacacgaaaatgtcattgaaccattacaacatctgctttttattcctcttccaagctgtttaacattcttttttgagacagggtcttgctctatcacccagactgaagggcagtggtagcatcatggctcactgcagccttgacctctccagctcaagcaatcctgccttagcctctcaagtaactgggactactctagctcccagggcatgtgccaccacacagggctaatttgttttgtcttttgtagatgcagggtctcactatgttgcccaggcttgtctctaactactgggtttaagcagtcctcctgccttgacttcccaaagtgttgggattacaagtatgagccaccatacctggcctttttttttttttctatcaggaatgtattgtatgctcattaagaaaattaagaaaaacaaagaaaactaaaaagaaaaaaaaatcatccataatccatagtctatcatctgaactcaatcattgttatttgggggtgtttcttttgtctttttttttttttttgcataatgttttatttggggtttacggaagaacaaagatagatatataaatcatgccacatatatattatagttacatacacacacatgcatttttttaatcttttctattttaataacactgcatcaaggcttttcccatgttatcatgcactccttatgaaataatttttaagatgtgacaatttattgaccaaatatgcaacagtttattaaaccatccacaatcgtttactatttgatttacttccattttgccagaataaataatgctctaatcagtatacttgggtatgtttccttctggatatctgaagaagtttcactacggtagattccaagatgtaaaattgctgaggcatgaggttgaaacatctacaactttactaaacaccaaattgtcccccaaagtagtttttttctatttatactcctatcagcagagcattaaaattcttattgttgcacaacctcattaacactagataatgtcaaacttttaaaaaatttgccaaactgatggatgtgaaatggtatctcattgcacttttattttgccttttcatatttactagttttggtatgtttattgtcattcaggtctcctttttggtaaatttatctatcttttgcctatttctctttgtttattttcttacaatttgtagtaattccattttttgtcagtaatactcacttcaaatatcttctgccactctgtggtttatctttaatgatatcttacattgtacagaagtttttcatttcagtataggcaaatttgtcactctcttactttaaggttgatattttatatctcataaaataaagctttccctactcagagtgtataaaaatattttttttctaaaaattttaagttgtttttacatctggaatgtaatctgtgtttgatatgaaatcaaaattacattttattttttcctatggatatctagtgtctcagcaccacataatgaatagtgcaacatttctccattgctttgtaatggaacctctgttatatttcaatttcctctatatgcatttatctaattgcaagctctcaatttcttccctttgtccatcccttactaataccacaatattttacttaatagataattgatatttgtgtgatcttatgttcaacaagtttgccaagtacttttacatgtctgcagattatcttgaatttccacatggacattgacatattgtcaataaatagagacaattttcctcttatctcacaattatgctctatttttatattattaatattgtttagtatgacttagttttcttgaccagttttgttgaaatatatatatacacatttttctatgtaatacatataaatatatattatacataaatatataaaatgtatattttatagaatatacattaaaatatttttataaatatataaaaatgtaatttttatatatttatatattttatttataatacatatagatacatatatacatatttatatataaagcaatatatatatatgccttttcaaaagatcagatttggggttttttgattcttattttggtttctgttttctattttattaatttctgtagcttattctgttgtacttttttcaacaccttaagataaaattttagctcattagttttcatcttttcttatatatatataagaccttaaatatcactcttggtattgttttagcaccaaattacttttattgttattccttttttttttttttgagacggagtctcactctgtcgcccaggctggagtgcagtggcgcaatctcagctcactgcaagctccgcctcccaggttcacaccattctcccgcctcaggctcccaagtagctgggactacaggcgcccgccacaatgcccagctaattttttgtatttttagtagagacggggtttcaccgtgttagccaggatggtctcaatctcctgacctcgtgatctgcccgcctgggcctcccaaagtgctgggattacaagcgtgagccaccgtgcccggcccacttttattgttattcctttctatatgctatgtaatctctaactatgatttattttaccatgaaccatttggtttagttttcaaggtggtatttaccacatggactgttttagatttgttgaaatttgctttatgattgtactactcaatttttgtaaatatttcatcattatttgaaataacctatattctttaattgggctgaagaatcaatatattatcattagatcaagcttgttaattatgttgtcctaatcttctgtatctttactaatttttgctttatgagtttttaaaacagtttgtcactttctacttgtaattctttgtctttctgctttatgtgttttgaggtcatttatttagaaacaaaaagattcagaatggtacattttcctaataagctgttctttttaccattagtgactttttttctaataagtctttttccctcaaagtctgtattattgatatttgattgatagcagatgtaaagacaactctaaattttgatatgccagcaaaaccagtattctttcatcttgcattccatttgcctggcatgttgttttctatcctcttactttcaacatttctgtctttaagatgcctcttataaacagcttaaggctgttttgttttgttttttttaattaggtataagaacctctgatttttaacaagtcaaattaatctatttacatttaatgtgaatatatttggccttatttctacaatcttatatatatgttttctatatgctatgccttccattgcttctttttcctgcatgctgctgttattgtttccttgtctgccttatattagattgcttaatttactgtattatttcccccttctactcttttgaaagtttttaactctttttttaatcagtgacccttaaatttttaacatgcttgtcttaagatctaaagttaactgatacttctatcttatgtaagttggaactaattcctcgccaccatttttttcacaacaaaatcatttattattgtgtagtattaaagttatagaggtgtaatgtcaaaacagaattgagtaaaccctacaggtcagtgagagcactctaattccacttactctcattcaacttctctcaaaaactattatcaccaaacattctgaaagtgcagacatcagcatttgccttgttctttcttgtagacaagctcctcgagttttcctactttactgtgcattacaactcatgtcatgttcaaagtacaaaaccgcatttttttactttaagggcaaagtaaggaattttcaacagtacctttgactacacaacaattttctagatagctttggaacataacccttacgtagaatgtgacttcacagtgatatattttttccttttaccaggccaactagaagatccataaacaattagatttttaaaagaaaagctaaaatctataccttgcaggaataaaagttaccttgcagattcccaaagacctataatcaggcaaatgacacattcagttgtaagttttagtgttccctttattttgagtgtttttattcaaataagttgcaactttattgttcagagaaatagtcactgaattaaaatcaatgaaaaattagaaagactgtttctttttttgagtttttgagtttttgtttctttttcttttcttggctctccttttgatgcagaattttttgctctttagttcagctaaaatcttgttcttgtgtcacaaccaggaaaaattaggtacatggacacattgaaaggtgaggagagcagaatttattaaaagaaagctctcagaaaaaaggcggtcctttcaacaggcttccacctcacagactgaataccaggtcaccacacatgagctgaagaggccaggctttgcccaactttatcaggtgtggattccaggtgggtccaccccattgtcccagtgcaggggtgggcccttagtttgagccactccatattgatttatttcccttactaggcatgtgttaagggacagaatgtctttgaacatgacacatgagttgtaatgcacagcaaagtaggaaaacccaaggagctcgtctatacatacaacgcatgtgttaagggacagaatttttcactgtgggcacgtttaggtaagctccctgtgcacaatggcctgggcagcatttggctgtctccttctctatcacttttatgaggtgtataacctttttaaaaatgtgtaaaacttattattttactgtattgtggcaagaacacttaacatgagatctcaacacatttttaagtgtacagtaaattattgttgactataggtaccaagtcgtcaagcagatctctagagcttattcatcttgctggacttaatgcctgtttattaccagctctccatatctccttccactccatttactttatttgttgaaattatttcccttcaaattcttttttatttttaattgcggcaaaatatatataataaaatttactaacttaaacatttttaagtgtgtgatttagtagttaagtacattaacattgttgtgcacccagtctcccaaactcatcttgcaaaactgacactctgtacccattaaacaacaactacccattgctcccttccctcagcatctagcaatcatcatttgagaaaatggctcagagcagtctgaagaatgtgagagatgcaaaattatcaggcccagacagcagtgagcatgatacttcagtcgcatcccccacacccatgccccagggtaattgtttaaaaatttttttttttcattccttccctgtggtttcagactagctgataaattacctaaaatgttaccacacattgcacaatgtgaccctcacccagtatcttcatgttcctggaatttgtgatagaaagaacaatgtacagccaattgatagactgttattttttaaattcttggtaaacaacttagggactgctccctccttttttttcctaaaaaaaaaaaaaaaaaggaaaaagaccacttgtaactgctgttaatcagagcatatattgagggcaactagaatctgatttccaggctgcagtcctcacctttggcttaaattaactctctacttaatctgtgtccttcaagaatagcttgatgccatccttgtggtaatgagtaagttcttactctattagttcccatgacagttgattattaaaaagagcctggcacctctccccacgctctcccacttttcctctctcaccatgtgatctttgcatatgctaaatgtgcctcagtttcttcctctttgcctgagattcttcccttaggtcaaaatttctggtgtagtcagcaagattcagagcaaccttccaaatacccattgttccctctcagactcagtgctcagtaccagcaaaaacccattgcattcttccaacaccagatatttcgctgggtgcaaaagtgtgaggtctacattttatgtgggcttctttttcaaactctcttttttctttaagagcaagagtttccatctccatctctaaacaggagattcagacaaagagccctgaagagaatttttgccctctccacctgtgcctcacagcgggtttggattacagtattggcagtctagcaagggtggtttcacttttttggggggcctaaaattaagtaatgtcttagtccatttagtgttactctaaaggaatacctgagtctgggtaatttataatgaaaaagggtttatttgtctcagattctgatgtctgtaaaagttcaagatggggcatctgcatctggtgagaagcactcatggtggaaggcagaaggacttcttttagcaagcatcaatatgttgtaaattcagtctctttaaaaataactctttatttcccttcgtcttgaatactttaactgaatacagaattttaagttaacagtaattttccccttggcactttgaagatgatattctggcatatatttctggcatatactataactgatgataagttttctatccaatgcttctatctaaatcgcatttttaaaataaggaactatcttttctttttatatttaagatttttctctgagttcatatttttatgttcatgagaatgggtcaaggtatttatagttatgcatgtatatgtatgacttgttttatttttattgttcttctcaaactcattataatttctgtacatatagatgtgtgtgggtgtgtatgtgtgtgagttttgttcttattaaattcattgtaatttctgaatctaaaaactagaggtttttttccattctggaaaaaaaataggtattatgtctttgaatattgcctgtttattttttattctggaactcctattaaacatgttgggttttggccattctctatgtatcttaactgttcttccatattttcatgctttatctttctggcaaagcagtatattagagaaattttcagcaaatgattactcccttcccctctcctacagaaggaatgtacttccctgatattaattgaggtcttgcatagttaggcttgtctcttgatctctttttgcaacgagaacatgactcagctagcctctggtttaaagaggatgagagatatgtggaacagaccaggacctgacctaatcctcagagagcagctgagtctcgccaagaccagccaatctccagctaacccaaaaatgcatgagtaggaaatatgcgtatattgttgtatggcactaggactttgggtgttttgaaagtcagaaaaattgggctgattcagaatttgatgtataaagtacagtgctgccataactaaaacccaaaatatgtggcactggctttgggaatgggcagcaggtagtcatgtaattgttataggaggctggaataatgacaacagtattatgcagtggcaaaacatttggtaaaattgtcacctgcaatactatggaatacagaacatgcagatctagtaaacttgtgaatttggatgaggtgatttcaaagaagaatattgaagagcaggctgctgccaggtgcctttgaaaaagcataagaaagtggtgagctcaaaatgaactgcctgggttacaaacagaattgagaggaaatagagagtttagaaatactgaaagttgtaggcttaaaaatgaaactgtttctcaacatgtccccagctcaaagaaaaagtaaattttggccactgccagggtaaagaccaaaacaagggtgtggtgcaggcccaagtgccctgaaagcagactctgagatggaaaatagcctgtaaagaagtgctctcaggatcaacacttgtggaagaaaggaagcaaacaagattgagcagagaaagaaagtgggctgtaattaatttataaaaagaacttaaccaacccactgaagctagattgctcctcacagttgtttccaatagaggaaatgaagccaagtctttaaaaccctacatcaattagttattgcacactggctgccccctgaagagagcatgaactacacagggtgcctcttttctattgagagtgattcccaaagaagactgacagctgagatcagtagaaatcccagcagctagaggaataaattctttagtcatgaaggatgatgttaatggcacagtagattatccaattcaattcaccccatgctccactcagacctttatttttgcaaaagtttttgaagcagctccagaacttgggaagaaagttagcgagatacatagattccattgcaaagaccaaaagtgatactcaatatatgcttcctgatctaccattctagagtttcctcaccttgactagctcctctgctggtcttgttggcttacctggtgggatgatccagtcactcatccttgagagtcaccatacctttctcaggtcatcaatactttactagtcaatttactgtcaaagttgtgcaagggcataccaagagatgccaaatacattcctttttgccatcactgtataagagcagcctgacctcctcccagtatttagaatgataaacctgccaggatggtgactgctctcgttgcctgatcctttggcagtagaaggcagaaatgccccagtgacagccatagtttaaagttcactgggcctcttgctgtgtctcctggtggaaatgctcaccttttgggaacaatacctctaaacctacaaatctcagagctatggagatgagtagcacaaaatccccaattgggtcactgacaatgatggtaaacaggaccacctctacttctacatttgattcccatatccataaattctatttgctgggaacacagcaacatatgctggccattgattcagagggtatactgcatagggtattattgtatctaaggtggtgcttaagctgattcttcaacaggccattccgttgctctatccggccggcaattgtttacagttctgggtgaagtgttatgtgaaagaatcagtgaatcacatggtcacgtgctcactaccacatctcttttgcaataaaatgaatccctttgtttgatgtgatattgggaagatcctgtgtcatgagatcaaacactccataagtatggtggaagcagctgaagcactattggcaggaaaggaaaatccatacctgaaatatgtgtcaattctaatcaagatgaatcattcattgccccttacataatagaagggatccatgtaattaacttgtcatttgattctcctccatggatgattctatatcaagggctcaatattggtctctgttcctgacaggttggacatttggcagcagcaatagccaaatcactgttggtaagtgagagctcatgctgtggggccatccacagtcatgatgactacccttcttgtgcccattgttccagctttgaggatagaagcttgttgatgccaaccattggagtcattctgtttattcagtacctcttttgtgatatatcctttatggttggtgttcacttgtaatgcaaaaatctttacactttgtgccgagtcccataggtccatccacatactttctcatcagacttcctagtcctaaactttctaacatttcttcttccttaaagtaggctcttctactacttatcactgctataacaaattaccataaacttagtgactgagacaacagaagtattgtctcttacatttctgtaaaagtctgacacaattcttactgtgctaaaaatcaaggttttagcaaggctctgatcctttctggaggctttaacagagaattcatttccttgttccttctaaattcgagaagccttccacattccttggctcatggcccctttattccatcttcaaagccattcttccatagtcacatcactctctggccataaccaggaaagtgtctcctacttttaaggattcatatgattagattggacccaactgaattattcaggaaaatccccccatttcaaggtccttaattttaatcacatctgtaaagtcccttttgccatttaaagtaatatattcacaagttctggtattacgatatagtcctctttggggagccactcttctgccttccatgatttaagtccacatggcagtctaaaatatgtctttgatctgttatgtatctatgtttgtggttacagaacattcacaagcatttaaaaatattctttgcaccatattcttccaacagcttccaaatacattgttttatccctaagaataccttcacacaaaagactgagtaaagctacactttaaatattatccttcttaatctctttgtaattgtgtttctttgatatgggtcactactaattttaacacagctgtttatgttattacataacaactttgtgatcttattaatttgtttatcttattattaaaatcaaatttagtagctgctctggtctaagggaggcaaatattttataaatcattactactatatgttaagctctaatatgagtttcacattcattattttattcacctttaaatgaatcctataaaagaagtctagtatcactattttacagatgagaaaactaatgtttccagtatcacagaactagttaagtatcggagtagggcatacaaatataggtctttttgactctaaaatgcatactattttcactatatccttaataaattcccattgagtaaattaaattatttgtagaggtatactatacatccagcacatttcatgaatttctcatgctgtagaaatcatgtccaatgtattacacagaagccttgggccactaataattcttgaactgacatagttcaagacgacctagatagaagcatactggctagaaacaaaaatcaatggtaaatatttttatgaaatcactagacttgttttttacttcattgttggtatcttctaatttgacctaaatctactgtgtggtctatagtgtcctgttgcttagcaaaacctggaacacattataaagaatacctatttaatgtttccatcagtcctgaaacatagatacattcttgaagacatgctattatattgttctaagactctttgtgagcaatttaaatccttttgccatctcagcccaaatgaagtgaagggttgtccaaacagaaagtctgaataattcagcttctcttgggagaaaacaaagttaatctctctggaatctatatagctgcagaatcactggaccattgaacaactctctacttcactttggtagtatagatttccaagatccatgagcataaaataattatttttaaactttcgaatgaaacagatttaaagtaaaacggatcaagtatataacattaacgtattttaattaaatttgacatttaaaacaaaagatcagcatatttttaaatgagtataaaaatttaaaaatgatcagcatatttgaaatgatttttagctttctaaagtccatccattattatgaggcttaagaaagacttcagaggctgcttaaacatttcaatattttcatgtagaggttctttatcaaccttgaaatctgtcaataaatgtaaataacaagaaaatataaagtaggcagatttttcctactatgaaccttgattttatctatatcactcttagttgaatgggataaattaacactttcttgaaagtttcctaccatacacgtacatttaatttttaaatattcaggacctgcagaatatactatgcctattaaggtttttttattataattatagacctgttagatacttgatttgcttatcaattcaaatcaatttagttctggccaggcacagtggctcatgcctgtaatcgcagcactttgggaggctgaggcaggtggatcacttgaggtcaggagatcgagaccagcctggccaacatggtgaaaccccatctctactaaaaatacaaaaattaggctgggcatggtggcacatgcatgtaatcccagctactcaggaggctgaggcacgagaatctcttgaacttgagaggcgaaggttgcagtgagcggagatcataccactgcactccagtctgggcaactggagagtgagactctgtctcaaataaataaaaacaaatcaatttagttctattagcatgtagtgagagtccactatagggcagactgatatcaaatttcatggtatagtcagctttctagtacactttatgtacttcttaaaaagaggataggccaggcacgtggctcatgcctttaatcccagcactttgggaggctgaggcgggcagatcgccagaggtcgggagtttgagaccagcctggccagcatggtgaaaccctgtctctactaaaaatacaaaatttagccaggcatgttgacaggtgcctgtaatcccagctactcaagaagctgaggcaggagaatcgcttgaacccgggaggcagaggttgcagtgagcccagatcatgccattgcactccagcctgggcaacagagtgagactccatctccaaaaaaaaaaaggatataaagtaggaacctagattaattaatttgtagaccttatgcccatgctaaaattaaactttctagatcctataggacagaaaatataattttgtttgctctaatttttttaaatttagacctttaattgggatagacagctcaacagtcccacaactccttattatccccaacagatttccttcacccatttacattagctgtatctaacccctgcaagtatttgagtttcagcctccgaaatctaatcactttattttataataagaaaacgaatggtcacagagaataaataacttagccaaggttaccagctagcaagtggcactgagccagagtcaaaatccaagtatagtggctctttgtaaaaggcagtgttttcatcttactatattttcattctctttttcagaacctaacatttgtctgaaataaggaccctccgtaattttttttagctttcaaaagtgcctcgtggcacttacaatttttattcatatcccaagtttcaaaatatcattaacagattaagcactttactacatgctattttggtgtttgcactactcccccgcctttccactgccttttagctgctctgagagctggtaaagagagacgagaattatacaattacataagataaaagaatgaaaggtttagagaggtgagtaagaatgagggggtggtagggtcgtgggcgggaataactgtagaggaaggacaaggagaaggaaaaactgagacagtggttcctgaatatcaaagacaggaagagttgagaaataaagacagccagtcatcaaacactgttcttttatgggatgtgctgattctgtgtgtgtgtatgtacatgtgtatatatatatacatatatatgtgtgtgtgtgtgtgtgtgtgtgtgtgtgtgtgtgtgtgatttgctaagtccactcaaattttaggcagatttttcccttaggctcatgtagccagtcccacaaaaaattatgaaataggcaaaacttatcttgaaattctcctttgtactttcttccattaaactgtattacaaaatgcagtgctttttttctctggttcaccccaggctgaaaactggctctctttgacactttagttttaaacctaactctctcctggagtatttacatttgaagtcccatctcttaattgttgagtaaaagaacctctcttaaaggaattgtttaaatatcagtaagcagagaggtttggaattactagagggtaaaggaatccttcctagagaatctctaatttcacaaccaactgtgactttaagaggtccagcttgttcatatctagcctaagtactcagcatactcagctctctaggttacgttttaaattgacaaaaaaggtacagagagtctgagaaggcaataacaatcaccaagcaaactggtacattcatcaaaagttaactaaggaatgcatcagtgaagacattcattctaaataagcagatataatccctgatttatattcaattattggtgattaaggtgaagtagcttttctcatcaatttatctacttaattattcagtagggatgtggactttaaccaatttatgaacaatatcttatttctcttcataattgagagaagcaccagtaaaataagcagaatttccataaactgatcaactgagatcactaaaacgttgattgctgtaaacaaaataataaaggtcaatagaaaaattgaagtttacccaaactttccagattctgcagccagactgcctggtttcaatttaggttctgccacttacttgcctcaattccttatctatagacttgaaataataatagtaccaaaatcatgtgattgctgtgagaattaagttagtattttaaagtgtttagaaccatgctaggcactctgtaagtgcttgctaaataaaatactataattttatctctttcctgactctgatggcagttacttaggtctacaaaacggctccataaatctgatgtataattcaaattggcattgaatttacacgtctatatccagttaacctgctgccttgagcatggtgcaagtgaagaaaatattattttacttcattgtatggttgtagctgtcaacacttcaaaaatgcattttctcttaagggaaagtggacattagggtataaatgatttattgctacttggttatgttatgtttatacaatgaaggagagcacagttttgccttcaaagcccctaacaccttttttcaatagctttattgaggtataattcacatactgtacaattcaccctgtcatcaataaacaatactagtgtttattgaatggctattacgtcccaggcaataaacacaaattgtttcatttaatcttcataaaaatcccttaaggtaggtattattatactcaattttatgattcaattaaagggcaagaactttgcagctaaaggttgaagtgaggtttgaacttacatccatgtagctccaatatatgttttccatattctgcagcttcccttcagaaaattactttgttctctttcagagagtgactggaaaaagggggaaaatgtgacttttagagggtagccgtggttagagaaactcttaatcttttaacctgtcaggagaaaagccagaaatagcagtcactgaaagttgttttaaaactctcaattcaaggttggcatgataatgcaaaatagtattattacgcagaaataagcaatcataatcataatactgatatacacaaatcataatgccaatatacactactttcacttggattcagcacttcctactagcataactacacctacctttatcgcattctcaccaaatgagttagggtttaaaatgggcaaacgagaaatgatgtggggattccggcccatcttttagacttttcacatcaatatggtatgttaaaatcacacccctggacatcatgctcgggaatacttaagtaattttgccacaattcatttactaaacaaatatttaggtaatttttacatgtccatcagtactgtgctaaccaccaggtgtacaaaggctaaaacaaaagatgaacccagttccagctcttaaagagtttacattttagttcaggctttcagaaggagaggcagtgagtgtgctatactgtatagcatgtgggctcttgaaccagcctctccactcacctctccacctgctgtgtgaccttggcatttgatttttaagcgactcgattttctattttgtaacataatcgttgacttcaaattaaagacatatctagtttcatttcaggtgtacggcaccatacgaagatggggctaagaaaatgttactatcctgtataaacaagagggtttctcgcacgttttcttcctttagtatctggcattattcaatactgtccatattctactccctgttcaccgatgaactgggacatgtttttcactgcagcttagtcgtctgggtgtgcctggggaggcgtcacaaagagcctataaagggtccccacctacaacgggagtaagagcgctggaaggaacccaggaagggcatggagaccaagcgttcggtttcggagtgttttttgtgtgtgcccatattcaccgagcttgggttctcccactcgtaacgaaaagcccagtcactgagctgctacattttctgccatatcttagccgtccccacgcccccacaccaccgccccaccctacctcaccctcaagcgtgagtgaatgcgcaaataagggttttcaaggcgtcagtgggaaagagggaggggaaggcaacgctgaggacgggaggacagggcggtggcatccctctagcgagagagagccagagccctcggcggcgaggaaagctaaaacccggcagtcccgggccagaggaggccaaggcaagatgctggacgggcggggaccgatggggggcagcagaccatggccgcgcacccagtgcgcccccggggcctcctcttgtcccgaggagcacccccgctcccggtgtcttttggtttcgaccggccgactgggaggggccgtgggacgccattcccataatgctctggggcgtgccgccgccgtcgctgccacctcccctaccgctagtggaagaagatggcggaaggcggagcggcggatctggacacccagcggtctgacatcgcgacgctgctcaaaacctcgctccggaaaggggacacctggtaagagaaaggggttgagatgcccgcggttgcccgaggatagtggagaagtgggcgggagccgcgagctggttctttcgctagtgacaggtgcgggcaggtccggcggcggccgccggggcagcgggattttggccgcttctgaaatgttggggcaaaggttggactctagatgagggtcagggttcttggcttgccagggcatgctgaaaggtatccggggagcggcggcggcggcggttctgactcgtgcggttctcttcgtcctccttccttccgtagtgccgctcccacctcaggccttcccgaatgataggttatagtggtttggtttgagtcttatatacgccgttttgacaggtcccggtgccgcggcttatcacgatctcaccggctttacttctctgttcatttcctttcctagaattgtcggcgtccaagttcccttttattctgattcttggtcttccgggaggcaggctgcaggatgtttgcggtctgtactacacaggtggcatgtcagggctccacataagagaaagaaaccctagtttccagttccttgtcaaaggagggagaggagtagggaaccttgggcttatgagagaccacgtggtcttgtgctttagtggtggcttgatagaagccggcagcgtttctgttagacgtgcagcccttcccttctgtttgaaagataatgtaggcctgcaaaaagtagataagtccacttgaggcttaactaactgctaatattcaaacttgtaaaataccaaaggttatacatttaaaatactgaaggatgtatgtggacattttcacacttgtcgaccatatcaagtggcatctacaataacttaaatatgtgaatatgtaacataatttaaaattccttattttttgggaagcataatgtgcctcttcattataataaaacatattttcactttccactgttaccataacagtagtatataattcatagagtgtttcagtatggcatagtgaaaggaacagtaagatttagacctgagttatgtcacagtttcaccactcaacttgcagtatggctttgaggagagttaatttaaatcattgcacctcattatcttcatgctgtaaaatggacagtaattttattata

SEQ ID NO: 599 - DNA, 106515 bp, Homo sapiens
  source 1..106515: mol_type = genomic DNA
tggggagctggcagcccccccacacaaacagaccttggtgtcctggatcagcttcaggtacctgatggggtgagaggatcggtgcagaggctcagaggccaggccagtttggtgacccatcagctgaatttcagactccgggtccccagccccttcagagacactgggaccgctttggggctgccctgaaggctccagagggtggaggggaagggcatggtgcttttgctaacactctcacgtcccctgggagcaggtgggtggccaccctgaggccactgcacgggggaagggacagagagaggtggggtgggggaggcggaggggaagctgcaaccagctcccgtggggcagggggtcggcgggggtttgtccctgctgtgggcacctggagcgacacctgtgggggcagctcctcatctgacctgcactaacactaatctttagtcagctccagggactcacccaccctgaaagaccccatcctcaaccctatcaatagctctagttgcatttccggcaaaatctgcaagagctcggttctttgtctaaccctccagggaaacaaacagttcacctcccctggaatgtcctcatccccttcccggggtcccaacaccctccccagcccccaccctactccatctcaggctggctgcctctgaccctaaaagtccaattctgtttgtctgccgggttggggcactcatctgtggcccagccaggcagaaagacagagaaccgggggaaactcccgtctacatgaatcatggggcagaacctggggatttatccaacaaccaagagggcgcctggactttgaagaaaggcagcacttgcccagaggagactgtttcaggagctagaccccaccctgctcttggggtgggtggtggcatttcccagggggcacctgggctcttgcctagtggtctggggtccctggtactttatttctaaagttgtccacatcagcaggaggtgagtggaatagacagtggaggccaggtacctggaaactgctccaggggctgtggtgggagggtgacccaggtgccacccacctgagatgtggtcatggttggttttgtctgagctggttgtttgcttgcagagagggaacccaaaggtcacaccagaaagcaggcttccagtgcagtgaaggcgagggctggaaagccgcacccacccccgcacccacccctgcacttgtgtagtcctcacgtgtcctctacatcctgggccagagggagaggccccttcagcagcggctctcccaacaaagaggaaggcccccaccaagagcacgcactcagaaccccagagttctaggaggcagaatggatggcaccaagaggtcagcggtctagagtgggtctcccagagcccgccccgtggcagcacctcatgtgaccactggcgcctttgcccaggttctccacactggaaaagtggagaatggctagatggtgccccctccaataatccacaaacctgggtgacacttattatccttcagtctttattttaaataaggcccctgtcctttaccctcccaaagtacttttagacattttccttctgcccagaatcctctgcccggtcccctgtagctagtgtccagacactggtcacagacctccactgagcccagttagagcgctgacctcccatctcaggacttcttggcccttgcccattgccatactctactgtcagattttaaaactgctagaccatgtgccaattcacattgacttgtagccactaggaccctgtgtctttttctattgtgcttgttcatggccaggaatcaacgaactttggacagacaatcagtagactttgggtgtggccttggtgaaggcttcccactttggtgacttgcatgtgcccctctttgttgagggggttttgaagcagcttctgcgtcattgggagctggctgctgcgcccagcctgaggccctggaccccttttgcaccatcctaatttcaacatccagatgtcaattcagaaaattattatatcattctaatgactcaaaacataaaatcccctcttttgtctcatgttgaagagctgatgacatcggacctatcaggtcagacttattttcctagtcagagactgaatggcatattttcaaagcacttcgtctaaattgcatggcacacaccccaggagcccaaagatctggttgttctcttgagatgcagagaggaggcccacaggtggcggaggggtgaaggaggaggagccaccacttccgaagcatcagaatgtcaaaatctaagttttccacgaggtcagcagcaggtgtctcctggtctggagagggcatggaagtggccacaggtctggacttctctgggtggatgtgagggagggtgattgaactggaggagggggctggcttgagaccttcctgttctatgttgggggggatactgagggtccgtctcactgggacgaagagggggcacagatgcaggtatgcccaggtacctgagtcccagccaaagcggcaaagccagacctcccgggattccttgagtttggacaaagggtgtcccgacgacgataaagagccaggagcagagagccctgcatcttgcctggggccccttgtatctctggctcatggcctgtcctgggcacggggaggaagggagacacccgtaataataacagagaccgcactggactatgggggatcacaatgggtttcagtttgattgagagaaaataaggtaagggacacgtgctcgcctgagtctctggagtaagagtcacgccttggagaaggagggcagccaaaggccacgcagaaattgggggttcaaggtttgcccagccggccccaaaggtgtgggggtccacatggcctcacccaggggccagtggggtggctttgctcatttgagggtgtgcagggtacatatgtgtctgccccgggaatccaagtagccccagtgcgctcctgccttgcttccctagagcgagcccacggtaccatagtcctcgtgggatgaatgcatgaatgatgtggaaggagccagaacagggctgcagacaggatgctctctcatagaaggaccccagagaacttcccctctggagcctgtgcggctggttgagtgtaaacgctgagtcatgctcgctgcccagctgtgtggcaagggcactccctaggcactgagcagccaccgccagccctgagggctgcgggacaacagagagccgggcctgcccgaggcacggcccctgaaaagtgtggcccgccaggtggcacctatgttctcttgcccggcgtgggtgactacacagttgtcatttacgggggaagtagggcacagcagaggtgaacatgaggatgatgctgcgtctgggctgtatccagggaaccagctgccggacaaattggaagggaccttcttggcaggacaggtccagttggtggcctgaggtggggttgtggtgggccttgtccccctgcagggctgacccgtgcaggtgggatcatccttcctgaggagctgccctgcccagtcccgttgccttggaggcggtgacatcaggggcccctgagccaccaggttcctccatcttcatgtggccaccacggctgttgcagagtccacggtaagagccaggacgtggcttccaggcaggatggggaagcacctcccactcccacatggacaaagatttctttaaacggagccaccagccatgcctggtagtgggtgccctccctaggcaggcagtgctggctctgctctttcctgggggaagcccactgctcctcctggggcctagtccgtgggacctgcccagccagccttgggaggggcacccctgggcatgtggagaggaggtgatgaggcgctcagatgtcgaggccaaggccaggtaggtggcaggtgagacaggcccttcagacatgagacccgagtgatgtagataagaggtatgttcccctccagcccccgcccccaggcaaaaggggaaaagacacacagagaacaacagaaaacagttggaaaccccaaagggcgcttgatgaagagctggagctccccgccccccgtgctccgggaggaccaggagacctgctccatgggccaaaccgcctttgcccatccctcccctgacccctgctgcacggttccaagggcttggtagggcagcctgaattttccctaactcccactcctaggaaggtcaaattcaccttgtttgcctccttaaaaattcacaaatgcaggactgaggcttttcctgaaaccagagccccggcagccaaggctcaataaaatactgtttgtgtttccaggcactggggtgggagcgaggctcccagttgctcagagttaaccggccctttcccgagtgagaccccgcgagcactcgtcaattctcccatcaccctccatcgccgcctgctgggggggcctgaggtccggagctgctcttcctcctggcagcccagcctgcaggcctagtgctgtccaaccacagcccagagggcaaggcctcccaaagtgggcgcttgctgagcccctggccagcctcccaggaccctcagtccccacagcccccatccagctctcttttacaccttcccctcccccatctcagaacatgggagaagccgggcacactggcgtctgcaggctgcccttgggctgccacggggccctgtttgcccagcacagagcctgccgtgctttgacccagcaagtcccaccgcaccttccagaggcactgtacagcgtgcatctgttgtcagtacagttttatttgctgtggaatccatgagagccggaagcatcgttggggccgtggctagcagagctcatggtgaccagtcctgggcctgaccaatgggtgattacatttaaaaaccaaaacaaaacaaaacaaaataccaagaacagatcacttgccatggacatcagtaatctattggtaatggtggaaatttcatgaaaatttcccctaaaccataacaaaaactgtcctccttaccccaaaagtgctggaggaaagatggttgcatgacttgacctctctttgaacttgaaatgctaccttcctacccggaaatgcgacacactatacttaaaaggccagatggctgcaggctgtttgcacccctggctctgcccagggacacccctctcctggttctaatgctcagacccaggaggcagagtccgcagcccgagggagcttcaaggccgaggggtaggacctgcagggcccacaccacccttctgatggagagctttgcacatgcattcacacacacatgcctggcgggatcgcagaggatgggtctcgtggcaggagtgggcagaatggggtgcattttacagaagagtcacagagaggctcgccctcggcggaggacacacagctgggtgggcgtgtgggagtgcaggtgtgctgactccgaaccaagggagagctctccgtcctgagctcgctgcccctcacgatgcacacggctgatggctgaggtcagcggtctcttccctgagtggcaggtgtggtccctgggacttcataaaccatcctcatgacagttttacacttagagtccccaatgcactcccaggaggtggcctgggcaggcaggcatcattattctcatgttacaggtgaggaaactgaggctgaaggaggcagaaggccacatacccggggagaatcgcaggcagcaggggccaggccccttccacagcactgcctctcacccttctcccgaccaacccccaagggcatgcctctggcttcatgaaccttcgggggaaattagctttctagtttgggggcggttccctctgactggagacaggacagaatgctttcacacccaggaacggccgtgcagcctggcttagaaacaagggacgaagtggatcctgaggctcattccctggggactccaagaatggggcaggcccagctgcgcagccagtcctggctccactgacttaggctgcacccctgcacatatgtgtgtgtgtgtgtgcatgcgtgcgtgtgtgcatgtgcgtgtgtgtgtgtgtgtgtgtgtgtgtgtgtgcgcattttcccaggggacctctcctccttcctctgaggcaaagtggcctgcaggggcccctgcagagcatacagggaggtgcttccttccctctgcccagcgagcaaagggtggagccttggcacccccagcaaccccctccaagggtggagccttggcacccccagcccccaccccgcaagggaaaggggaagctgcacgaggagcaagatttcattccccagagggcacagcttgggcagattcccatcatctaggggctgtgccccacatctatttctgccaaacaagaagcagacgagggggctcaggggggcgggcctcacaggaacggaagcaccaccccacctctattccctgtggcctccaaaagagctgggcaacctctgccagccactaccccttagcccaaggggagtcctcattccagagccagcatcttcatcttgtcctgatgccctgcccacccccgccgagcttcacactgggctgctatggaaaactgaaaggtcagagggtggaggtcctctccctcctggacatggaaacctccccctgcctggcacttcggctggtcaggaacagtggctgctcatggagctgccctcccaccttcagaccctcctcctcccccgcaggggtgggctggggccctccctccctctgtacttgatccatgacttgtgagttctgagtcctcagggccgagacttgagtcagaaccttctggagcagtacgcatttcccctctgcacctggtgaggacaccaggctcctcgcttcctccccagatctctgagtgctcacccgaccccccaaccctggcgggaccttccagggctggcaagcatcgagcctgaccacgttgcctcttgggtgccagcacgcccacatcaaaggtgtcccctcttcccagaggccctgagcaacatcgggcgacgctgtcagcagacattagcagcagagctgcaccacgcatcaacttttaagtatgcgcacacacgtacgccagccaataacattaagtgtcattttaaaaaatgggttaaataagcagcattgctgaggatggccgtgcagggctgattatcccctatttgcacgttctggcggtgggaaggctagaagtctaatgactgaattatcgccctaatgcctctcgctggctgggaataatcccggggcaacagctgccgcggggtttttggctggtttcctctaattgcatccagattaagggagttgtggaggggcggggcttctccatcccccgcggagcagcgtctcctccgccaagccctgaacacccagctcatggcttccgaggtcctggctggtccgagaggtgcagacctcactggggtccgggccagcccatggggagcgtgaggtgcgagcagtgcacggtgggggtggcacttggtgcagagatgcagctgattggtccgggtcaggtcttggggagcagcaggggtgagaagctgtagggccaggagactcagaaggaatgccttctactaggaccttcccaagtgaggggagccctggacctgtctatcctcttcctccctcccaaacacagcggttcaaaggcacgaggtatctagtgaaatgctaggaccagggacgctattcccctggagcaggcgggtggggaaggagtgctccaaagcaggcattattaggacacagactctccagagtcccagttgtttagccctccaaattctcagcctactgccacccgactgtgcagagcggacaataaagtggcaggcctgtcccccaccccttaatgctgagcccagccacgtgacttgctgtggccaaggggagagctgcaggtgtggtgtccaccaaggcttggaaaggcacttgctgtctctccctccgtgcctttggctgtgccatggctggcctgcaggagggatgcaagagaccacagagcagggccaggtccgacctctgcaccatgagcatcccctgggacttaacaacccactggccctaaacaaacaagcccagcctagaccagaagaatcaccctgcccagactgctgactcctgccctagatcagtgctgactgttgcaggccaccgagtgttggcggatttgttacacagtattgctgtggcaatggatataactggtttctagcggagggtcagggcagaagctccagccacctccctagcccagaaaggcaaccctctcttcccagaagcaacatggatgagaagcccaccccattcccaccacaggatcccccactgctagacagcaatggtcggtaccccaggatctgggcactgatggggctccaggacggtctcctcaaaaggctcttaggcagacagacctgggaacttggaagtacctgctggacgacctgggttcatggagaaaagagaagccgagaaggtggaggaggccggtaagtggtgacctccgctttcctgctgaggaacactgctttgaagtggcatggcccagcagtgcccaccctccagggagaaaagctttgagtgggaagaagccttctatcctggtccccatgatggttctcagcacatcaagggtttttctccccagaaggacgcgatggaggatttcaggagggatttggtctcctcgctcaaggagtggctttctgtgcaaatggctcgacacttctaagctggctgggagttctcacagcatagatcgcacacccttttctgtccatctctaaatcccagaaggagcaactgatacacaatcttttggaagagggagagtctgttgggaagacctcattcccacatagaaggcagagagccctgagtgctggctccttcactgtggtcgctctcacgtccgaccacctgagaagctgacttacatatctgagttcacaggtcctgaagggaagtggaagagtctaactatttccaggtgtccttgtcttggttggtcagctaatacactaccacgtccctgggacaaagcagatcattgtcagaggatcttgcaaacacaaacacgcacgcacgtgtgcatgcatgcatgcacgcagggacacacgcacacatcgacccattcaagccccagctggttgctgtatttggtggagttgaccttaaacaacgccaaggaacctcacgtagaagacccccagcaaagaaaaaggcatcagatgcttctccaacagcctgaggctcaggctcctgggcagacagttcccttcgtgtaccaggaggacgaaatgtttaaacggataaacattacaagcgccagctcctcaagcctgactgctcttccgcctctctatccccacatcggttgggctttttatcttttgcttttcttttatggcagatgcctttccatcggcatcccagctgtggctggggacgttttgggaagtgtgtttggctcactccgagagaacgaggtctcaagaggaagtgtgtctggcttgcaaagatgtccctgggcctggacaggaccccgctgtgttctgcagccctcgacgcagtgggtgagtgaggccttcctctcctgtctctgctttcctcattgcctggcgacgctgtctggctgccctcgagggtggagcaaatcctgggacatgttgaaatcctccagggcagccagcaggagagcccagccagcctgcgtctcaggtgcggtggctgcgcgttccactgcagcgtttcaggagctgactttcctctgggtggctgtagatctgacttctgtcacttccagactctaattttgtcattaatatgaaaaggttcctctcatgttgcccaaaagcattttccttaggtttctaccgtcccctgtccccttcacgcccagccccaccccctcccgtgcccagggcctctgaggaggtcccctcaacccctgtccggtgtcgggggcccgacctatctgcggaagccgaagccgtcctgcggcgtctttgggcccttcttgccttccctcagggacttgggggaaggcatctccaccgtgcccccgtagggacagctctccgagccgggatggtggccggtgcactccaccgcgggcatggagccgctgtcccacatgcctgacccgcacagcttacacagatcgtgcaggctgcaggggatccggggcaggaggcggaactggtacagcaaactcctcgcctgcagacagaggacggggggtgaggaggggccgggggacagcctggcagcctagggtccccatgggagtggccaaagacagcaacagcagcaacaacggcctgcacctcgggggctcaccgagtcctggactgagggctctgcctgcatctcccaccatcaccggcaccacggggccctgggtcttaggtggctgcagtgatgggacccacaaggcactcgggctgtgctcacaggtggctcgaggtgaacaaggcccttgaatgggcttcattcaggagggtgaacaggaccaacaccagcacagggccgggtggcgtccagccaagcccacctgtccctttggcagcacccctctcttcttcccccgcaccttgctccaccccccacccccagcagcctctcagctcctgcaggatctgtgtcctgtgccagaggacaccaccgacctcgggacccccgctcagtgccctgaggaccaccagagagctaacgggcagcatctccaggaggcgtctgggaagtgggggagggggccaaagcccaaggtccccagtattctggccaccctgtccccaggtccagcctccttctcagtgttcccagttctgggttgtaagcgaggtaccccagggtagggaacctgtcctgtccgtcagccccggtgaattcgttccctcctcagccagcgagggaggctcctgtgtcagggctggcaccccaggaaagtgaggtgacacagccaggccgagacaggtgctgaccacgaggccttagtggggagcccccagtgctatgggtgggggagggcacgtgctggggggccatggtggggatggggctctgggggcggggcccacatctggggcagcctcacctttctgagaacgagctggtggggtggggctttgggggcggggcggggtggggcccacatctggggcagcctcaccttccggagaacgagctccccgttcatgtgcatggccaggtttccgaagtgcaggagcatctggtccgtggccagctgctgctcgatgacgtcatccccgtagatggccacgatggccacgcagatgaaaaggtggaagtagtccgtctgtggaggcgggtagagttcagacacgggctctgaccgagccccaggccctgcactcagggggaaactgagtgccagggtgcgagtgagggctccagggcgaggggtctgggctcacagcccagctcgggggccgtgtggccctgggcaagctgcaccgcctcttcggccctaagtttccccacctgcacatggggtctgtcccagtacccgcatgcccaggctgctgtgacatccagaggggacgatgctgagctcagcccccacgggctgctgctgctctcctgggtggtgatgtgggtggtctccatgacagggtgggggtgggggggtacaaagagcacccttcctcagaaggcctggcctgtgctcatggggaggactcatttgtaatggtcctgagcaacggtgtgtgcggaagtctgggtcagaactcactccagcgggtcatggaatgcgcctctggcagccacccacgggtcagcctgtcctcctggctccaggccacaccccccaatcatgccccagagatgactctagggtttgtggctagaaaagtgggaagatcctaacagagcgggcacagcagctcacccacagggtggctgaaatgatcgccctgtccttgagcctcttttcgggcatactttgaggactccgcagccctccctttaaagaccgcctcacggggcctgccagcaacgcgctgtgtgcagcaggaagcccacgccaggtcctgacggctgcatcctgtgtgctctccggcctggccgcctcaagacacgccacctttgatgcacacgcgcttccggaggcacaggaaggacgggggcactgggaagtccatgtttagtctcctgacgtcgaccacacaaaccagacggaacggtgtccccggcccaggctgagcggagcacaccatgagggcagaggctacaggtgactcccacgccccagcctgctcctggagagaccatgcaccaggctgcccggctgcttcctctgaactaatctgggacggtcttgttttggctctgacggatccttttgcagtgatttgaactgtggctggtgcgagacacagcggaggggttgcaggaaggtggacgcccagcttctctgggagaggaatgtggggagggagagggagggcacgatctccacagcctgcacagcataggcagatttcagttcccaggacaggcagggcgtagggccgtccagccccaccacatgctgacagcggacggatagcatcaaaagcctttctcgctcaggggtcactgaacagttaaaggcctcacctggcagcaaccttcccattccacagagctcactctcagctcatcagcagcccacccccacccccaccccgtaatactaccaaattgatcgagggatgggaccgaccgtggctaaatcaagcccacagtctgaaaacaacagaaacttgctttgtggacttccaacacaatggcagccaacagagatcccacgtcacgtgggcctcccgctggaattctgactagatctcattacacttgggacacagtaggtgtccatgggaaagggacccatctgccgggccacgcgctgagttcacgggtaacatcagcctgaacgtaaaggaatgagggcggcaaatctgccactgggaaaacgtgcaatgaggcacgattttttttaattcgggagtggtgggaatgaagcctctcagaccgtccatgccgtgcttcccttcgttaatgcagatcgtccaccctgcacgtccacgtccagcaggctgagccaggagggaaacctagacccgggccaggggcgagccgatgaccgcatgcaaaggcggcgtgtggtaccggcactcggtggcttcagactcgctttcatcagacatcagccccctgcggtgtgagtgaggacaggagacgctgacgcaaatgtcttccagcagatgggtgtttgcctccatcttcagggttctctgacggaggctgctggagctgccgtggtggatagagccagctcctgcaaaagggtccagccctcctggatgcgtcgatgtgagttttttttttaaaaggctgatggactcaaagagacttgcttatcttttgacatctccagcttgtccctagtttgggcgttaaggccatgtgacagagccagtgctgtgctccaaggggaatttgctgagaagatgctggtgacggtggacggagagtggaagtcggtatcactgattggggccctctggaggggccgacagggaagtgggatctcaggccctttctctgcacagcagggtaacgggtgagtcggccctcgtggcagggcggtcccgagggggtggagcggtgctggctcacgctcgtgggcaccagcgtcctgggctgctgtggcctagtgtaggccccccacagtgtcactcacactgattggttgtgacaggagggagctcagccccagaaagtggtaatgagtgcagtcagcgggcaatttgcatcgatttcagtgactggggaggcgagctgtaaggtctgaagccagccacgtgggacgggaaggcagtcgccgtatggggggctaatgtgtggctgtgggtggggggcggcgaggcggacaggggcagcaggcagggtggccacggtggttcaggggccatggtcccaacctccccagccctggcccctgccctggtcacctggtagtgggcccagcaggcctcccagatccgcagcgcttcggcctcggggaactcccgcttgaagcacagaaggagccagcggtggcagaagagcatctgcaggccgtcctcgcccagcgagaccaggtgctggtagaagcgcacgtgcgtcagccgcagcagctcgcgcaggtacagctgggggtgaggccgtcacgcgttagttagctccggtcccatgcggcctgctgcccaggaagcccactcccactggggcccttccctgggccaccccagcctggaaaagcacacccaggggcctctacctgctgcatgtgcctgcccccccaacgctccattccgccgctggaatcggctcacacctgcctctgccagttcctcccagatctgactgttccggaggctgtggtgtggtccagggtgaggcagagtgttgtgcccgggcgtggcaggacgctggcagccgctccatggccaggaaggctccccaccctcagtgcacacttgggggctgtttcccacgtccactcctcctggtgaggtgagtggatcatccagggagcccccccacccctcttcggctacgctcacccagatctatcatcttccagagctgttttagggcaggaaggggacgtatctgagccccaggatgctcgattcctgccattaaggtcatctcccaatgatgtgggacaagatcggggctatttctggcagcactcgggcccaggccgctgacttcatcaatgccgctggaaaatcaatctccagcattcagtgagtcacccagccatgcgctgccatgagccgtcagaggcgaatggcgttggacactgtaactgcctccccaagcaatgtggacacccgacgtcacacacacccgttgatgcagagtgagcaggcttggctgggttcagccccccggcccaggtggagttagatcacagctggggggatcctggggcagagctcggggccacatgcccccttcccacacaggtggcccattgttcccacgggagactgcgctgaagctgtgcggccagccctccgccctgtggcctacggccaggtcaagcccactcgtgtggctgacccccttgcagatgctccactcccgccccctgtgcaggtgcctgcacctccctgcttgggctcctttgccttcaaatcctctctgttggcatcagctctcccagcctgtcatcagcgacccactaacagtcagtctatagcagcggtccccaacctttttggcactagggacccgtttcctggaagacaatttttccacggacaaggtagtgcgaatggtttcaggttgaaactgttccccctcacatcatcaggcattagattctcataagcagtacacaacctagacccctcacatgctcagttcacagtagggttctcgcgttcgagcttctgtgagaatctaatgcagccgctgatctgacggcaggtggagctcaggcgggaatgctcgctggcccgtccaccgctcacctcctgcggtgcggccagttcctaacaggccatggaccagtaccagtcctgggcctgggagtggggatcccattctatgagacacactccgtggcctggggctggggaaccccgttctacaagtcacactctgtgtcctggggtggggaccccattctacaagtcacactctgtgtcctggggtggggaccccattctgagacacgctctgtgtcctgggggtggggacccccgttctatgagacacactctgtggccctggccttcaaggccctccatcagctccaccctcactacttgtgacgggtctggtccaggaagaccaggtcactcagtcccaccactgggactgctctgctcagcccagccttagcgacactcagggccagaccccacacaccctggagctgtccccggtgcaggagccctcttgtccttatcacgggcacctcccacagtgctccccgacacccagcgtcctctgctcacaatgccagcttcctggcccagccaggagggtgaatgtctggtgactgcacccggcaggcacttggttgacatgggtgatgtgtgctgagaacagtgagcaggtgccctggctcagccctggttcggtcccacacgctggccctccggcgctgccttacccagctgggctcagccccaccaccgacattcagtgcttcctggtctacatagggctggtccttttgaggaggccttgacgggagaggtgtcagcagggcaccccaggggaggggtggggtgtgaggactgccccagagacctcagggggtttcaggagcccctcctcttcctgtctgcactcagaagccctggctgtgttgactcctgcagggagcagcttagacacacctgaggacccattttctaaggctcagagggggctgggtgtgatggtgccacgtcttccttgccagccagggagcttgggccaggttgtcacgtgcaggggtggaaggccaccagagcggcccacacaacgcggcctctggacctgcagggagtcagagggccatccccggaggccgagataggctaagccgcccatatcccacgggcaagtcctatcctggcgttcccactgcccactgacctacagcagccaagccacgcatcaccacggcaaccccggctacaacgggagaggcaacacgggccctcacatgcccttggacgcacccatccccctgagcctcaccagttgtttctccatgtcctcgtcccggggtgagctgacgaagatcgtgttctgcatcaaacccacaaagcaccagaaggtgtctgactcatccaggacctcggccaagatgggcgccaccaggtccgacatcccttgggaatagccgacggcagggttgtacacggcgtagttcagcaggatcctcctgggaggcggtggagacagcagtgggtggggatgaccctcaccgcggcacactgcccagcctgcagaaccctgggccgtggaccctgccttccctcgcttgccttcacctcagtggaaggcagctgtgccaccatctcagagcccaagcttagcttccagacacacagacccttgctttgcaaaaggtaatggcctggccgggcgcggtggcccacgcctacaatcccagcactttgggaggctgaggtgggcagatcacctgaggtcaggagttcgacactagcctggccaacatggtgaaaccctgtctctactaaaaatacaaaacttagccgggcatggtggggtgcacgcctgtaatctcagctacttgggaggctgagactggagaatcgcttgaacccggaaagcggaagttgcagtgagccgagatcacaccactgcactccagtctggatgacagagcgagactccgtctcaaaaaaaaaaaaaaaagtaatggcctgctattagctgctgtctaggcccagaatcttgagagcaggggttaagggggaacatggctctgattttctgaagggtggactgcctgtgacaaggggtgggctggcagggacatttctgtgggctgctaattttgtgcaattatttgctaggctgtagcagaatgtcacagatgccagcctctggctctgtgtggctgtatgactacgggaccacccacggggagatggagggggtgcatggggaagctggtccatggttagtgtgagccaagcaaggacaggcttggtggtgcccaggggatagaggggctctgtgggcagggacctgggtggcttccctgggatgccatggctctgagatgccaactgacgtagctcatgagtagcgtatccttcacttctggggctttgatgtatgaacctggaagagagcccctgcagaaactcgctgggggctcatccacttcccagagcggtcaggtgaggcttgcagacttgcagatgggaaaggagctggctggggagggagtacctcatgctctccacattgggattgtcttccccccggaagaactggttgttccgatctgtccggaccacgtctttgtccacagtgaactgcacattacgccagaacgctctgtgctcctcgggagtcatggagagcctgtgtggagccgagcacccagccggggtcagcgggtggcacccagaggcatcgtgtggcgcacacactgcaggaagccacccttcctcccaacccccgttccctggacgggagctgggcggctgctgccggctgcagaccctccccggatgcggcggatgggtggcgtgtatccaaggctctccttgatattaactcagcctcacagtctccagcgtcccaggaaggagagcaagttgcagcccagtgggtaatgaggccttggccctggcccagcgttctggaggggagctgagcacagcccaggggcttcacccagtcccagcctcctggagagagagctgagcccagtcccgggttagcagatcccaagtgggacacagtctccggatgccttcacccctccaggccctgctcccagccccagccttcagctgtgggacgtcagcgcctagttaagtctgttgaacgagaattctaaaaccttgacatgtgagctaacgagccccgcagctccgaggcccgagtgcttggtttaatgactgcacttatcccaccctatcactcacgttcctgggagacccatttttgaaagaaactatgggtcacgaaacatattatcaatgctgaattgcacctcaaattgccttttcaaatgacattttcctccgcggctcggcggggtgggccgggctggccccggcggttaccttttctgctggatctcagagtactcctttcgcttctgcagccgcagcgcctcccgctcctccgacgtggactcgtggctgtaatagcgcagcaggaagggccagacctccccgcggattgacacatcaataccgccaaagaaaatggcctggaggaagcggcaaaagttggggaggggataaaatggggcagctcaaagaacccccaaatccccagagatgtgtgttttggtggtttttggtgcgccttgattcagatctctgcaatttgcacatatttacaaggggaaagcagtggccttcaattcccatacaggacacaaacccggctcatttcaatgtcaatgccccccctggggtggcgctcagattaacgtgtcgttctcacgtcatggcctaatccctggttttggaaatgctgcatttcactgcaaacccttctatgcaggctgacacggtatccccccaaaccctcgagggaggtgttgtgttttgtttttttttttcaacgcagcagctttgattgctttatcggtgtgttcacagagagcctcacacaagaaaacggggccctcacgaggaggtggcccgtgggtgcgggcgggcggccaggccccggccctccttccctctcgctcgttcccggttcccggccggctctccgcggggccagctgggcggacccggacctcaccttccgcagcttgtactcctcctccacctggcccagctcattcaggtggttgagccaggcggagacgccgagcctcttgtacatgctctcctcggggtgcgtctcggaggacggcagcttggggcggcggatggagaactgcatgcatgtcttatcgggggcgacctgctggacgggaggaaaactgggcaaaggtcaggatctcagccgcgcggcttcagaggccagcagtgcttttcccaggaataaaagcctctctctcttctgaaaggagggcaagggccgtcccctgcatacaaacccctaaatggcgagtgtaattaggcgcaattaaaatgaaaataccttcatcttaaaatcggtttccctctgcggctctctcctccccggcccactgtgccgccgccccccactctctccaaccccagccgcaaaaacggaatgaatgcctcgttcggcctaacttccctctgccgggagggcctgcaatgaattacatgtgattggccacatacaaagggatcgctgttctgcgagcagggagccagcctgtcagattgcctccgcgagcagtcacgaatccagggcaaaactgcagctgacatttaattcaaaaatcaaaggttgttcaatgtagggggaaaaaaagccatgctactgtaataagggaagccagcaggaggctctgcgggaaggaagggaattttaaaatcggccccatttctaataagcacatacagtaccttaaacagataattaaagagctcttattacatttgtacgtagattgagcaaaatatggcaggaagtcttgtcaaaacatgatttttcaagtgcagggcactgactttaccgaaagccctgggcaaaggtttcaaacccaaagttgctgctctgacggccaaaaactaccgtgggtcacaccccgtaagcccccggggcccggggaccccagacacaggacccaggagggagatggggcccgtggggggtggggagtgtcaaccgctgggcattctggggccgtctgctgggctacctggtctttgagctgcatctcggtgcagtatttccactgctggaacacgtcagacagcttgtccaggccgccgtggtggaagtggaaaaccttgtactggctctctcggctggcaacgaccagctggccgctggtgcaggcctcgtcgctgaagggccattggaagggggagagggaagcccgatgaatatgtaaacacgggggttttatttccaagtataatcagaggccactgtcgccaacctcagaagcaggaaacagtgagtcccagtggagttggctgctagcgggaggggacagaactacaccgaacaaaaaccaccaccccctttgccgaagatggcaaaactgctccttcctggggggccctggagctcctctctggagacctgccagagtggccttctccccaccaccccctgcccggcaacatggtccctgcagtccgggagacctgggtcccaacgctgagtgccctggaatccagttctgagccctggcaggccatgtgctaagagaacctcctgggaacagacctccttcgttgcgtgtgggtggaactctgggagaaccctccagggaaactcagtaaacatccgtcagtgctgtcagcccagccccggctgcccttagatgaaaggctggaatgtggctctgggtctgggaacccccccagcttctggacacgccggcttcttctaagcccgggcctctcattggtgatgtctgcggctgggcagccctgactataaggaggaggatctggtgtggggaatgactgcaggaaactaggcatcgcccacccatcacgaaaggaagggagcctccatccggaaagctgcggcccgtcccgcacaggtggccgagctccagagcatcccccggcgatcagagccgccggcagctgctaccctctgccctggtttggtttcttctcccaagccagagttgcaagcaaccgctggctaccatcacgctgaaggtaggggagtgagttcggtagctcacccagcctgagaactgtcagggagctgcagtggggaatcactgcccacaagatcagcgagggaggaaagcagacgcttgggaagactccatccagggccctgtgtccccaagccgtgcactgcaccggctgcaaagcccaggctgccagggaaaacacacacaggccaactcccaggaggcgcccagagatgcttcctacctgaagaaaaggcggagggagcgcatgtggcccaggtccacgcggaacacgccgcaaatctgctccagggcgcacacccgctgcggctcgtcccagcgtggggtctgcaggaggccgttgctgtccgggaaccgcaggccggcgtcggagctggacggggggctggtggaacaggttatgtgatgatcgccacacttctccctgcccacactacccagagggggacgggggtcatgggggagtcatttaaacctacgcaccaagcttaaacacacatacaggcacggctgaatatgccctgtaaacacctgtgaataaatgaatgtatgaaccccactgcacagttctacttccacttggatgggaaagcattttcatgatcaaattccattccacttcaatagaggcagtaagtcatcatcgtcctgacagccaaggtcacactgactggggttcctcgctgtgtgaccttggccaagccaccaagcctctctcagccttcgttttcccatggataaagaaggcaggagaataacaaggctgggtttccctacagcgtggggctgggctttactaaaactggttgttttgggatgattttagatagcatggggcttccgcgtggtttaaaccagctcactgtattcctgaaaagtactggttcagtttatgcttttggttaggaaacatttgggttctcagtactattaataacatcatcagcatttattaaaacactgactatgggcctggccctgagctaatgcttctcaggtgcttttattgcaattaatcttcacaaaaatcctctgaaatgaatagtggtattaccccattgtaaagaagaggcaactggggcccagagaggttaagtaatttgcccaaggtcacacagctggcaagtggtagagctgagattagaacccaagctttgtggcccatgttctcaccagcatactgtgcagctgtctgcagttcagcagtacaaccccatttattctgttattttttatgagtttgttacattccaaattgcaaaatatcttattatatggattcagccacctcacaggttaaatcttgtctcttgagattttttctttttttcttttttcttttttttttctttttttgagacggagtctcgctctgtcacccaggctggagtgcagtgtgcgatctcggctcactgccacttctgccttccgggttcaagcgattctcctgcctcagcctcctgagtagctgagattacagacgtccaccaccatgaccagctaattctatatatttagtagagacgaggtttcaccatgttgaccaggctagtcttgacctcctgacctcaggtgatccacccgcctcagcctccaaaagtgttgggattacaggcgtgagccatcgcgcctgacactctcttgagatttaatgtctagcaaatgtctgctaaaataaaaccggagtacaggcaagactcagctctggaccccaactgcagcaccccacagagactcagccgcattcaccgcacctgccttcccgtttgagctcagaacataaactattagaggcaatcaatccagaggcacttcctcctccaagaagcaccaggtctaagtaaataaagctcctttggagggttccagcacaatccctccccactgggaacttcacacagagaaacctgactggcctttctagagccctctactgcgtcaggcatagccctgggcctggtgagtggcaggtggcctttcttccccacctgcctaaggaagtcagccgaacaggtcctcccactgctggggcccctgggctctcaaggaaactgagtcaggtaaaactagatcagagatgggcatgtggggccatcacctgaactgccgtggctgcgccgcggacgggcccagaagaccgagggctcctgacatcttcccaagtggaccctgcgggagctgcgcttcagaatcgttgctcacaacacagggcaggtctcgagtctgaggccccaccgcacccatgggtgcccccttctgtcatctgctcattgaaccgcggggctgctgtgactgtgagagctgctgccccgtgtgctgcctgctggcccggcccacccagtggggccatcagagggtggtatcctttcccgcctcctcccccagccttcttaccacacccaacagcagaatcccccaaacctgcttgttcctcccagcacactgtggcccactcaccctacagggcaggccaaggtttccagaaaccagacagaacacagagactcgctttggcagtcacggatggagggccccctccctgctgccgtggccacagaagactggtcccctggagggccggagccgatttcaaaccaggcaagagtccaggacacaggggccaccacacacctcccccagcaacgtgcctccaggcaggagttggcttaaaccctctcgcaaccccttaggggcaaattatttgcattaattaatggattgattcattaattcaagatactgtgcttgggacctacagctggggttccataagctcaaactagagcgaaggtgatggagacctcagttcgctttcattggggtacgtctggcaggtaccccaggccctgtgtggtcatggaggacgaggtctggtgcccctcgaggccggctgctgtggggtgggggttgcatcgtgtctcttcatcttcagctcccagccctggcttggcgcagaacacacagacatttaatactcatgcctgaagtgaaaatgtaaagtgtctgggaattttgaagtcacagaaaaaaatgtttaaagaaaataaactacagggaaaacgaaatatgtacagtgttttatttttgcttatctttctacacacgtaaagcaatttagttttaagaatattcatatatgctgcaaataatttagcttgttcataaaattatgtgatgcattggaactaaaaggatgggttttgcaggcgataactcccaagatgctattacattagaaagatctcacacataaaactagaagacgctaaactttaagaaatgtagcagttcttcatttctatcattttctgaagatcacccaaatgtaaaagcagtaatgaaaaaaagtcagcactatcactggaaaacaaacacaaacactgggttctccctccaccacagtaaactatgccatgtcagatacagagatagagatttaaaagggcctcaaattcttcacagctcatcttatcaaggatagcacctgtctctccacccctgaatctaggtgggccttttttgaccaatagaatgtggcaaacatggtgttaggtgagttctggggcctaggcagcccctcactcttcctcttggcacagtgcaggcaagacagacagacgagagctcatgagagagacacgcaactggcagtcagcaccagagccccgacacctgtcaatggaggccgttccagaccctccgcccacccaagcctcctggtggctgcagcgacctgagtgaactccagggagcccagcgcaacagcctgtcccagcccagcccaaaccaaaggtctgtgagcaaagaagcggttttttgtttgtttgtttgttttttaaagacaaggtctccctctatccccctggctgaagtgcggtggtgcaaacacaactcaccgcagcctcagcctccggggctcaagcgatcctccagcctcagtctcccaagtagctgggactacaggcactcaccaccacatttggctaatttttgtattttttatagagatggggttttgccatgttgcccaggctggtctcaaactcctgagctcaagcgatctgtctgccttggcctcccaaagtgctgggactacaggcgtgagccaccacgctgggcccggtggtcgctttaagttgctgagtttgagggcggtttgtttcacagcaacggatcactgacacacgcaggacaagccagctctcagaaaaagcttgaaggggaggaagaaaccttcaaacatattgagctgtggttctcaaggttaccagggccagattttagcattatttaaaatacctaaactgctaaatttcctcttgcttttcttcatcctgagccttttaagtttgctgaaaaaagtcgatgagaacccagctgtaggtcccaagcacagtgtcctgaattaatgaatcaatccattaattaatgcaaataatttgcccctaaggggttgtgagagggtttaagccaacttctgcctggaggcacgttgctgggggaggtgtgcggtggctcctgggtccaggactcttgcctagatagaaactggcactggccctccaggggaccagtcttctgtggccacagcagcagggagggggccctccacccgtgactgccaaagcgagtctctgtgttctgtctggtttctggaaaccttgccctgccctgtagggtgggtgggacacagtatgctgggagggatgtgtaggtattggaggagtgagcagggcgtgttcggtgtgctgggttgggagaggaggctgtgatgggagaggaggctggaaagaatgacaccctttggtggtcccccataattgccaaaacctggaagccaccaagatgtcctttggtagtgaatggataaataagtttaaataactgtggtgcagccagacaagggaatatattactcatcattaaaaagaaatgagctgtcgagctgtggaacaacacggagggaacttcagtgcgtcttacgaaggggtttactaagtgaagggacccactgtgacaaggctgcaccctgtgggattccaattctaggacactctggaaaaggcaaaaccatggagacagtgacaagaccagtggttgccaggagctggcggggaggtaggaaggtgaagcacggagaacttttagggcagtgacacaccggcatgacaccagagtggtcacggtgacaggtgtctttatacatttgtccagacccataggatgtacaagaccgagtgtgaatgccgacaaactatagactctgggtgacaatgacgtgtgggctcatgagtcgtaacatgtgtcccactctggtgggggaggctgtgcgtgtggtgggggagggggtggatgagaattctctgtacccttcactcagttttgctgtgaaactaaaacagcttcaaaaaataacatctattaaaaaaaaaaaaccaacaaaacaaatgaatagccaaagaaactgggacacatatatgataaagattaacatctttagtatgtaaaaaagtatgtaaattaaaaagaaaaatataaatgcccaacagaaaactggcaaaaggaaaataaaaaaatttagtagagaataaatacaaataatgaataaaatttccaggcccagggtaatgaaataaatggaaatagaaacgggataacatggtggggggatggtttatgaaattggcatcaattaacaaattataaaatctagtgtggtaaaggatttggggaaacagacattctcattcagctcagggggagaaagaatataaactgaccaattttttttttttttttttgagatggagttttttgctcttgttgcccaggctgaaatgcaatggcaagatctcggctcactgcaacctccacctcccgggttcaagcgattctcctgcctcagcctcccgagtagctgggattacaggcgcctgccaccatgcctggctaatttttgtatttttagtagagatggggtttcgccatgttggccagtctcgtctggaactcctgacctcgtgatccgcctgcctcagtctcccaaagtgctgggatcacaggcgtgagccaccgcgcccagccctgaccaaatatttctgaatggcaatttggaaacaagatgccaaaggcttaaaaatgtttatacattttgacttttcacttccattcctaggaatgaatcctaaggacatagccagaggtgcccacaataaaggcatacatgcacagatgcagaaaagcattcgacaaaaatccaatgctcatttatgacaaacctgtctacaaactaggaatggaagagaagctcctcaagctgataaaggcacccacagatattccaccgttagcgtcatactgaatggtaaaagatggaattgttttcccccaagagcaggaacaaggtaagaatgcctctgctcccaccacttctagtccatgctctcacagaggccctggcctctgcatcaggcaagaaaaggaaataaaaggcataaagactggaaaagaaggaacagaactgcccctattttcagttgatacaactgttcatctgaaaaacctcatggaatttataaaacaatctttagaactaataactggatttcataaaactgcaggataaaaggttaatagagaaaaattaattgtattcttaaacagtaacaatgcacaattggaacatgaaataaataaaacattaaatttatagtagcaaaaaaatccccacataaaatacttcggaataagcctgacaaaagacattcaagaacgtcatactgaaaaacacaaaaattgctgagataagtcaaataggatcttaagaaatgcagaaatgcaccatgtccatagaataaaaccgtcaacttggttaagatgacaatcttgccaaactgatctacagattcaacacaagcccaatcaaaattccaacaggaatttttagtgaaaattgataagttgaccctaaaatttggagctagtataaccagagcgactataaaaaagaagaacaaagttggaggatgcatctgactttgagacctacatagctatcatcaagaaagtttggtattggtgaaaagataactatggtgaaataggcaaataatcaatggaacataacagagtccaaaaatatcaattgattatttacaaaagtgcaaagacaattcagtggagaaaggatggcttttcaataaacgatactggatcaacaggatatctgcatgaaaaaaattaacatcaactcttttctcccatcactcccccaaattaactcaaaacggatcacggacctagatgtgaaaccttaactaggaaacttccagaagaatccgtaagagaaaacctgtgtaaccttagaataggcccaggtttcttagatagaacacaaaaaatacaaactgtaaaagaaataataaattggaaaattaaagacttttttttttcatcaaaatactccattaaaggaaacaaaaatgcaagtcacagactgggagaaaatattcacaaaacatatagtcaacaaaaaacttgtatccagagtatgtataagaaactgttaaaatgaaatactattgttacacaaaggtttcttagaccagacaccaacatatgaccataagtgaaaaaaaaaattaatcttcattaaaatgaaaaccttctactctttaagagatattgttaagaaaataaaaagataagccacagactgggaaaaagatatttgccaaatgcttatatgataaagggcttatcatataagtcagtaatatgctttaaatcatcattctatacagaatatagaaaaggtcctcaaaacagtaataagaaaacacaatccaaacatgggcaaaagatttgaaaagacatttcaccaaagaggatattcagatggccaagaagcctatgaaaaggtgctcgacagcattcattattagagaaatgcaaatagaaagaaacctcaatgcaatctaaaggaacatgatgtgatccactacacatctattggaatgactaaaaaacaaatgaatgaggccacgagcaaggcagttcaagcttgtaatcccagcattttgggaagctgaggcgggtgggtcacctgagctcaggagttcaagactagcctgggcaacatggcgaaatcccgtttctgctaaaaatacaaaaaattagtaggcatcgcagtgcacctctgttatcccagctactccagaggctgaggcaggagaatcacttgaaccctggaggcgaggttgcagtgagccaacatcatgccactgcacttcagcccgagcgacagagtgagactctgtctcaaaaaaacccaaaaaacaaaaacccaaaaaaaaaaaaaaaaaaaaaaaaaaaaaacgaaggaatgaaactgacactgtgagtgctggccaggaggcgagcaacagaactctcctacaatgtgacgggaagtcaaatgacagaaccactctggagaactgtttggcagtgtcttataaagtcacacacacccctaccatatgactcagcaatgccccctaggtatttacccaaaatacatggaaaatgttcacacgaaatctgtgtgtgaatgtttatagcagttttattcatcattgcagaaaacaggaaatgacacaaacgtctttcagctggtgaatggctaaacaaacaatggtacatcttaacaagggaatacatacgcctcagcaataaaaaggagcaaactgctgatatgcatgacgatatggaagcatctcagttgtattatgttaagtgaaagaagccagacacaaaaggctacatgagaagatactcagcatcctctgtagtcaggaaaatgcaaattaaaaccacaatgagatactcctactcacctattagaatggctacagtggacaagactgatcatagcaagtgttgctgaggacatggaggaactggaactctcacggactgctggtgggaatgcaacacggcaaaccactttaggaaagcagttcagtaatttcttaaaaattaaacacatgcctgtttccagttattccattcccaagtatttaccaagagaaataaaaacatatgtccacgtgcaaagacttgcacataaatgtgtgtaacagctttatctaaaatagctaagaactggccaggcacagtggctcacgcctataatcccagcactttgggaggccgaggctggtggatcacctgaggtcaggagtttgagaccagtgtgaccaacatggtgaaacactgtatctaccaaaaatacaaaaaatcagccagacgtggtggcgggcgcctataatcccagctactcgggaggctcaggcaggagacttgcttgaaccctggaggcagaggttgcagtgagccaagatcacgagactgcgctccagcctaggcaagaagagcaaaactccatctcaaaaaaataaaaataaaaataataaaataaaatagataagaactgaaaacaacccagggtttatcaacagccaatgcagtaatgaatcgtggtctgtacataccatggcatactactcagctgtaacacgcagtagcatggacgcatgacaaaattattatgctgattgaaagaagcaggacaaaaaacaagcacatactgcatgatcccatttacataaaattctagaaaaggcaaacaaatctagagtgatgcaaagcagatgcaacttttttcctttttccaattattttattgtgttaaaaaatacttatcatcaaatttaccatctcaacctattttttttttttttttttttttttttttgagacagagtcatctcactctgttggccaggctacagtgcagtggcaagatcttggctcactgcaacctccacctcccggactcaagcaattctcctgcctcagcctcccaagtatctgggattacaggtacccgccaccacgcctggctaatttttgtatttttagtagagatggggtttcaccatgttggccagctggcctcaaactcctgacctcaggtgatccgcccaccttgcctcccaaagtgctgggattacaggtgtgacccaccacacccggccccatctcaaccatttttaaatgtacagttcaggtattaaatatatttctaatattgtacaatgatcatcaccttccatttccagaactcttttcatcttgtaaaacaaaagctctatacctattaaacaatagcttccaggccaggcgcggtggctcatgcctgtaattccagcactttgggaggctgaggtgggcaggtcacttgaggtcaggagtttgtgaccagcctgaccaacatgatgaaatcccatctctactaaaaatacaaaaattaatggtggctcatgcctgtaaccccagcactttgggaggccgaggtgggcggatcacctgaggtcaggagttcgagaccagcctgaccaatatgatgaaaccccatctctactaaaaatacagaaattagccaggtgtggtggcatgagcctgtaatcccagctgagacaggagaatcgcttgaatccaggaggcagaggttgcagtgagccgagatcgcgccattgcactccagcctgggcaacaagagcaaaactccatctcaaaaaaaaaaaaaaattagccaggtgtggtggtgggcgcctataatcccagctacttgggggagactgaggcaggagaagtgcttgaacccaggagttggaggttgctgtcagccgagattgtgccactgcactgccgcctgggtgacagagtgggactccatctcaaaaaaaaaaagcaaaaaaaaaagcccgataacttcccattcccccctcacactccaagcaacatcaactgtctgtctcaatgaatctgactactcctagcacctaatctcagtgaaattatacagtattgtctttttgtgactggcttatgtcacttagcacaatgtcctccaggttcatccatgccgtagcgtgggtcagaatttccttcccttttatggctgaataatattccattgtacggatggaccgcgttttgtttatcttttcatccaccaattgacgggttgctctatgttcttatgtgaataatgctgtgaagccatggtgtccagatatctctgtgtctctgctttcaattcttttgggtatatacccagaaatggaattgctggatgatatggtcattctatttttaattttttgaggaactgccatactgttttccacagcagctgtaccaccttacattcccgccagcaatgcatagggatttcaatccctccacatcctcaccgacacttgttagtttttattttttgatagtagccatccttatgggtgggaggtcgtatttcattggagttttgattttgcatttccccgatgattaatgatattgagtaccttcatgtgcttatcgggcattcgtgtctcttctttggagacacgtcttttcaaatcctttgaccatttttgaattgggttgtttggggtttgtttttgtttgtttggttgtttggttgttttttgtgtgtgtctgtttgtttgttttggagacagagtcttgctctgtcgtccaggctggagtacagtggcatgatcttggctgacagcaacctctgttttccaggttcaagctattctcctgcctcagcctcccaagtagctgggattacagacatgcaccaccacgcccagctaatttttgtatttttggtagagacggggtttcaccatgttggccaggctgatctcgaactcctgacctcaggtgatttcgcctgcctcagcctcccaaagtgctgggttacaggcgtgagccaccatatccggccagttgttttttgttgttgttgagttttaggagttctctataaatcctggacaattattccttattaaacatacatgatctgcaaatattttcccgcattctgtgagtgatctttatactctgctgatagtatattttgatgcgcacatttttaaatttttcatgaggtccagtttattttttttattgcctgtgctattggtgtcatagccaagaaatcattgccaaattgcagataagacattggggggacacgaagaaacttctgggggtgatggatctgttcattatcttgattgtgatgacggctccatgagtgtatattatgtccaaactgatcaaattgtgcactttaaacacgtgcagttgattgtacagttatacttcaataaacttgtaaaaaataccaccaatattcaactctcagtactattgctaaattttcaaccataggagaatatttgaatatattgtggcacattcatatgatacaacgccattaagcacttataaaatatttaataaaagtatgtgatgaccagagaaatcctcacactgttatgctgaatgaggaaagtaggttgcaaaactatataaaaatatactatcaatactgttttatatataatatatattgacaggtattttatacctatgcaagtgtagaagtagaaaataatactaaaactataatgtgatcatatctagatggcatgtctataatatactttcaccgcattaaaagaattttctaaaaggcataatgtatcattctgataatcagaaataataagctaattttctgtattaatttttttttgaggcggagtcttgctctgtcgcccaggctagagtacagtggcgtgatcttggtggctcactgcagcctccgcctcccaggttcaagcgattctcctgcctcagcctcccaagtagctgggattacagacatgtgccaccacgcccggctaatttttttgaatttttagtagagacagggtttcaccatgttggccaggctggtctttaactcctgacctcaaatgatccgcctgcctcggcctcccaaagtgctgggattacaggtgtgagccaccgcgcctggcctgtactaatttttaaaaaaagaagcctgtgtttcttttaatattataaaacaaaaaaataataatttagaaaagaaaaaggtgaggcaaaataaccaattatcgtcatggctaccatttattggagcttcctgtgtgccaggagctctcctaattgctttgaagacttccttacataaaccttgtgggtgagacagcactccattttatagctaaggagaccgaggccaggaatcatgtccccgggtttcagaatggcccacagcagggcaggatggacagctaggcgtgacctatgggaagctcacattcctgactcttttggcatatgccttccagagacagcagtcacatcaactggaaaagaagacaacactctaaaaacaacatctatgaaagaatgcctctgaaactgtgtccacttctccccttcacccctgctcctggctcagaaactatcaacagtcagctttgtctgccagtcaagctcccatccatagatgggcactgagcccgccccacacattggcctggtcgcctctttccttgttttccctggcatgagtttcctagggctgctgcaggaaacaccacagctgcatggcttaaagcaacacgaatgtgctctctcacacttctggatgacagaagcctgaagccaaggtgccagcaggccacactccctctgaaagtctaggagactcctcctttgagtccccccagcttcgggcagttcctggcaatctgtggccttccgtggcttgcagctgtatcactccagtctctgctccatcatcacgtggccttcttccctctgtatatgggtctactgtgtctctgttttctctacttagaaggacaccactcactggattagagaccaccctaatccagaatggcctcatcttaactaattgcaaagaccctatttccaagtaagattgcaatctgaggttccaggtggacatgaatttgagggaacactcttcaatccagtataccccttaccatgcccccactagatcacaggcaaacatgacagctcacttcctttccataccccaggacctcctctccccaggatttgcttatgtgggtccctctctctggtcggcctgctctgcctctctctctcttctaattcttcccactctccaaggccccgctcaaacactacttcctccaggttgcttcccttcaatccccagggaagccactaagcaaagtgtctgaaacatacagcaggtccaacatatgctaatttccctttatcccttggaaaatccttagaaacttatcagtcttttttttcatgtgttttgcttttgactttgtataaaagtcatttgttgatacaaaaaccagacgaagacattacaagaatataaaactttagatccatttgaatagacccaaaaatcttcaacaaaatactagcaagctgaacccaacaacatataagaagagttgtacaccatgaccaagtgcggtttatctcaggaatgcatgactggttcaacatatgaaaatagatggatgtaagacactagattagtaaaagaaaagacaggaaacacaagatcatctcaacagatgcagaaaaacatttgacaaatccaacagcatttcaaaataaaaacattcactaaactaaaaacggaaaggaacttcctcaatctaataaatgttatctatgaaaaaccaacaactataaaaaaaaccccacaaatttaagtgtgaaagactaaaagttttcccccatataactgggacaagacaaagatattcactctcaccacttctagtcaaccttgtgctggaaggtctacctgggaaattaggcaagataaagaaataaaatgcaaaaagattttaaaaataaaatctttaaaagaaataaaattttaaaaaggaaaaggaagaagattggaaaaaaaggagtaaaactatctctattaacagatgacatgatctagcatatagaatatcattaggaatctacacacatacacacacagaaaacccactgaaaccaataaatgaagtcagtaagtttgcattatataagatcaatgtctaaaaattaattgtatttctatacactggcaatgaacgacacaaaaataaaattaataaaacaattctcttcacaatacacgtacacacacaagtacaagacttgtgtacttaagactataaaagttgaaacaaattaaagacctaaataatcagaaaggcatcccacgttcatggattggaagacttaatattgttatgatggcaatactctccaaattgatacacagattcaacacagttcctatcaaaatcccagctaccgtttttgcagatattgacaggttgaccctaaaattcatacggaaatacagaggacccagaatagccaaaacaacattgaaaaattaggactcacacttcctaatttcaaaacttaactacaaagctacggtaatcaatatggtgtgataatggcataaggatagacatattgatcaatggaatagaattgagagtccagaaataaatccacaagtttatggtcaattgtttccaacaagcttggtaaaacaattcaattgataaaagaataatctttaaaaaatttttttgagacagggtctcactctgtcactcaggctacagtgcagtggcgagatctcggctcactgcaacctccgcctcctgagttcaagggatcctcatgcctcagccacctgagtagctgggattacaggcgtgcgccaccatacccagttaatttttgtattttttggtagagacaggatttcaccatgttggccaggctggtctcaaactcctgagctcaagtgatctgcctgcttcagcctcccaaagggattataggcatgctgggattcgaggcatgagccgctgcacccaaccgggtgaaagaatagtcttttcagcaaatggcacagagacaactggatagccacatacaaagaatgaagtcagaccataacctcacactgtctacaacaattaacttaaaatggatcaaagacttaagtgtaagagctagaactataaatctcttagaagaaaacatagatactttgatatgacaccaaaaagacaatcaaccaaagaaaaaaatagataaatctgatttcataaaaatttaaaactcaacactatcaagagagtgaggccgggcacggtggctcacgcctgtaatcccagcactttgggaggccgaggcaggtggatcacgaggtcaggagattaagaccatcctggctaacatagtgaaatcttgtctctactaaaaatacaaaaaattagccgggcattgtggcgggcgcctgtagtcccagctaatcgggaggctgaggcaggagaatggcaggaacctgggaggtggagcttgcagtgagctgagatcgcaccactgcactccacagagccagatgccgtctcaaaaaaaaaaaaaaaaaaaaaaaaagagtgaaaatacaactcatagaatgggaggaaaatagttgcaaatcatatatctgacaagggactagtacccaaatattttttaaaaacacttaagatgtaagaataaaaagacaaatgactcaatttaaaaatgggcaaataatttaaatagacatatctccaatgaagatataaatggccaataagcacatgaaaaattctccacatcattattccctggagaaatgcaaatcaaggccgagcgtggtggctcacgcctgtaatcccagtactttgggaggccaaggtgggcaggtcacctgaggtcaggagttcgagaccagcctggccaacatggtgaaaccccatctctctaaaaatacaaaaattagccgggtgtggtggtgcacacctataatcccagctactcgggaggctgaggcaggagaatcgcttgaacctaggaagtggaggttgcagtgagccaacactgcaccactgcactactgcctgggcaacagagtgagactccatctcaaaacaaacaaacaaaaagaaatacaagtcaaaaacaacgttgagataccactccacacccactgggatggctataataaaaaaatgggaaataataagtgttggtgaggaggtcctagagaaatcggaaccctcattccatggtgatgggaatataaaatggagcagccaattgtggaaaacagtttggtaggtcctcaaaaattaaacacagtgttaacatttgaccaagtaattccactcgtaggtagatatcctagataatagaaaatagggccgggcacggtggctcatgcctgtaatcccagcactttgggaggccaaggcaggtggatcacttgaggtcaggagttcgagaccagcctgcccaatatggtgaaaccccatctctactaaaaatacaaaaattagccaggtgtggtggtgcatgcctgtaatcccagctacttgggaggccgaggcaggagaatcgcttgaacccgggaggcggaggttgcagtgagccgagatcacgccattgcactgcagcctaggcaacagaacgagactccatctcaaagaaaagaaaagaaaagaaaatagatgtctatataaaaacatgtacacacatgttcatagtagcattattcatcatatccaaaaagagaaaaatgcccatcaactgatgaccagataaggaaatcgtggcatccatacaatggaatactgttcagctataaataggaatgaagtaccggcctgttacaacacggatgaatcctgaaaacacgatgctaagcgaaagaagccagtcacaaaaggccacgtgttctatgatttcatttatatgaaatatccagaataggtaaatccatagagacagacagcaggttagtggctgccagggctggggaaggaagggctgggctgtgactgctagagtatgaggtttctttttggggggatgaaaatgttctggaatcaggttgtgattacacagcttcatgaatgtactaactgccactgcattgtacactttaaaagggtgacttttatgctatgtgaataaaaggtcactatgcacccgctctctcccgtctgatttatcttgtacatctcccaccaaagggtcttgtacaaagcatggcctcagaaaatatttgttctgcaataaaaagttctgggtgtcccccaccctctcaacctgcagacaacgagacaaggttgccacctgtgtagagcttcattgtggtgggaagtcaggcagcaaacggtaaacgggtcatggggtgctctaagggaatgagcacagggtgggaggtggaggggctgggcacggccactctagagaggtggacctgggggtcctcagtgaagcctgcagaaaggtgaagagctagcagagagcccaggggaaatgcatgcctgaaataagctaagcacatcagagaaagcaccagtccttgtacgagtcccagtgcaaaaacagcgccaccctggaaacggagagtcagcccggtgcaaaaacagcgccaccctctggaaacagagatgcagtttgctcttgcattgttgagttttacgttcctcccagtgtgggaatggaagtgatctcatattgtaaataattttacattaatatacactccctgtatttttattttttatttttttttgagatggagtctgtctccattgcccaggctggagtgcagtggcgctatctcggctcactgcaacctccacctctcgggttcaaggcattctcctgcctcagcctcctgagtagctgggattacaggcgtgcaccaccaagcccggctaatttgtgtatttttagtagagatggggtttcaccatgttggccaggctggtctcaaactcctggcctcaggtgatccacccacttcggcctcccaaagtgctggcattacaggtgtgaggcaccgcacccggcccacactcccagtattttttaagttgcttaacatttgcaagtggtaaataaattcacgttgtggttaaaaattttaaaaagactgaagtgtgcagaatcggcattggaagcctgtcccccaggtcatcctggtctggaagccctgtcccccaggtcatcctggtcagcagttgagtgactcttcttccaaagttcgttctgcaggtttacacacacttgaaggtatcttcccatgttgctggtagacaccattttggaataatggctcaggggcaattagaaaagaagagtctttaacgtattcttcaacttgactcataaaagtagagtcaatcactcttctctacaacagtcaacttctctcaaggaagacctgaggaagctggtgcccgacccaccaggagacatggacctcataggaggtgagctgaggatgtggataatttggacaccacttggactgtgagctgctgggaggtgtcagacaggagcatcccacggggtagggatgggggctctggaaggcttcctctcggagcaggtggcatgggggctggctgtgggggtctttgtggggaagaaagagcctgagtgggtgcagggacaaggaaggtctgcggaggacaggtcggagtgctctgaaaacggccctggcattgatttttaaaaagggtcgctcaaaagaactgaaagcagggactcgaacaggtatgtgtaccccgtgttcacagcagcatcattcatgatggccagaggctgaagcagcccagtgtccatcgatgggtgaatggagaaagaaagtgttgtccctgcatgcaatggcaggttatttagctataaaaaggaaggaaattctttttttttcttccccctgagagggagtcttgctttgtcacccaggctggagtgcagtggctcaatcttggctcactgcaacctccgcctcccggattcaagcgattctcctgcttcagcctcctgagtagctgggatcacaggcgtgtactaccacacctggctaatttttgtatttttagtagagacagggtttcaccatgttggccacgctggtctcgaactcctgacctcgtggtccacccgccttggcctcccaaaaaaaaagtgctgggattgcaggtgtgagccactgcgccctgctaaaaaggaaggagattctgacacaggctacagcatgaatgacacctgacgttacgctaagtgaaagacgccagacacagaaggtcaaaccctgcatgattccactcctatcaggtccccagagcagtcaatctcagaggcagaaagtagaatagaggctgccaggggcttgggggagaggagatggggagttgtttaacgggaacagagtttcggttgggaagatgaaaaagttctggaggtggagagtatggtgatggctgcataacaatgtgaatatacccactgccactcaactgtgcacttacaaatgattaaggctgggtgcggtggctcacacctgtaattctagtactttggaaggccgaggcaggagtggatcgcctgagcttaggagttcgggaccagcctgggtaacatgatgaaaccccgtctctactaaaatacaaaaaattagccaggcatggtggtgcctacctgtaatcccagctgctcaggaggctgaagcgggagaatcacttgaacctgggaggcagaggttgcagtgagccgagatcgtcctgctacattccagcctgggcaacagagcgagacttcgtctcaaaacacaaaaatggtaaattttatgttatagtggtacctccttatccaaggggaatacaacccaatacccccgttggtgcctgaaaccttggatagtgccaaaacctataaatactatgttttccctatacatacacacctatgataaagtttaatctacaaattaggcacagtaagagatgaacaacaataataataaaatagaagtggctgggcgcggtggctcatgcctgtaatcccagcactttgggaggctgagacgggtaggtcacttgagcccaggagttcaaaaccagcctgggtaacacagttagaccccgtctttataaaaaaaattaaaacaaagtctgggcgcagtggcttacgcctgtaatcccagcactttggaaggccaaggcgggcggatcacaaggtcaggagatcaagaccatcctgtctaacatggtgaaaccccgtttctactaaaaatacaaaaaaaatagccaggtgtggcggcgggcgcctgtagtcccagctactcaggaggctgaggcagaagaatggcatgaaccccagaggcggagcttgcagtgagccaagatcacgccactgcactccagcccaggcgacagagcgagactctgtctcaaaaaaaaaaaagaaaaaaaaattacaacaaaaaattatccaggcatggtggtgcatgccatcatcccagctacttgggaggctacagtgagccatgatcacactactgcactccaccctgggcaacagagcaagaccctgtctcaaacaaaaacaaaaccaaaaccctcccccaaaacaatatactgtaataaaagttcattcttaccagaggtcgtagcaacctcagcacagaattctgttctttccttattcagttgagaacttccgccttctcgctaaaaggaagcgctttatggcttctctttggcatatccaaattgtcagcatcactgctctggtgctgtggggccattattcagtcaaataaaggtgacttgaacacaagcactgagatcctagggcagccgatctgatcacccagacagctggcgggatggagggggagggtaggagacttcattactctaccagaatggcatgcaatttaaagctcatgaattgtttatttctggaattttccatttaattttttttttctcttttttgagacggagtctcatctgttgcccaggctggagtgcagtggtgcaatctcggttcactgcaacttccgcctcccgggttcaagcgattctcctgcctcagcctcccaagtagctgggattacagacatacaccaccacgcctggctaatttttgtatttttagagagacagggtttccccatgctgcccaggctggtctcgaactcctgacctcaggtgatccacctgccttggcctccccaagtgctggaattacaggtgtgagccactgtgcccagccccatttaatacttttggattatggttggccgagggtaactgaaactgcaaaaagcaaagctgcagtgaggggggactatatgtattttattgcaactaaaaaccaaaaaacaggtgaaccatagagtttcttggcttcctccaccctaaagcacattcccttatcttccctggctctcccaggctcttctcaggcgtggcacccacacagtagggctagctaaccctggggacccagcaaaggctgcaccaactcacaggtggggctggtaggaggctgggttcacgctcaggtttatcttatgatgctgaggagtttgtggaataggttcaaaaacgttgaaagagggagaagcctgggcgccttgctttcagagtgactttgtggctacctccctgtccgattcctgatttggcctcggtttttgcctttgacctggggttggggccacccccgcagccactgcgccctctataggtaagaaggcccaaggaagaagccctctgctccgtcacctcctcgccatgccgtccccactgccagtgggcgcaacgttacttgcaaggccacaaacacccggaacaatccgccaggccgcgtcactcctcaccctccagcagggctttggatttttggacagcgagttctgtttcattttgttttgtttttccctttgcatttggtgaactccgtgtcaggaaagctagtctttgggattcaaggaagaacaaaacaaacccgatctcctgtaatctacctggattggaacgcccagctttgtacagcctgagctctggccgactggaatttctgccaggtcctattcacacccttggccccagctggctgtgaggtttcctgggaacccttgcctcctacatggcctacttaaaaggctgctgagagccagccaggtgttctttaagcccctgtgaagattccttgatcagttacacaaaaagcttgctcaaaagaatgggaccgggagcaaccgcaatgccctctggagacccagctcctgatttcaaaggatcaacgagtgacagagggttggggactgggggggtcgtgcatgaagacagccaccgcccacaacaggtccaccctgaagtgaaaagacaaatatcatttttcctccagtttgcaaccaactgtgcacagcttcgggacccccagccagcccaaacctgtcgctggctgcccactaacgctcccagcagcccttagtacaatacaaattcaggcaatgcctgcgtctgcccacacctgcagagcatgagccccactttggaatgacggggtctgtgcagagaccgggcagagctctgggcttcaggatggcagcagcagctccggcaggcggctctccaggccacgagatgggcacagaccttcctgcaccctcacagcttctgcggctccccaggcaacggagccagtcagggcatggggacgccaggcagcagtgtcagacttggccattgccaagttctctcttgtccccgccaggcagaacaggtgcacatccaggtcaacctgtgacctcggccttactaacccttgtctaggcaaacctgggagcgagatggaatcaaataagaaccaacctatactgggcagtgattactctaaaagcttatgcaagagccctgctcctctgttggtaccctacatgtcgatgccgagactgaggctcagagaggtctggtcattgctcacaccggcccctgcactgtcccaggctgtctctcttgcagcaagggaaaatggctctttagcctctgttatgttttaaccataaggcattttctcacgcagggctttccaatgttggcccacagacaagaagcccactggacatttgggaagaggagttttagagagaagaggatggaggaaggctagagtcacggtattgtgtgtgcacgtgtgtgtgtttacacgcctgaaacgaatgactgcgtcggtcacatgtgcggtgtgcccacatccttcccaacaaagatgagctcaaaagcgtgagggaaacacaccgtgcaaagaccagcttaggggattctggtgaatgtccagagatccaaacagcaagacccccgccgctcctgactcagcagggatgctggatgcaaactggccctgatacactgggccctggggtcttctccacgtcattatcctggagggtttaagtcccccgaggcaggagccaaagggaacagcaagcttgagatttttctgaagcctcttccgttgacagtgcctttccattcatctgaaacaaactctgaaggactcctctctatggaatcggtccccagaggtggaggctgctgctccatcccagcccctctcatcccatcctctcctgcttcacgcagcccaggtgaggcctgccctgcagaaggctacagggaacacgggatggggcagtttctacctgcctgctgagctgctctggtgacttaaaacaaaagtgtcaggagcctctggcaggaggaagggaggaataaaatccagcattcaacccaagcatctctgttgcccatgaattcatccttttcagtgatccgtccaccagaatatcctactttgcctgggtcatttcacgccttccccaacgaggcgaaccccagcccaacgtccaaagctttcctgaagccccactgcctccaccaccctcagtaagcgaagagaagggaagatgcatggagccccgccccatcccagagacggcccggtgcacagggacgtgcaggtcacacagattacaaggctgaggaggggatgggatgggaaggggtccgtgtggagcagcagcctccacctccgggtctctgactccaacgaggcagagaccaccttccctgacgcctcatccctccacctggccccttcccagcatctgcaacccactggtgtgtcttggtcccccaggcaagggtgatgtctcagccatctctgcaacccttgccccacagggcctggcacgcagcaggatgggggtgacggaggagagagagctctccgcaccttccttcccccacctgtgagacggcgatgagttggctggacgctacgatctctaggaaccccattaggctctaaaatcctggcagtttctaaaatgcacagtaagctaactgttcccagcaaaactgaagcacgtctggcataattagcatcacacacacatgtgcacacggcggtactggactcatccagccgagaggctggactctgccagcttcccgctgaccacagaggcagccagacccagctctggagtctgctcgcagagcccagccggctgtgcacgggagggcgattgatgcggctgccagttcgaagaggcagagcaataaagcctcggcgactgcggtgccttctgctgccggggtgggacccctaagcttttcagaggcctggatgctgaggggggcccacgggaagctggctctattaggctcaagctgccatttctgacataagtggcaatgttaagtgatgggcgcacagccggccggattctgccatcccaggcctagaacctgccccatggtcacggtcgagctcgggagcgccgacatcccgcatgcaccgagacagcctggcttttccagccagagggactgggagcagcaaggccggaaaatacagggccaagcggggcggggatgaatcgcagctcctcgcggcatgggcggcacactcccagagccagagctgctgggaactgggaaggcagggtctccgctccggcgattaactctgccgatctgcaacatcacggctaattagggaaggtgtaaatcactgggaggaagcgggcaggcacatccttcaggttgattaccagcacggtttaggaaaagataaccaggcccggcctttcttctgttcctttgccagccgtgggggcggggtgggggccgtggcgggcgggcaacaatccgcggcaggtaggaggagagaatgtaccaggcctttgagtgctgtttctgttttaattttttcttagtcatatggagtgaccttgtggatttcccagggaaattaagaaaaattccactgaacagatctcacagctgttacgagtttctgagcttccgtgggtcccgtgcatttacgactgtgacgacttagactcaggacgtgcacgtgatgccgtactgggctttttccattcagcgtgattacacggtgttattcattaagggctggagactctgatggcaggaatcatttgtttttctttttcccttaaggcatttgcaaatatgcttggaggcaaagggacgctgggtacatctaataaataaagcaaaataattaatagctcaagcagtctagagaccactcccagttgctcctgaaccaggcttttgagagccaatcgttctgttttcattccctctcgacttcgtccttgaaatacacattactgggaagaaaacagccaagagatttttctgaacccaaaaagaatgtttattttttttcccctagattttataggagcttaacgtgggcaaaccaatgagatgattctaaaccaaagcgccctcgtgggctccacgctctcagcctgtccatcagcagcacacctgggagattctgcccaacctagggaaaggaggagccataggagctgggcagggaaggccagagcacacacgctccggggacgcacacccacgcctagagcacacacgctccggggatgcacacccacgcccagagcacacgcgctccggggacgcacacccacgcccagagcacacacgctccagggatgcacacccacgccctggaccccagcagagggatcaagggctcaggcatccccagtgccgccaatcacgtggccctctcgaggtgaagctgcgacactgtgtggaaacccaggggagatgggagaggcctgaagcgggaggcgggaggaccgcatagctgcaaatgcatctgggcgtgaagacgtccctgtgtcatctctgcaggaccaaacagtcaattagtatccaaatacttttaggggacagaaagacgctcacggttcctgtcgcaggtccaggttattcggtgccataaaaaggcacacgtcgaccttcactgtttcctgcaaacacagctgggacatcagcccggaaaggaatgtaacctgtcaggccgcaaatcccacggttctcactaggagcaggaaaggaccctggtctcccttcacatccaccaaaagctcaccctgactagagaaccaagcagagactgaggccagagaataaccaagtagcaaggaggggaggggtcttcacagacagaggccttgctatgggtgggctctggcttccaggtggtgggctctgcgggccagagcttggggcgcaggaggccaaggtccaggtcccagacacatccattatggccaaacacaagaagccctcaggcctgcccaacacggctgtgggcaccggtgcctccccagaccctctgggcagcccatccttgcacctggaggagcagctcaccgtgccgtggagggtggccgcgaggttcatctgggcctccgagcctcccagcgcatcccactgctctgcagaaacagaataatcaccacccaggctggtggcttcccaacttttccgtgacgttcccctaggcaatttaaaaatggagtgaatactgataataatttgactaaatttaggtgttccccttaggcatctgattaaatttcatgaactctttttcaggcttgcagcccaaattccccttctctcttggcttcacggcacgggcttcttgaccaccatgtagggtcagcaaattccgcctaacaagccggagctttccttccttcccggaggaacaagacactaagaagaggttcccaggggaacatgcagtgggagtctgggccgctacgttgtggggtggtgtaaccagggtttgtccagaaaaagacacagaacccgcaggccctggaggaccctgaagatcaccaggcccagtctgttcctctccctaaccaggacactgtggtgcagacagtgtagggactggcgaagagacacagtgggtggcaggaacggggaacagaaagccagaaccttctagattctgagctgctgggctttgtgacatcccacatggcttggtcccgcctttcagccccccagggttcactcgaaccgcctccgcgcaccccaacagcagagacgtaacgtgcaggactgactggtgcttcccaaaaatcttctcggactcagtggcacacctgggactgcccgaatctgtgccctggtccccgttactgttcctgcaggctggaaggggagcctgtgagttgagccagagctgaccgggagctgctgggaccatggctaggggttgtgacgtgacctgggccccgggaggccctgagggaactggtgggtactctccagcaccccaaccccaaagggcaaacagtcatgataccaatcaccaacatcctttgataagaccttggctactcatttatattcatttaaattccatccacacacttgtcacagcaaagctgaattctgtatctagcccctcgtggcagcagtgacggaaggacagaacttgtttaggcatcgtttcctcgctccctccttaatctccactcggcttttcccatcccctgggcctagtttcaggggagccagcatcttccgcaccaatgcactgcttggcccggctcagaggatttgacgcaaaccaggactggggccctggccgacagaaaattcttagagcaaaatggctgttcaccagcggcgggtatgttcttagaccctccatctgcccgggccctgctgggagaaggcctcgggcctccacctccagcaatcctctaatacctcctcagagctttccggagagaagggaggaagccagggaagctctgggtgcccccgacaagtttaaccccttccttctttggcacacacttcacaaaagaagacaccaggtgaacaagcacgcagagacatattcaagatcgtcggtgataaagaaatgcgcatgaacatgatttttaagccatcctaccagcaacacttcgttttccaaagcggggaggccaaacctccaaagctgggagggctacagtcaaagaagcacctcccacaccggaggcaagggacgcgccaccctcggagcggctccctcggctcttctgtaatctcagcaagaacgtgctcactgcacataacgctgaacctgccacgggcacgaagcagacccacatccgtccctgcagcagcagcctcggcccaacctcaatcccactcctccaagggcgcgccagggaacagcaggacgcggccctccggggcttccctgtgcgcacacacacacgcacacacacacacatgcacatgtattaaagcaaaagtgagattgtgctgtcaacattgtgttacgcctggaatttttcagttactatatccagggccttagccctgtcggtatgcagggataagctgcacctctttttgagggccgcttccacgttttctctaaacattccttatagacaaagacttgggttgtttccattgtcgtttttctttgtgtggtttttttttctttttttttttttgagaccgagtctcactctatcacccaggctggagtgcagtgacacgatctcggctcaccacaacctctgcctcccagattcaagcaattctcctgcctcagcctcctgagtagctggaattacatgcgcccgccatcaagcccagctaattttgtatttttggtagagacggggtttcaccatgttggccaggctggtcttgaactcctgacctcgtgatccacccacctcagcctcccaaagtagggggattacaggcctgagccactgtgcccagcttcatttttctgtaaagtcaataatatcacattgaacttttgtgtgttcacgtctgcacacaatacaccgaacctgtgtgtgcacgtgtgtacaggtaccgtgcatctctttaaacattccctgaggcttggcgtggtggtggctcaggcctgtaatcccagcactttgggaggctgaggcaggtggatcacctgaggtcaggactttgagaccagcctggccaacatggggaaactccgcatctactaaaaaaaaaaatacaaaaattagccgggtgtaacggccggtgcctgtaatcccagctactcgggaggctgagacaggagaatgacttgaacccagggggcggagattgcagtgagccgagatcacgtcactgcactccagcctgggcgacagagcaagactctgtctcaaaacaaaacaaaaaaattccctgtaggcaagaattgggatgttactcattccacttttttgtaaaataaataatatgacattgaacttctttgtgcatgcatatgtgtgtacacgtaaatactgaacctgcgtcatccacgtttgtgcggaatccctgtgtgtgtgcacacgcatccaccccgagcctctgtgtgcagagctccaagcacagacgtgttcatcaaggacaagcgggaagccgggaacagctccatgtccatggaaggggcatgggcaagtgaaatgctacgtccctcaccaacaggccgctgtgcaggcgtgaaacccagtggcggttcagaagacgtggcagcgcgggaggggtttatggcagggcatgaattgagaatggcaagacagaccatgtaatctcagggactctcagctggccccaccccaggaaatgcagtcggtgtgtcttaggaggttgagtgcacattgcagggcccaggggcccctcggaggggctcctgtccctctgcaccaaaggtgtgcacagaagctgtcaaggtgacatcattcacagagaaaaacccaaactaaaccacatggtcatcaacaggagtgtggacaacctggggaacagccatggagacagtgtccccctattggagtgagcacccgcagcacctcaggcacggggagctgagccaccgacggctacaaagacggggacgctttcctagggctcaaagcaaggcagaatgttgagaagtgcacatgtgtgcaaagcctgctttaggagagcaaggaagtgccgcccacggcattccggaaggtggttccttctggagaccggggcacggaacgaccagactggggaggaaggagtggagcactggcctcctaggaagctctagttcagacacagggggcgctgggtcacggggttcatttatgattgtgtttcatggtttacatgctacaaatattctttggcatgtatcaaatatgacaaaatttaaaaaaaatttaaatttatttagagacagggtcatgctctgtcacccatgctggagtgcaggggtatgatctcggcttactgcagccttgatctcccaggcttaagggatcctccctcctcagcctccctgagtagctgggactacaggcaggcaccacagcacctgactatttattttgtattttttacagagatggcggggtgggggggcgggggtctcatttgttgcccaggctgaccttgaactcccagactcaagcccatcctcttgcctcagcctcccaagtagctgggaccacaggcatctgccagcacgcccagccaatttttcaatacttttttgtaaagatgggatctcacaatgttgcccaggcctgaagtgatgctcccacctcagtctcccaaagcactgggattacaggtgtgaaccactgtgcctggcctaaaatcaaaaaaaattttaaaccaagaaagtgaattttatatacagcctgcctgtctacaactctgtaaaataacttaggcatcggaagcaaaaataaaaaataaaagtaaacacaaggctgaaggaaatacaccaaaaagttaacggtggtgagctgggtatggtggggcttcacacccttcttttgtcttttccctatctcccagaatttccttaggagcaggtgctacttttataattaaaaagaaagaaagagagagagagaaagaaagaaaaagaaagaaagagaaagaaaagagggagggagggagtgaaggaaggaaggaaggaaggaaggaaggaaggaaggaaaggagacaaacaaaagccctccaaaacatggaaaacagtaaaggcaaaaaaaaaaaaaacagttaaaaagagcaaaaaccaccctccccaaaacaaaaatagccccaagcaatccctccataggatcaacagggaactaagacaagcaggtgaaaagaccacactgaagtcagacctcagatcataacagaaacaaaaagcaggtcctaaggcctccctctggctcccccccacccaccccaccatcctccagcttcggacacagccctgcgatggagctggggctatgttttgggggctgcgttttggtggtgacacagcatttcccagggctgctgtaatgaaggaccacagaccagaagcttgaaaacaacagaaatgtattgtctggcagttctggaggtcaaagtcaaggtgctagtcgggccgcgccccctctgaaggctccaggcaagagtctttcctgcctcttccagctggaggtgctcgtcctggatcctggaagcccccaagcctgcagcagcatcactcccatctctgcctccatctccctgcccctcctgtgtctgtgtgtccgtccgtgtcttttaaagacatccgttggatttagggccaccctaatccaggaagacctcaactggatccttcccttgatcccatcagcaaagaccctatttccaaataaagtcacattctgaggttctgagtggccatgaatttgcggggaagggagtcactatccaggccacggcagacacagttccccgaaactgaagacgtgtttactcactttttttggacagggaagctcggctgtgggtgcgaagcaggactgccccccaaggccaggcaggtcctcgaggagcatctcccagtccagtctcagcgggcactggcctggcactcacgctcggggtggggggcatcccaggccctgagactggtgctgggtccaagggtccccatccggtggcagccattccgcattgatctccatttgcttttcaaacatgcaattctcataaactgtgctaaatgccatttagtagctaattaactttctgtgtgaagacctctctaattgcgcacactcccccctcggctgggtcctcggggatgcccagctgtcctagagtatttgttctgctggctcccacctcgcagccacaacttcaatgcccacaacaaactgccaatcaaggctgtggaggtcaaaggggaccaaatcaggggccctctgctactaccaaactctcccggcaaagcttaatttaaataagaaagcagaaaggttatgaaaaaccatttttcccaacgaaactcttctgccaggcggcataaggggcgcggccctccgctcttcagaacggctggtgtctgctttgaaaggtcctgactagaatctgtttatattttgactgcactggcatctgccatccctcaaacggagagataatcaggaaataaaagcttttgattagcagctgcatgaatcactgcagtgccaatttcctcgtggtcccaaagtgcgggagggagggcaggaggcggcaagcatgggtgctgggtccacctcacccacttggggcaaagccatctctcactttattcactggtcttggacttggggccccaggtctatatcccaaggccacgttcgcttcataaacgcaaggtgatctctgagcacctcttagacagaagtctgggcagacgcaaatgtgcagcgtttcaaagcaaagctcaagagtggattcctcagtgcagtatcgtcagcgttgcagtggtgggtaagaggccccgggattatttttggagggcccctccctgcagagcaaccacgtgaggactccctaccccaggaccttccaccagaaaaggccaaagagagaccacacgtgccgccccctgccgaagcctggcctttgaaggatgaacggcaaggggtatgtctgccctgacagagtgaccagtacccgcagcacccgagttctttgcctcttattaaagggcagagccaccatggtgggtgaacgggcttcctctcggaaaccaacatcctggttgggttttcccttccaaggaaggctctacacacccggccctcctcagagcctcagcccgcagcgggagatgacacctccgatcaggtccacgggaagatgggggtgaacgagaagcctgaggccgggccggtgggagggcgtgatgcatgggaggagctggactgcggtcagccgtcccctcgcgccctccggtctctgctgctgtgtttacttggctcccttcccgggatggccttgtagcaaatccatctgggatatgttttgtttccacagagggaccctgaattttgaggtggggccacagaacctcccttgagagccagaagagatcagggccaggatgggtcacgggctgtgcccagtgtcgctgcccaaggcagaactggctgcccaccaggggcaggagactggatggtctttccaggccctcatcccaaactcaagcactggagaaaattgttccagagcgtctcggtctgggtgggagcggggaataagcatttctttaaggaattttttttttacttttttttcagactgggtcttgctctgtcacccaggctggagtgctgtggtgacatcacagctcactgcaacctccgcttccacctcttgggctcaagcgatcctcccacttcagcctcccgagtagctgggaccacaggtgcacgccatcacgcccagctaaattttttattttttatagagatggggtctcgctatgttgtccaggctgatcttgaactcctgggctcaagcgctcctcctgcctcggcctcccaaagtgctaggattacaggcatgagtcatcatgcctgacctatttttaaaccagaataagcaggtacagaagtttgcctggtgaccaggagtcatgactctttccgaatgaaggtggggatgggggtagggaatgtccccatgaaggtagcccctggctgggcattttccactcccagccacagcctccctctgcgggcagaaccctgggtgctgcagggagctggttctcagggaaaagggaattaagtcagtactgggagatttgggttccacagagtttaggggctcctacaaacagcggcttacgggctggtgaggaatttcccatcctgaagcttttaaagcagacaaacacatgagtgctgggtgggggcggggtgctgggagatgcagaggctcagaaaaaccctccgaggctctcggattttacgcctgcatgagatttcgagggaagaatcctaaatgtggggaaatgaggttgcccagcaattctgaatgtggtttaaaaaaaaaattaggtgggggagaatgagacgatattcaatatttccttctgattcaaacgaaatacttctaagttcttctctgtgaaagcgtgtgtgtgtttagaagggagagggggatgatagcacgtcctgccagaagccgttttatttactagtttggatgcttcccctgacgcctacctgggaggtgcttgcctggccaccagccagggccgtggctcctcggcaagtgggcgtccgccgagcctttgatgcactctccaaagtcacagagcaaaacaacacgctgaacaaacaccaccaccctgaaaagtcaccagcccatgggcctctccctggctccagctgtggctgatttacccaaactgaaacattttccttttgtcgactgtagagagctatgagtcaggtccaagctccactgggcgtatgcccaaggggcagagggggcagcaaccggacggaagctgcccaatcataagaccatggctgaaagtcaaacgcgcccagagtccacagtcgaccacctcccgctcggcaagccagggtcctggtgaacgcacgtgcctgcgttctgtaccaaacagttgtcaacacacaccagcaacttaacaaatcaactccaacaaaggggaaaaaattaacattaagggcaaaaagactttttctggagggtcctatgcaccagatgttggctctttaattggcagtcaacctcaaagcaaaacttagaaggcccctgcttgttttatcagttagagccacagaaaatcaaagtccaatcccgctaagcatggtgctgtgtagcccggccagccccgtggaagtcctcagcctggtcccgtcttctgggctctgctgggctggacggtgccaccctccccaacccgcacctgcccgccggccccaggccctccctcaggacccagcaccttcagtcctcctgccgagaagaagcctttcatcagtaaaagagaaaacggcttctccaaaggaagtttcttaacttgaaaaaacaccatgattagggaaactcctccatcgtccaagatacaaacacaaactcccaaacacctgtcaatccttctcagggctccacatggcccaaaggacaccccaaatgtggaggaccactcaagaccctcaaatgcagcaccgtgtgccccctgaacagggatccccacattcgatgaaaacaaaattggccagcgcaggaacttttgcccatgacttaagcacagcaaagtccccaaagccagaatccctcccaggacctgcccgacgggttttatcactggacgcatcaaagcccctctcactggtggttggttcagcagagccctgggcctcgggcctgccctgctctgacagctcccacactgtggccttgatcgggcccttttccactctgtgcctgctttgagtaacaggctcccacaaaaacactgtgctggggtatttccaggatgaaaagccacggttcgctttgcctgccatggacagagtcataaatacgagttgtcgttgcctcttcccaacagtctggcatggcaaactggccttgtggagttcggaattgttctagatactgctcatgtattctccagcagctctagctggttctgcccagatacctggcaatgccaaaggccgagaggccaagacactacaacctttgttcaaatacacgaacatcctcaaatacacgaatgtcctctctgcacaagcagagcagcctcagcatcggccctcgcaagtcccaccagagaacggtattgaaaagatgactggggtcaaggggtgcggagagggacccactgtaccctcatggccactctagcgccagcccttctgtaatgaccccctctggattcccaaaagtcagccgaggggtccccaccctcctggggtggctggggtgttgctgcccacccccaggggcaggcctgtgtgcagcatccatgcccagaaacctgcgctcagatttcccagttcccagaagacaacagggagagtctatttttctaagctcactaggtaaagtgttacttcctgatctaatcttgccaggctctggaagcttccgtcaaggttttcccacactccatgtcaggtctctgacatgaaccagctttcagagtctaacgactagatttgactttcagctgctcggacggaggcttcaactcagcctgaactagccgcgtggacagcagccgtagccctcacaaggcgtgtgcggtgacgggtctcgggcgcccagccagcgaggggccggctccaggtggtgggagcccacgcccccggccagcactctggccacagcgcagcacctgccccatgagagcctcctgttgcagcccgggcagaggtgagcctgggcagccacctcccacgtgatttcccaatgcttgaagttcacgaccaattgctggggtggggacaacctacacaggcttacagacctaatccaagaaggcagttctcaaaaggatgggaaaacgtgcaccagtctcacagtcccagtcaccttaaaaggtcttaactgatttttccttctctctgtttattgtggtaaaatgtccataacataaaattcaccaccttaaccgttttcaacgtcgagcccagtggcattataccattcctatttttgtgcaaccatgacaccacccatctccagaactctccttcttcccaaactgaagctttgtctccatgaaacaccagctccccaacgtcccctccctcagcccctggcaccccaatctttccctctctgagcctgacaactccaggggtcgcacacaagtggaatcacacagatttggccccttatgtctggctcatttcactcggcgtaacgtcctcaactcatccgtgttgcggcgcgtgtcagaattgccttcccaaggctgaacgttccgctgggtgtgtgtggaacatgtgtgtgaacacaccgcgtttctctagtcacccgtcgggggaacttggacgctttcaccatgggctactgtggacggtgctgctatgggcaggggtggtcatgtatctgagctccttctctttatttctgacacttctatataaccatgaatcatctatgaaataattttgacaagcaagaggttcacaaagtaaattccagacaaagccaccctggagacccagctgggctgtcccgggggcggtccctgcgtccacgccgggagagcaggaatgacacaaagcaggctgcatctggctgtgtcaggcctcccacccatcccatcagccaggcatctctgctttggggccagaggtcaaacgtgtctgggttccgtgtagtctcaggggaggctgaggctgacgcgaggtggggtggggtgaggttgtgctggaggctctccacctctccacccaccagacacccagagaagaggcggaaagtcagcagggaaggcagaaggctgctaagagtggacaggatgcaggagtggcgtctggctgaccctgaccagggggacctggcccaagtgagtgtgcaccccagcccggccctcagaactgcttgcaggcacttgcgagttaatatccacgtgatttaggattcaccaaaatctgcttggaaggaggcagggaggcaagagggaggtcaggtggggaggcgcgcaggcagtgctgccctccagccacaggcaggtgggggtggggcggggcggggcggggagggggagggcgggggcgtgcaccgcaggcagcggccagccctgggctgatctaggggaagcctgccatctgctgggcaccgggatccctcccggagcaggagtgccacctccacgcagatggagtttgcaaggggcggtgccgccatcttcacagaggctccgggcagctggcgggggtggggggatggttgggggggccgtgttggccaagcccaattctggggtgggagaaaacgagcaacactctgcaaagggccgggggcctggtggcccccccatcctcgccggacctcaatgtcctgcgtacaagcctgtcccggccgtggccaccggctggcttgtgtgctccgcctgccgggaagcgctttccccctcgtggaccctacaaagacgcctctctgcaggctcccctcatgctgcgggcacacaatgcgtcctttcacccggggtgggtctggcggaggcggcccctccccggggtgccccccgctgggcccctgaccccacactccgctgctgttcttggcctgcgtagacccgtccctttcaaccgctgtcaggaaactgtgtggacgaggaatccctgctggtcgcgcccgagaccatctctctgcgtctcctagaaggggaaaccgtgacccacatcaaactgtggccgttggaaaggtgaacacacggagcctggggccggtggggccagggggtggggtatccttgcacccgatgtcacttgacacccgtcccggcagcccgccaggctcggagagagaccgtagctaccaaaaataatcctcccagtgtttaaatatttacagaagcaagacagatcctgatgcctttacaatctactggagtctgccctaaccgccagtccgaggctcccaggagaggccacagcgaccacccacccggttttcggggtcccaggtcgcctctcctctccctgtccctgcctgatatatatcgcagggctcctcctccggtgaccacatatctgccactagccctctccctccttccagaacattcccacttccaactctgctctcacatcaccccagccccagcacctaccttgagacagctctttctgctccagagcccctcggggaaagcctgctttctctgcagagcctgcacctcattttgggaaccagtgaacaaaatgtaacaagaggcatttgtccatgtaaccccattgtccatgtaacccctggggctggtctcgaccccactcccctcctggggacacaagggtgagacggtacagtaccaggccaacaccagtcccagcggatggcacagagatgggcactgctctcagggcctgtccagatgctacttctcatgacagtctatggggtggggagcactagcgccagccccattgtgcagaggggaaactgaggcaatgagggtaataacccaccagcacacagccaggcagagctgggatgtggccaaggacttggctccaggctcccacacttaaagatcatctctgtcaccacctgggggtaataaggtcagggatatgccccaggccgcctgcttccaccagccagtccctttcaaagggcggaggtttccagaagtgtggctgagtgtctgtctgttcttgatggtcagggaaccttactttcaggtccccaaagcagattccctgaggccaggaggcacttaggtggacgggcaccaggagccctgtgtcctctgccttgcaggtgtttagggaacattgttcagactggaaggaagagccacgtgaaaatgccctttctgtttactctgctgggaaggatatgaagccaaacagaaccagctacgggagtctttcgaccgcaagacaaaaggtcctttgcccccactacctgcaactttcagggaagatttcatcaggtgctgggttacattgcaacagccaggcgtggttccccagaggtacggtgtgagctccccaactcaccgggagacaggcgctgccacatcactgcctctgggagcccgtgacctcatgctcagagctctcagaagctcacgtggcctgtgaggcccctgccagggctgttgatgcaagagctggggctcgggagcctcccaagggcagctctgtgtattcagagcagctcagcccctcgagagcaccaggagcccccagcccccatgcaaccaccggccggggttgcgtcaaggcctcccggagcagctgtcaatggtttctgagctgcggtggaaaaggctgacaagtttcatttccctgaccttggacagccctcctgatgcagggagcgcccatccctggggagcactgcctctccaggagcctgaacttccttctttttggttcaggaggtttgaggcacttatttcctccctgtcctgacagttttactagaaaggtcagctttttaaagagctgtcagtccttcggaagacagtcaataacagcatggtttaagacggcccaccagatgcactggctccgcccccatctctttagaatccagctcccttgggggacatacctggctggtgacttctagaatcccagctcagggccgggggggtgccagggctgtgaacccccgacaagaggcaatgaaaccccctcctcctagaggctgcccaaccatcaaggacaaaggaagagggagtccatgaagaagggctggccagagaatattttgttttgttttgttttgtttatttttttattgagacgaagtctcactcttgtcccccaggctggagtgcaatggcgtgatcacagctcactgcaacctctgcctcctgggttcaagcaattctcctgtctcagcctcccaagtagctgggattacaggtgtctgccaccacgcccggctaatttttgtatttttaatagagacagggtttcaccatgttggccaggcttgtcttgaactcctgacctcaggtgatccaccagcctcggcatcccaaagtgctgggattacaggcgtgagccattgcgcccggccgagaatgttttttcaaaaaagcaggtcgccaatctgtgtagactcgtgctggccaaggcagtgaccccaagccacatgtggcatcacacttgagacgtggtctaggtgtaaagtacacgcgaaattcccaggacttggtaaacagagagaatgtaaaacacttcccatcggcggccgtgtatactgatcccacattggaatgatactattttgaacaagctgggtaatttacaaaaattttcacctttttgtttgttttctttttgttttttgacttgtaaaaatgtagctatggccgggcaccgtggctcatagcctgtaatcccagcacattgggaggccaaggcaggcggatcacctgaggtcaggagttcaagaccagcctggccaacatggtgaaaccccatctctactaaaaatacaaaaattagctgagtgtggtgaggcactcctgtaattccagctactccggaggctgaggtaggagaattgcttgaacccaggaggcggaggttgcagtgagctgagatcgcaccacggcactccagtttgggtgacaaactgagactccgtttcaaaaaaaaaaaattgtacctataagacccacacaaatatgcccaactgatattggacaaaagagcaaagcgtctcaatgaaggaagagcagcctcttcaacaaacgacgcgggagtcattgcacatccataggcaataaataaataaataaacctcgaccccgtaaaacttttaggaaaataacaggagaaaaccttcaggatcggccgggcgcggtggctcacgcctgtaatcccagcactttgggaggctgaggtgggcagatcacgaggtcaggagatcaagatcatcctggctaacacagtgaaaccccgtctctactaaaaatacaaaaaattagccgggcgtggtggtgggcgcctgtagtcccagctactcgggaggctgaggcaggagaatggcgtgaatctgggaggcggagtttgcagtgagccgagatcgcgcccctgcactccaacctgggcgacagagcgaaactctgtctcaaaaacaaaaaaaaagaaaaaaactttcaggatctaggactaggtcaggagttcttgagcttgacatgaaaagtatgattcataaaaggcacaactcataacctggacttcatcaacattaaagtcttttgctttgtgcaagatcctgttaagaggatgaaaaaaagaactacagactgggagaaatatttgcaatcctcatatctagcaaaggactagtttctagagtgtataatcaactctcaaaactcagtagtcaacaaacaaaaaatggattagacgatgtctctttgtctctttgggtatctgtcttcattgcagtgaatcgtttgtatacattgttttattacagtcacaaaagaaatcatgtattaacaggaataaaaaagcaggttgttacctgtcactagaacaatattatcgcttctggttgccacaataaatcatattatgactttttccaaaatcctccaaccaaaggttgtccccataagcctttcgatatatattattaagatataagaagatgcttaagagacaaagagatcttccgccaaagaatcagatacctggatggcaaataaacacacaaaacgatattcgacatcacgagccattagggaaatgctgattaaaaccacaatgagatgtcactacacacccatcaggatgcttaaaaaaaataatagtgacaacctcaaatactgatgaggatgtggagaaacaaggcactcgtaaatttctggtgggagtgtaaaacggcccagccactctatgcaacagtttagcaattgctttaaaaactaagcacataggccgggaacggtggctcacgcttgcaatcccagcactttgggaggccgaggcgggaggattgcttgagcccaggagttcgagaccagcctgagcaacatggcaaaaaccctgtctctatttttactagataaaaaacgtattttaaaaaactaatcacacaatcaatccacatatgactcggcaagtgcatttgtgggaatttatcctagagaaacgaaaacttaggttccaacaaaaccccacacatgaatgttcctagtagctttattcacagtcgcccctgaatgggaagccatggttcatgtccatcagtccgtgagcgcgtggaccgtggggtgctgctactcagcagtagaaaggaacaagttcttgacacacaggacagcttggatagagcttcacaggatgatgctgaaccaaaaaaagtccatctcaaagctgacatcatgcagggttccagttacgtaaaattcttacagaggagtggttgccctgtgccagggcagcgtggaggaaccctgcggtgggggagtggttctgcgtctagctagtggtagtagttgccggaagctacatgtatcccagtggcacaggattctaaacacacaagcacagatgggtgcctgtaatacccgtgagacctgtggactgtaccaacctcaatttcctggtttggagagtgtactatgcttctatgcaggatgtcaccatggggggaagtgggtgaagggtgtatagggcctcccggtactttttttttttttgcaacttcctgtagttacttcgaaataaaaacttttaaacgtggctaatggaaaattttaaatcacagaggtggctcacgttacatttctattgggcactgttagcctaaaccgggggatccacaaaccatggcccgagggccaaattgaggctgccctctgcctctgtacagcccatgaacgaagacttttttaaatgaatagactttcttttttagagcgattttaggttcacagaaaaactgagcagagtacagcgagtttcccctcaatgtacacactttcccataccattaatgtcttgcatttgcgtggtacatttgctgtaactgatgagccaatattgatacattatcagtaataactgacgttcagggcttctactaggttcactcttggtgttgtacagtctatggggtttcagagacacagtggcaggcgtccatcattgcagcctcacacagaatagtgtcactgcagccgggcgcggtggctcacgcctgtaatcccagcactgtgggaggccaaggagggtgcatcacctgaggtcaggagttcaagatcagcctggccaacgtggtgaaaccccgtctctactgaaaatacaaaaattagctgggtgtggtggcgggagcctggaatcccagctactcaagaggctgaggcaggaaaatcgcttgaacccaggaggtggaggttgcagtgagctaagattgtgccattgcacttcagcttgggcacaaagagcaaaactctgtctcaaaaaaaaaaaaaaaaaaaaaagacaagaaaagaaaaggaaaaagaatagtgtcgctgcctttggaatccagtatctgcccatttatctttttctcctcttgagcccccagcaggtgttgatctgtttactgtcttcacaattttgccttttccagaatgtcctagagctggaatcatgcagcttgcagccttttcagactggtgttttttgttttttttgagatagggtctcactctgtgacccaggttggagggcagtggtgcaatctaagctcactgcaacctccgcattctgggctcaagcaatcctcctgcctcagccccccaagtagctgggactacatgtgtgagccaccatgcccggctaatttttgtattattattataattttttttttttttttttgtagagacaaggtttcaccatgttgcccaggctggtctcctgagctcaagtgatcacccacctcggcctcccaaagcgctgggattacaggtgtgagccaccgcacccggcccagattggcttcttccacgtagcaatgtacatttcagcatcctccacatctgctcaaggcttgacagctcatttccttttatccataaacaatattcccttgcagggaagcgccaccgttcgcacatccacccaccaccacagggtatcctgactgcttccaccgcgcccgtatgaatgaagtggttacaaacacctgcgtgcaggtttcatgtgaaggatggttttgaacatttttaaatgttgaaaaaaatccagaggagaatatttcacaacacatgaaaattatatgaaattccactttcagtatccttaataaaacgtgaatggggctgggcgcggtggctcacgcctgtaaccccagcactctgggaggccgaggcggggggattacctgaggtcaggaatttgagaccagcccggccaacacggcgaaaccccatctctagtaaaaatacaaaaattagccgtgtgtggtggtgggcacctgtagtcccagctactcgggaggctgaggcaggagaattgctttaactcaggaggtggaggttgcagtgagccaagatcacaccactgcactccagcctgggcgagagagtgagacactgtctcaaaaaaaaaaaaaattaatggaacacagccatgccaattaacatacattgtgtggtggcttccatgctacaagggcagaattgaaaagctgcagccaaaaccatctggcccccaaagcagaaaatacttgctgtctggcccacctgccaacccctggaatagacaattacaattcccaactttgaaagtccaggaagaaaaccaaccaaaatgataacggcaacaccagagggatcaaagatcacaaatatttcccttctgcctttcccccaaatttctttttttttttttttttttttttttttgagatggagtctcactctgttgcccaggctggagtgcagtggcgtgatctcggctcactgcaacctccgcttcctgggttcaagtgattctcctgcctcagcctcccgagtagctggaattacaggcatccaccaccacgcctggctaattttagtactttttagtagagacggggtttcactatgttggccaggctggtctcgaactcctgacctcaggtgatccgcccgccttgggctctcaaagtgctgggattacagacctgagccaccaggcctggccaccctcgaatttctaaaatgaacacaatctcttttgtctctttggaagcccatttctatagtgtctttgccggggccccagcaacctgtctgggactcctgaccagactcactcgctcagctctaggggtcgacgaggctgggccatgaggagcaactgacatgacagaaacaaggagtttctcagggccctgattgtgtttggttttttgctttttgtttttaaccagagtcactgctcagccatcacttgtgctgaaggcttgagctctgcgtcaccctttcctaaaacggggtgatgaccacactgatgtcgggagctgtttctgggattcaggttggcacccatagagcatatgccgcggtgaacagtgctcccccaagattcatgtccacacagaagctcccaatgtgaccttattcagaaatagggtctcagcagatgtcaccaagctaagatgaggtcaccctagatttgagtaggccctatctaatgactggcatccgtatgagaagaagagagggcacacaaagggacacaccctgtccatgtggcaacagaggcaggggtcggaatgatgtggccacaagccaaggaatgcctgcagccactcaaaccggaagagaccaggaaggaccctcccctagaccttccagagggagcgtggctctgcagacaccttgattttggacctctggctccaggactgtgagagaatacatttctcttgtttcaagcacccggtttgtggtcctttgtcacagcagccccaggacactgatacgagcacgtccaacggggctggcaactcagtcaggtacacagtgatgatgactgtctatctgccctgtactgagccctctgtgcagagctttacacgcacggccttcctgaacccccacaatgcccccacttcacagaggagtaaactgaggtacagagtggttcaacaccgtccaaggccaccccctgcgggtcttgagtggagcttggattcacagctgggtctctgaccaaagctcacttacaggcctcacccaaccaagcccgccagccccttctctgcctagacatcatgtgtgagccaaacagccatgccacagttgcacaccagagggctgggcacggtggcatcccagtcgaattctttggcagcccctccaagctcccagagctgaggggcagccagggaggggaccagtgctcggctgggcgcctgcttggcttctccgcctgacagtgagactgctggggcgaggctatgtcctgtggccatttctagactgactatggccacatgccagttcatggggctctgaccagccagctgcccttcccgtaacagcttccctcagacccctggcatcggccactctctgggtgcaggcggagcagctggtggtggccaccttggcttgggcaggggggagtctgggggagggaggaacgccacacagagcctgccaagtgctacagaaacaagacgagattagtctgaacgacacacagaacagattgcagggtgtcgggcaatgggatgttttaaagaaataaatctcagctcccggttacagaagcacaaacaaacccaaacaacagaccttcaggagctgctggcttcccggctgccaggctgcgctgggcccggaggggtgggcgggggttcctggagcatcctcagggggcggcgggcgctctcggggtatccccgggcgccctggttggcccacgaccgggatcaggggtttgatcctgaaatttgggaggaatggaggatgcagccctcccagctcctggccatcccacctccgaggtctctctgggacccagttgtccctcccctgggtggcggcagctcctggatatctgtgctgcacctgcccctggtccctgctgctgctggagtggcccctaagacacgcacggcccaccctccccactcaccccttgcccccttccctgctgtctcttgccctggaccctctcacatgcccttccctccaccccccgcctcctgctcccttcctcatcccctgctttgtgtccccgtctcctgctccaggctctgatttgctgggcagctgctgcgccccggaacaaagacgggaagggcaaagtgtgtcctgattcgtgtgccaccgctcacttcttcgcccacctccaggagtttctaatcctcctcgggcttgcctggagggttgggcagaaaaggaacggcaggaaacgcagaagggatccggaacgagcagagctttgtgagtccagggcgacacccccagggccttccgtgggagctcctgcaaggatgcttcccagcactgggtcctggcccaccaagcgcactggctctagctcattctcagagactggactcttccccgagagcctcatttctgtcctctgtgccgtgtaggaggacaggggccattacaccaacgatgaacgataacgccgttaataattcagccgctgccgctgatactcggtcgacaaggagccttttcctcctaaaggcagaaagcacttagatgccgtttattactgcctcgcacgccctgcggggtgggctggcacctgccagggaagccatgtgaggtggggagcggccgccccatggggtctgctgtccaagcactggccagctccaggtgaacccttgtgccatcgcccccatgacaggggccaccctgagggagtagaggggccttgtcttatcatctcgtctttcccccattactttggacagagagtttttcgggcctgtcctgctgggagggtcgctacgtttctagggtccaccttccatcctcccaggaacattccgtccagacctgtgctgtcaggcatggaggcctcccgctgtgaccaccaaacttcacattcattgaagataaagaaagaccaaagtccagttgcttggccacatctgctgcatttctagggcgtggtggccacacacagtggggcacaggcacaggaccgcgtgcactgcaggacgctctgctgacggcgctggcccaggcactgggaggaccctgtgaggaagcacccgggaacggtggcgcacgtagggaacaccacgcggccttgataggagctctccagagagaaagctcaggtcccagcaggggtcacggagaagaaagtctcttccacctgcaggtgggctggggattcagcaggagagaggagaacattccagctgcgggcagcaaggtgggaagcggctatgcttggggtgaagtgcccagtgtgtgtgcaggaaagggcaagaggaaagtgggagggcagggggtcccggcagcacccccaggtgggcagcacattgctcctggcccttgcccacctgtggccgcgccaacccgcttggactgagtctgacctggcaggaactgcatgacagaaaccacagtaacaagtggccaaactctgaggccaggccacccagcccatcccaacacccaaacaccatcttgcctaggctggccaccccgggaacgcatgccgggaatgacaagaggacccagggagagagagaacgaaacactcacttccccagggggaggccccgctggcggcacgggacccaaggtggcaggccggcggcactggtgtcactggaaggacctcagtgaccagctcgccctggaggcctcttcactagttagcagcgtgcagcgcagtgggagatgcttagcgtccccaaatgtgcaggttctccccttctgtctatttttatacattggttttcattctaagcttaatataatcacagaataacatttttgaaaacagaaaagtaaaaaaaaaaaaaaagtgctcataatcacactaggctaacacgtgggcacaccttcctctcaacctctgccatccactgccgtggccactgaccacaggcgctatccacatttatattcatcagggccgggcacgcggctcatgcctgtaatcccagcactttgggaggtccaggcaggagggtcacttgagcctaggagtttgagaccagcctaggcaacagagcaagagtctgtctctaaaaaataaaataaatgaacggggcatggtggtgcatgtctgcaatcccagctacttgagaggctgaggtgggaggatcgctcgagcccgggaggtggaggctgcagtgagctgtgattgtgctgccgccaccgtatgccggcctgagcaatacggtgagactctgtctctaaaaacgaaacttaaaaacattttaaaattaaaaacaattttattaatccgtattatgtaaaattaaaaattcagttgcacttgcgccatttcaagggttcaagagctgcatgaagccagtggccgcagtgcgggacggcgcagacctgggttctgtctgccctggcagaagctctgctgggcagccctgccctgagagcctcatctgcacctcaggcctcttcacagagtttaactgcaacgggcagaatcataacccgtttcctgctttgcgtctgattcactctaaatttccacactgcaacactgcatggaccatttgacagtccttgtcaataccacatcttctcctatctggcagcaccgagcttctgaacgttttacaggtcacagaccttctgggaagtcagatggtgcctcctcctcatataaaaaaaagtggggtaagatctcaggggttcgtgagcccaggtttgaaaactccctgatccaacagagggaccttagagggaccttagtcggtccacctcctctgccgttggattcttatgttctgctcctttttccccactgtaaggaataccacgatgaacatcttcatgcagaagcgtttgtctttctacttttattttcttttgagacaaggtctagctctgtcacccaggctggagtgcaggggcaccatctcggctcactgcaacctctgcctcccaagttcaagcgattctcgtgcctgagcttcccaagtagctgggattacaggcatgtgccaccatgctgaactaatttttgtatttttagttgagatggggttttacggtgttgaccacgctggcctccaactgccaacctcaagtgatctgcccaccttagcctcccaaagcgctggaattacaggcttaagccacgtgccggccactttggcctttctatctgtaatttggattctttcttaggatgaggtccagaggagacattttcacttagggagcagaatctggtgtttttgttgttcttgtttttgttgttgttgtttttgtttttgacaaggtctcactctgtcacccaggcttgagtgcactggtgcgatcatggctcactgcagcctccacctcccaggctcaagcagtcctcctgcctcagcctccggagtagcagcttggattaaaggtgtgcaccaccacacccagctaatttttttttctttttggtagagacggggtctcgctatgttgcccaggcttgtttcagttctttatccaggtcaccaatgcacatccccggggcagggtcagtggacacggtaccagccccatggcgccccgttattccacaccctcgcccaactggccttttaggctggacggtagcttccagcacagaaaccaagggcaggatgaccagtcgcgcttggtggtcaccctccccagcacacccgagagccttgctttctgacactgaggagggcacaggaccaagatagcccagggctcacccccggctcggggaagctcagggtcttggggtctcagggcggggaggcaggacgacgcattggcgacagcagctctccgtatcaccccatcccccaagtcagcctcgaatactcacttggtcaaggatttccaggccgtcgctggactggggcctggggcctggggcttccaaaggagacctctgggtttagtaggtgggctcaccttccagcatgcagaccccacctggccatactctacaggtagcacacgaatgtgggcagcccgggggatactgccatttctaacccctaagctcttctgtgaactacttgccaaataaccatatacctgggggaccctaggcccccggggtggggtgggggagttgtccctcctggccaatctcagccagacacgcagcctgcacatgcagttcttcagatccaccactagaggggaccctcgagccagcctacctgctctgccctccggggggactcaactccgggttaattattaatagacgccccaccgctcagagtggcgatgggtgcacccgagtcctcaccaacacccctgcctggcgggatggccagtcatctggggtcctcggccctgacacccctccccaccccagagcaccaggagcgctctcgctctctctcgctctctcgctctctttctctctttctttctctctctctctctctctctcagccccttcacagcaggggttctcaacgctacgtgcacttcagaaacccccaggaagttcaaaacattcccatgcctgggcgccaccccagcgatcctagtttaattggtctgggtgcagcctgggcatcaggatttttaaagctgcccagggcattctcatgggcagccgggctggggacgcctgctctacagcgtctaggacaattaaccaccttagccaaggatctccagtcccatcatacgaaggccccgggggatggggatggggcaaggagcaccacctctgcttcctgggtctaccatgtggtgggggccagaagcgcacaggagcaaggaaagaccagggaaatgcagattccagggctcgcccagcccctttcagaatccatgtctgcttttctttttctttctttctttttttttttccagacagagtatctctctgtcacccaggctggagtgcagtggcatgatcacagctcactgcagccttcacctcccaggcttaagccatcctcctgcctcagcctcctgagtagctgggaccataggcatgcaccactatgcccagctaatttttatgtattttttatagagatgaggttttgccattttccccaggctggtcttgaactcctaggctcaagcaatccacccaccttggcctcccaaagtgctgggattacaggcgtgagtcacagtgcccggcctccatatctactttttaaaaataaaaagaaagctctcagcagtctgtcttggagacaggctgttttcactccagccttgcactgaagcacacgcttctggcggggtggggagagtcccatccacatccacctcgtcccagcacaaagctgcaactcgccacgttcagcgagcctcccctggaccgggctgacacaggcctgaggtgcgagccacaccgagcccgcggccatgtggccaagaggcattttctgagccttcatcaggagcagggccgggctgtggtaagcaccccccagcacggtctccgggtggggacgagtcccaggccaggctcgctgaccccataccccaggctggtgctcaaccctcacgccgactctgccctacaagggggttcttggccgcacttcacacccgtgaggcatctgcgttttggatgtgggaggtaatggccacaagatcacacataactcaggatgatgccaggactggaaacagatctgtcggaccccaaaatttactccttcaccaccatctgcctcccagcagctggggacggacaggcggacagggtgtctcagtggggactcgagtgtcagagcagagaagggggccatggggagggccctcctcagcccagggttcgggggaatagagaagcctcccccaaaagctgacatgaaggtgcctcgccccaggagctgagtctcaaacatataagctggccggttaggagagaggggaaggaggaagcctaggtagaggggatccctagccaaaggcatgaggcagagagagccccacaagatctagaggcagagaggacgacgaacttggaggtgtgcacagtggggggtggggaggcaggcagcatcgctcagcagggccagatggtgatgggccttggaccccgagtgaaggagatggtgcttcatcctgaaaatgatgggcggcccccggtgggtcccaggcagagggacagcctggcttccagagtgagtgcacagcacgcctgtccgctgcccactgatgccaatacatccccaccctcagttgtgataaaaaaaaaaaaaaagtgtctcctggcattgccatacaccccctgggcacagactcggccccgggtgagaatcactgctctagaagaacctggagggacctgggcatcagcgtctaaaggctcccccaggaacccccacatgcagccaggttgaagaaccagcaaggcgaagggcggggaaaagcgaaccggggtgcattctcacaatacccccagaaagtggatattaccagcctcatcttacaaacagggaaaccgaggctccaagaaaagaaagaatttcccaggttcacactaaccagtgatgccaggactcaaccggcactcaactccctaactcctaaacttgagctccctacgagatggggctgcgggacagagagctgaccggccagcttctggttgtggttctgccacagaatcctcagccccaagaccgtgggccaaccccaccacctctctgagacacaactgggaccttcccctcgcctgggccctggggatgcagggacacggggacgcctgcaggttctgctgcactgttggcctggcaccaccagggggagctccgactgagtccggcctgcgggacccaggccaggaccagagttcgggccccgcctcccccacacctcctcgggttccctggcgcctgacgccacccagctcagcaagcctcctggcacctggagtcctcagttacggctcacggcttccttttatctgcactctccaataactgagatgaatgttatcggttcaccctggggctctaatggactgcatctttactggagggataaaatcagggaagaacccgtcccacagtcacccctgctgaggccagcaaagcctgtgtccttacttcatgccccaccactccccggcttaatcggcctggggtgaccttttatgctgcagccctggggcagacccagctgggttcacatcccagcttggcccgggcactggctgggagacccctggcaagctgctgaccttctccgagccgccctttccccttcgatagcaggggataataggagggcccacctcacggggcgtggggctgtggaaagcacacacgtaccatccatagcccacggtgtccagcgcccaggcgagacccagaccacccacgtccagcatgcgcccggctcacaccacgagctcaacagttaatgacctgctcgctgactgatgtcggctcttactgttgtctgtggtcaccaccattatttgcccagaaatctaatgagcgtaaggaccacagccggggcataggaaggggctgtggaagtcggatgcaggccccctgtgctggctctggggctccgggcttatgcgaccacacgggcactcaccccaaggccatgagggccctcgtggcaccatgcaaccctccccactcaggaaggtctctttgggttccaaggcccagggaacccaccgcagggcacgggcccaactctagctcctgcaagtgtggccagcaaggagtccagatactctggctggactccccagggtgcatagcggctgccaagtcgggtgaatatggtcaacactgccccgggactacatccatcctccacagctatgagaaagagggaggctgaagcctccggggaccacagggggccaggtcacgtgcccagtgggctgcagggcagagcggggagctggagaccagcacatctgggcttgggccagccctgtgcgtgagcctaatgatgccacccgggcctcttgggcactcgcttggggactgaaaatctcctgcccctccggtgatgggaacagaagggaccaggactcccgggggcttagccttggtcatgggcccatcagacctggtagggcctgtttagtcctagtgagtctcaaggagagagaagaatgtggacaccccgacgcacccttcacagtcctctcagtggggtgtaaagtggggactccctgctgaagcccttgcctcagggaggggctcctgccacagccacggccacagccgcgggcaggtcgggcagatgcctccagcgctcacctggcatcacaggtgacgcaggtgagtgcttcctgcccaggtcaggccttgggggcctcccgagagcccacgcccagaaccaggaactcacctgctgtcactttccagaaacacggagccgcggctctcggccagcgccgcgctgatgggcgagaggcagaagggcgaggagaaggtgtctgagtctgagtcaaaggagctgtctctgctcacgccctcggctgacagttccaaagagccatcctcctccccggcctcgggccgcggctcccgcccctcctcggtgacatcctgcggactgaccgtcgacaagatcccggaggggctgcaagcaggctgcgaggctggctgggcaccatccacccccaagccctgcgccagcttctcctcatcctctggcgcagggctggcgagcatgcggtctggaacactctgggccaccaccaggatgtcctcatctttgggggtcagggtaggccgcagctccgtcggggagggctggtgggaggctcctgagctccgggtgcgccggccccgagggcggggtgccttgcgaacgggggagctctcgggtgtgatgtagcgcagggcctcctcgtcctgcctctggatgcgagagttggggacccatgccaggatgagggtggctcccagcatctcatccttctccatgtacaagcacaggtaacctgtgaggagccagggggatggcacgttagaggccaggaggctgtggatgaggcccttgtggtacctttggcgagctgctcggagaggccactgccctttagtaaagtgccagtccggcctcagatacagcctggccctgagcaaaaacactagagggaaactgtggagcttgaaatgaattccagctatgcgtgttttttaagaacacacacttccggcagatccagggggcactggtccccaagcaccggcctgccatgcgcctttctttttggtttttgggtttgtttcttttttctttgagacagggtctcgctctgtgtctcaagctggagtgcagtggcacaatctcagcttactgcaacccccacctcctaggctcaagcaatcctcccacctcagctcccgagtagctgggactacaggtgcacaccaccacacccagctaatttttttttttttttttttggtagaaataaggtttcactatgttgcccaggctagtctcaaacgcctgagctcaagcgaaccgcccacctcagcctcccaaagtgctaggattacaggcgatgagccacgaactcaggcttgccatgcacctttccaagtacaccaggggctctccctgtgttcagagccctgaccctggccccagggctcacctgcctgcagcctccctgtctgtgtgagcccagcggcccaggtgcccagcttcatggctttacagcactgttaggagggatggaggctggagacttcattctgtttcacaaaaagaattcatacagccaggcgtgatggctcacgcctgtaatcccagcactttgggaggccaaggcgggtggatcacgaggtcaggagatcgagaccatcgtggctaacatggtgaaaccctgtctctactaaatgtacaaaaaattagccgggcgtgatggtgggcgcctgtagtcccagctacttgggaggctgaggcaggagaatggcgtgaacccaggagacggagcttgcagtgagccgagattgcaccactgcactccagcctggatgacagagcgagactccgtctcaaaaaaaaaaaaaaaattcatccaagctgggtggtatttgggccttttccaatcatcagtggcactcatggcatttttttaatgcagattgtttgaggaaggggccacctttgcagatgagcattgatgtcacacacggggttgctggtgacatgggaggagggatttctcctgggccagagcaagtgggtgggtgctcagttctggggggaggtggcatttcctaacccagcaccacgcagtttcaggatatcctgattcctgggcctcccccacccactctccaggcctctacaactcagacccctagaatctcctaagcactgctcctgttgccaaaacaggctgggaaatttggggaatgtcagccagctgggcattaggataacatgagcctgaggctgagaagtgtttccacatcctttgagatcggcaagagggtccgaggtggctactccctggtctctctctctagaacaccctcaggccaggcaacctccgggtcgaggggccgcatcgcccagaacctgcacccctttctagggcactccagggaagcccctgcccacacagccgcagccaaccagccggtggctataaagatacacttatcaaggcagggggacagaacactctctttaaatgtttcattggcataatttaaacttttgtcttgtttaaaaatttatttattcagtattcgattgaaacataatctgcataaagtgcccagatctcactgtaatttataacttttttttttttaatagagatgaaatctaactctgttgcccaggctggtctcaaactcctgggttcaagcaatcctcccacctcagcctcccaaagtgctgggattataggtgtgaaccacctcgcccagatgacaactttactattttgccatcttgtctgggacttctgtctgtactcttgcccaagccaagcaaatgttagggtgtgccggggcaggccacagccaggctgcaggacactggggccctgaaacatccttttagcagccagggaaggggacggcaacaggaagaaatgagaagagagagtccagagactgccctgcagccccacctccaccacacactggcactgtgcagccgagagtcgctcagcctctctgaacaccagcgtccttacccacctaagaggcctgctggggccctggccactcccatgaggttgttgtgcaaattaaataaagcaacagatgaacaaagcaatgcatttatttgttgcaagtcattcacacgaatgacaaggggccaggcaggcctgagggatcactaacccatcttttgtccctccctttggaagcagcagggctgagggactcacccagcctgccatgagccagacttaacaccccccagaccctccttccgggaggacagctgctgttagttacacgttctggaagaggaaccaaatgcactctcacgtgctgtggcccagggcctttagagccctggctcggaaaataacctgggctgtgcgaccctggagcctcgcctgccctggctcacctgggtggtgctcccccagcccctgcagcccctccggcgggtgcacgcagacattgttcttggagtagatgatctctccatccaggacagagggggacccgctgccgctgccaccgggggtgagggtcaggaggtccgaggctttggaggaggccctgcgaaggaggcggcccagagacattgccgggcaagtgtttccatcctccgcatgcgtcggcccgggcagggctcgtcaagacctgcctgggggaggaagagagaggagatggtcaaggttgtggacttgcgttctgtctcacagcagtacgtgtcgcctcggcacccggtgggttctggttaaccacaggagcgtgtcctgctggtgaacagctctgtacagggtaggccacgttctccatcttggccaggccaccctgtccatcgcaggaggctgagcagcgtccctcgcctcaacctgtggatgccaccagcacctcccttcccagtacgaaaactagaacatctccaggctttgccaaatgtgccctggagggcaaaatccctcccaaggagaaccactaagctacagaaactctgttcccaccttagcaatttcacaaaaacctccacaaaaacgtttttttcacaaaaaaaaacgttttcttttctcagtttcccacctgcatcagcacaaatgagcccttctaattcattaaaaagaaataaacaggcaaggcgcactggctcacgcctgtaatcccagtactctgggaggctgaggcagacagatcacttgaggtaaggggttcgagaccagcctggccaacatggtgaaacatcatctctaccaaaaatacaaaaatgagccaggtgcggtggcgggcgcctacagtcccagctactcgggaggctaaggcaggtgaatcgcttgaacccaagaggcggagggtgcagtgagctgagatcacatcactgcactccagcctgggcaacagagcgagactctgtctcaaaaaaaaagaaagaaggaaaatttataaactaaaggattagtatacagaatatataaagaactcctataaattcatggtgaaaaggagcaacatctcaacagaaaaaaatgggtgctccacacaagaggaaaaccaaagaactgataaatatgtaaagagattctcagttccaaacaaaaattcaacacccaacaaaccagcaaaaagcaattttaagtcaaaaaatactgaggatgagggaaaggggagctgtcaccagtcctgtctcctccaatgcgggagcaacatggcagaatctggcaccactgagaaggcccaaagccccctgaaattcctcccttaggaaatacctgagggtggttcttcaaactgcaatttgcagccctatcatagatcctgaaatcaatttagtgggtcaacaccagcataagaagaaaaaaagaaaaaaaaaatagaaaatgcccttgaaccctggccataggtaggctcagcactgggtcagagaacttctgccccgtgaggacacattcatgtgggtaagacgacctgggacgtatgaaatgtatatataatgcgctgtgacctgaaacatgtgatgactctgcctggaggaacccaaggaaacacctaatcaaatgctttgcagccagtttctaccaacaaaaatgaaaccaccaaacctctagatagcagatgagaaccaactagacttctatacacacatggagctcacaaacacacacaccaagccacgccaaggaacgaccgtgtcagtgaagaggcaggcacagctgggcacaatgactcatgcctgtaatccaagcactttggggggccgaggcaggtggatcacctgaggtcaggagttcgagaccagcctggccaacatggcaaaaccccgtcttgactaaaaatagaaaaaaaagttagccgggtgtggtggcacgagcctataatcccagctactcgggagggtgaggcaggagaattgcttgaacccgggaggtggaggttgcagtgagctgggattgagtcactgcactccagcctgggcgacagagtgagactccgtctcaaaaaaataaaataaataaaaaaaataaaagacaggcacagagccacgctgcatcctgatcactgatgggggatgtccaggactctgaccacagctgggctgcgtgcaggccggcttcacaaaagtctgcagaggtcagggggctgggagacgacagccacagaggggcttcaccttcacctctttgaaggaagaaaagacttgaagccaacatgataagaattagcaactgggagtgaataaaccaaatgtggtacagtggaatattatttggccttaaaagaaaggaaattctgactgggagcggtggctcacacctgtaatcccagcactttgggaggccgagatgggcggatcacctgaggtcaggagttcgagatcagcctggtcaacatagcaaaaccccgcctctactaaaaatacaaaaattagccaggtgtggtggcatgtgcctgtagtcccagctacatgggaggctgaagcaggagaatcgcttaaatccaggaggtggaggtttcagtgagccgagatcacgccactgcactccagcctgggtgacagagcgagactccatctcaaaaaaaaaaaaaaaaaaaagaattagtaactgggagtggataaaccaaatgtagtataatggaatattatttggccttgaaaagaaagtctgacgcctgctacagcatggatgaaccccgaaaacattgcgctaagtgaaacaaatcagtcacaagagacaagcactgtaggattctactcgtgtgaggtccctagagcagttaggttcacagagacaggaagtggaatggtgggtgccagggggtgaggtggggggaatagggaggtcatgtttaagggggacagagcttcagcttgggaggatgaaagcgtcctggaggtggacagtggcggcggctctacaacatgatcgtactcaatgccgctgaacctgatacttaaaaatggttaaagtggtaagttttatgttatatgtattttaccacaataaaaaagttaaaaattatctattagtggagggtctccgggtatatgatcttgttctttgaactttctgcattttttacatttctccaaagatccagagctggttgagggtggtccctaaatcaagtccctttcacctccagcacttggctaggctctgggacagagggtgggtgggtgggtggaggggtccccactggctcagcagaactggctcccagcctggcaggaggcagggggcagatgtcagtggtgatggccaccatcccaggaccaggcggctcagcgctctctgcctctctgggttcctctcctctgaccccctccatgcttcagcctcccccagccctgtttgtgtatttccaattgtctccatggctgctgacttcccaagcacaatattccaaagatgttccagccagcccaggagtggccttcccattcccatgtctttcctctgacagatccatcacccccatctccccatctcagagatcccgacgtcaacatcacttgtgaaaatcaccagttctgggggtggggacccagctcagatcctcacctcctcagccttgagccacagacgccctctgcctgatctcaaccgtctccagggccctcatccactcagctctccctagcccacccctttttaggctccctcaacatgtccaatgaaggctgcagaagaaagtcgaccccttggtgcaggggtcagcaaacttgttctgcaaaaggccagagagtaaatgctttggactctctgggccggagagtctctgtcgtgaccactcaactcggcccttggagtgcaggagcagccacagacagtaaatgatgggcatgactgtgacagtgaagctttactgacagacactcaagcttaaattctagatcatttttcacgtgtctcaaaaagaattctttccatttttcaacccccttaaaaaacgtaaaaaccggccaggcgcggtggctcacgcctgtaatcttggtactttgggaggcctaggtgggcggatcacctgaggtcgggagctcgacaccagcctgaccaacatggagaaattccatctctactaaaaatacaaaattagccgggcgtgatggtgcatgcctgtgatcccagctactcgggaggctcaagcgggagaatcgcttgaacccagggggcagaggttgtggtgagcctagatcgctccattgcactccagcctgggcgacagagcaagactccatctcaaaaaaaaaaaaaaaaaaaaaaagtaaaaaccatccttagctcacaggctgtacaaaacaggtggaaggctggctttggcctgtgggttgcagatggcagtgccctggcatagaccatctgaccaaatccaggggattcttctccacctatccaaaccagctctctgccaacctctccaggaagccttctggccactcttggcctaaacacttcatcccacacaggggcatatgacaaccaagtgacgaaacttaattaaaaaaatcacactgcaaactacaaatcaaaaaacatattgtccttcccaataatcacatggaaaagctatgttctgttctaatgttatccagaatagtttaagaattcaagaattcttcaagaattgcaaggtcagttaataagccctgcaagaaaattgctcgccgtcctctagaccagccatgtccaacagaaacactgcaggagacatagatacaattttaaattttctggtaagcaaaaaaaaaaaaaaaagtgaaattaattttaataatttttagcataatatatccaaaatattattatttcagcatatagtcaatatgaaaacattatttctttattttttttttattttttgagacggagtctcactctgtagcccaggctggagtgcaacggtgcaatctcggctcactgcaagctccgcctcccaggttcacgccattctcctgcttcagcctcccgagtagctgggactacaggcgcccgccaccatgcccggctaatttttttgtatttttagtagagatggggtttcaccatgttagccaggatggtctcgatctcctgacctcgtgatccgcctgcctcggcctcccaaagtgctgggattacaggcgtgagccaccgtgcccagcctgaaaaaattattaatgaaatcttttacattctttttttttttttagagacaggttgtcacccaggctagagtgcagtggtgtgatcacagctcactgtattctgaaactcctgggctcaaggaatcctcctgcccagtctcccaaatagcctggactaaaggcacatgccaccaggtcccgctaatttttttattttttgtagagatgaggtttcacttttttgcccaggctggtcttgaacttctggcctcaagtgatcctcctgcctcagccttccaaagtgttaggattacaggcgggagccaccgcacctggcctattttatgtccttaaagtctccaaagtctgctgtgcattttgcacttaagcacgtcaaagttctgctcagccacgttttgggtgctctgtagcctgcgcggtgtccacactggacaaggccgcagcggggctggagcccacctccttctgtgtttcaaatggctctactcagtgtgatcgctccagttgccagagctggctgcacacagctctcagctgcttccccaaatcaaaaccctctttaagtgaaaatgttttgccagcactgaggataatcaaaagaatgtgctggaagctttaaaggagattccgaaatacaagtgttcaaaatacagcattttctcccataccatgacaggcagaacctcactgtggctctgcgaggtgcgtcccaacagtgcagctttacggaggagaagacaggttctgaccactcagggtcatttcgtgagcgggaaaccctgcagcgtgagaccttcgtcccccacgtgcagaactccggctcctccatcacccgccacctgggacaccaggacaacccccccccgcccctcccagattgttctggagagactgggctctttttggagaaatggagcatgtctattaaacattagacaggactgtttgctctctaaaaacaattctccttatttgtaaagtgcatttgctgtttcgcaagaggctatttcatcgaaatccaacctagttcccaacctctggtcaccagcaaactagaagtggagaatccttggcccattttttaaaacttttttttagttatgaaacacactcagagaaggaaaaggaagaatacgtgtcccttaaatcacataatcctaagacatttatgtattctctactatattttgtgccctataatgaatgagttaatgaaaaacccactccttggaattatatcatatcttgctttcagttggatcataaatatattttcccaggtgaagtatacttatgatataacaaactttagggttgaagtacatcccctaaaattcctgtgttgaagtcttaaaccccagtacccaagaatgaaactgtttttgaagacagcatctttatagaggtgatcaagttaccttgaggtcaatatgactggtgtctttataaaaagaggaagttggtagcaggtgcctatatacaaggagagtgctgtgtgaatacaatgatgccacctaccagcaaggagcaggcctggagcagcccctccctcacagcctcctaaggaaacaatcctgccgacaccttgatcttagacttcctgcctccagggctgtcagagagatttctattgctcaagccacctggaccctggtactttgttagggcagccctagcaaacaaatataccacattattaacacatttaaaaagtataaggccaggtgtggtggctcacgcctgtaatcccagcactttggaagactgaggcgggcggatcacctgagatcaggagttcaagaccagcctggccaacatggtgaaatcctgtctctactaaaaaatacaaaaattagccaagcgtaggggcgggtgcctgtagtcccagctactcaggaggctgaggcaggagaactgcttgtactcaggaggtggaggttgcagtgagctgagatggcgccactgcactccagcctgggagacagagcgagactccatctcaaaacaaataaataaataaaaataaaaattataaatgccaaccctccatcttcatagaatcagccgccattgctaggcatctggcttccaactagtggctactgaaataataaactccacattttaatacataaatcttcatctgtatcctcattatttccaggattactgtttccccaggaggataaactggaccccaactcgtattgcccagtgggttccccgaaatgtaagagtgctgccagggatttaaatctccaccaggctgggaactgaaaaatggttttctgactgggcacagtggttcacacttgtaattccaacaatttgggaggctgacgtgggaggattgctcaagcccaggagctcaaaaccagcctgggcagggccgggcacggtggctcacgcctgtaatcccagcactttgggaggccaaggcgggtggatcacctgaggtcgggagttcgacaccagcctgaccaacatggagaaaccccgtgtctactaaaaatacaaaattagacaggcatggtggtgcatgcctgtaatcccagctactcgggaggctgaagcatgagaatcgcttgaactcaggtggtggaggttgcagtgagccgagatcgtgccattgcactccagcctggaaacaagagtgaaactccatctcaaaaaacaaaaacaaacaaacaaaccagcctgggcaacataacaagatcccacttctaaaaaattagctgggggtggtggtgtgtgcctgtaatcccagctactcgggaggctaaggtggatcacttgagcccaggacgtcgaggctgcattgagccatgattgcaccactgcaccccaccctgggtgacagattatcctatatttattagacatttgtgttcacttgtgaattatctgttggtgtgctttgacaatttttctgctggcgtggtggaattcttattatttttaatacagagattaagctgagatggaattttcattgatatgtaagaactctttatatagtaaagatcactacatacacaccatagacacacaccatagatacatacatcacgcaccacataccataggcacacaccataggcacactgcataaacatcacagacacacacaccacacaccacagacacacacactgcacacaccatagacacatcacacacacaaccccataggcacacaccacactctacacacacaccatagacacacacatccaccacagatgcacacataccatgacacacccaggcacacacactatgacacacacacaccatgacacacaaacacacaccatgacacacaccatgacacacacaaacacataccatgacacacatgtatttctcctaatttgttgtttgccttttatttatattacctattttgacatacggaggtttaaaacttttatgtaaattgatggtaactttttcttagtaacttcctttattacttttatacttaatataatcctttccaagctaaagatcgttaaacattggtctatattttcttctatgttcaatgaactacttttaatgtttcaaaagcctaattcaaagcatatatttacctgaaagggactcacatgttaactaaagtatcgagcagttcattgagtgtttatgttgtttttattgctaggccctgtttttattgcttactcagttatctgacaaaaacactgaaatctatgataaattaataaagctgggacgtttatttttatttatttatttatttagagacagagtttctctcttgttgcccaggctagtggagtgcagtggtgctatcttggctcactgcaacctcttcctgccaggttcaagtgattctcctgcctcagactcccgagtagctgggattacaggtgcccaccaccacgcctggctaatttttgtatttttttagtagacaccagagttcaccacgttggccaggctggtctcgaactcctgccctcaggtgatccacctgccttggcctccaaaagtgctgggattacaggcgtgagccaccacgtccggccctgtttttatttttttgaggtggagtctcacactgtcgcccaggctggagtgaaatggcacaatcttggctcactgcaacctccgcctcccaggttcaagcaattctcctgcctcagcctcccatgtagctaggattacaggcacctgccattacacctggctaatttttgtatttttagtagagacggttttgccatgttggccaggctggtgtcaaactcctgacctcaggtgatccgcccgcctcaacctcccaaagtgctgggattacaggcgtgagccaccatgactggccggggacatttattatataaaactttatggacaattttaagaggtgccttggccgtgacccggaggcctatgtggtttggcccacctcatggtccacaccctctcagctgccgcaacgctgcacatgtgacaaacacgtgtgtgagatccacggttctcatactatcacacgctctggtgagagtaatggctcatcacaggcaagatttaccgcgaaatgggacaggcggggtcattttaacttcctccccaggccaccccctccaccctgctgaaagcacctgcaataaaatacgttttcagaaattcaccagatgtcccttccaaagatcaagcccagctgctcccctcccctttatgggcaggcggccctccaggggtattgcgaacgggctccagcgacagctgctcggaggctaccatgggacagtacccgggcagccacagccctccatgccctccttccgccccgcagtcccagcatgaagccacagttccccatgagcccagggcaagctcgtcagagacccttccctgcggaggcccacagcccctgcggccacttcttccccgaatctcaatcctgcttcgtgtggccactgctgaaagagacgctcagtgccacttagagcgcacagcccactggtccaggctgtgcacacccagggacccttccaggcattcctcacctcggtgcaggccaggagcgagaactgctgccgggcccccccccaccggctcagggcgtggctggggtggccctgctcctcggtggcccgcctggccccgctgtgggcttccctcccaccaccccggccacagtcacagcgggttgtgtcaggccgccctcatctcccacctcccaggcccagctggcgcctccagccctggtgtgaatttccattcagggtccaaaatccaccttggcagcgccctcattctgcagctccacggagccctccagccagagaagagaaatctgagtttaacccgatcctgtcagaagagcgggaggaaagagctccggcggacagggctcccaggcccctccaggacgaggttggaggaccaagcgcagaaggtaaggacgcagccctcggcgagtgcgggcggggcccaaatccctcgccggccggctaagcagaagcggcttttggctttccgcgacaaagcgcagctccgggccagacggtcctgcccggccctacccgcagccccggccccaaccagaggccccacttcagcccaccaggcaggactgcagcggggcacgccccacggaccccagccccttggagatcccaaaccccatgcctgctgctcccaccccggaggagtcagaggccgagaagcacacacaccatagaccccacaccacgcacaccatagacacacataccacacaccacacaccataccacacacaacacacaccacagacacacacaccatacaccatagacacacataccacacacaccatagacacacacactacacatcatagacacacacaccacacacaccatagacacacacaccacacaccatagacacacaccacacgcaccatagacaaaccacgcacaccatgcacacaccacacaccatatacacacacaccacacacgacacaccataggcacacacaccacacaccacacaccatagacacacacaccacacaccataagcacacacaccacacacaccatagacatacacaccatagacacacagacacacatgccatagacacacatgccacacacgacacaccatagtcacaccacacatacaccagacaccaagacacacacactacatacacaccatagacacacatacctaccacacactacaaaccataggcacatacaccatagacacacgcactacatacacaccgtagacacacaccacagatacatacatcacacaccacataccataggcacactgcataaacatcacacacacaccacacaccatagacacacacaccacacacaccatagacacaccacacacacaaccccgtaggcacacaccacactctacacacacaccatagacacacacacacaccacagatgcacacataccatgacacaaccaggcacacacactatgacacacacacacataccatgacacacacacaccatatacacacaaacaccacagacacacacacaccataggcacacacaaacacaccaggacacacacaccatagacacacacataccatgacacacacgcaccccatgacacacaccacacacagccaccctctgctctaccagctttgcctctgttctccgacagcgccagtgttgacacgccagaggctgcctgggccccactccttcccagctgtctccaggattagggaagccccaggcggatccggggccgcaggagcctccctacccagcccccatgctggtctgtcttgggtccataaacacaagtcagccacctgtcaccgggcggcaggaagtgcaggctctgtgagctggaggagggggcgcctaggctctgagggctgaataaggggcctggcaaatgcccccggagagccctggagagttttgcagcagtcctggcacctgggcttcggggcccgcctgctgggagcagccgcctgctgggagcacctccttgctggaagcacccccctgccaggagccccccacccccacccaggagcaccctcctgctagagtgccagggagacactgctgcctaatggccaggagcttgcccagggcagtgacttctggtccacttctgtcccttggttgtgtccctaagacccagggaccctggaaggttcacctgtcggtgtcacacggttccttcttcacacagcaggaacagaggtacagagaatggcgtccaggcctccttaaggactctcaatccatgagacaggaagccccacagggaagcagtggccccccgccccctatctcctcacatacagcactctgtaccttctgctcatttttctgtaaacctaaaactgctctaaacaatgaagtccgccacgcagaaactgcacacggatgttgagagcagctttactcataactgccaacactcagaagcaaccgagatgttctccaacagctgaataaataaataaactgtgatacacctaaataatggaggattatttaatactaaaaagaaaggggcggccgggcatggtggctcacgccagtaatcctagcacttagggaggccaaggcgggtggatcacctgaggtcaagagttcacgaccagcctggtcaatatggcaaaaccccatcgctaatttaaaaatacaaaaattagccaggcatggtggcgcacgcctgtaatcccagctactcaggaggctgaggcacgagaatcacttgaacccgggaggcagaggtggcagtgagccaagattgtgccactgcactccagcctgggtgacagagggagactctctctccaaaacaaacaaacatcatcttctgggggaggggggaatctattagtttaaaataaaaagaggcttgagatcaggaagcttgcatccaaagaggtgtggaggaggcgtggacgagggtggagttgtgtggaccaatgccgagaacaggcaggcactagaggcaggctgaacagagcagagtcaaagacaacgtttggttcctggactgagaacccagctgccggcagcccaagttgtctgatgggagagtttcctaatgtccttgaatctgcaagatgcaagactttgaatggcccttgcccacagcagtgtggagcagttgatgcccatgaccttagggacctggagtcctgcggggtttgaggggggcaaagaaaaccattcgtcctgggaggcaaggaagctggatgtcaggaaggctgccccagtatggaactcagagcaagggggacatccaggttcccttctgcgggcctggggctcttcctaggggccagatgccttctcatcagtacacgaacagaggcgggggcagccagcagaactcctaagacacaaaatgagtgaacactggaaagggagctgagacaggcctgcagcaaagaacagacaccaggcttttccaatctataggaaggactcagagttcatcaaaatcaaaatagcaatgcaagatgctcaaagcaccttgtggcaattattacaaatcccctccccaaatcctgagagatgaagatggatagagaagctgaggaggctgggcacggtagctcatgtctgcaatcctaacagtttcgggagtccgaggtgggcggatcgcctgagtccaggagtttgagaccagcttgggcaacatggtgaaaccccgtctctacaaaaaagcaaaaattagctgggcatggtggcatgtgcctatagtcccagatactcagaaggctgagtcaagagaatcgcttgagcccaggagttcgagatcagcctgggggacatggagaaaccttgtctctacaaaaaaactttaaaaattagccaggcttggtggcctgtgcctatagtctcagctactcaggaggctgaggtgggaggatcgctcgaccctgggagttgaggctgcaatgagctgtacttgcgccactgcactgcagcctgggtgacagagcaagaccctgtctcaaaaaaaaaaagaggccgggtgcagtagctcatgcctgtaatcccagcactttgggaggctgaggcggcagatcgcttgaggtcaggagtttgagaccagcctggccaacatggcgaaaccccgtctctactagaaatacaaaaactagctgggcatggtggcaggcgcctgtaatcccagctacttgggaggctgaggcgggagaattgcttgaacccgggaggcagaggttgcagtgagctgagatcgcaccactgcactccagcctgggcaacacggcaagactccaactcaaaaaaaaaaaaaaaaaaaaaagagaagcagctaagggtagatccttgacaataagaaccccccattctcctcaaatgcatccacttcacatttgtattttgaaacggtgatgtccttgttggtttgtgttttcaataataagctcccgagtgcatgacacctccgagacgctccttttataatgtgcctcccagaatgccatcttcgttaaggttccaaatgccttgtttttgttgatggaaaggatagcaatgccaacttggcagttggcacaaagaattcacagatggattgaagccaagatctacaatttgcatcagcttgagtgtacaaaaaaaagaaaagaaaaaaagaatagccgggcgcagtggctcacgcctgtaatcccagcactctggaaggccgaggcagttgcatcacctgaagtcgggagttcatgaccagcctggccaacatggtaacaccctgtctattagaaatacaaaaattagctgagcatggtagcacacacctgtaatcacagttgctcgggaggctgaggcaggagaatcgcttgaacccaggaggcagaggttacagtgagccaagatggcaccattgcactccagcctgggtgacagagcgagactctatctcaaaaaagaaaaagaaaaaaaagaatgattttagaaggcaaaaagtaaaagcgtcaatgctgattctaaaccatcagaccggggcatgatgaccagttgattttttttttttttgagacagagtctcgctctgtcgcccaggctggagtgcagtggcgcaatctaaggtcactgcaatctccgcctcctgggttcaagcaattctccagagtagctggaattacaggcgcgcgccaccacacccagctaacttttgtattttttttagtatagacggggtttcaccatgtgggccaagatggtttcaatctcctgacctcgtgatccgcctacctcgacctcccaaagcgccgggattacacgcgtgagccaccgccccgagccgaccagttgatttctgtgctgctcaaagccattggtgaccagtaggtagggccagatttctgcaaaataggccattgtgtaattcgaaaggaaagaacaacttggccattcctcaacaaaaatacacaggctcataaaacaaaaaactgtgcagaaactcctccaccagagagtcattctttcccagaaacctgcaactctttaagaattagagcaccattgagaagcatggagtcgcagcacctgcagctggcaggggtgttaaactggtgataaaggtagctgaagtctgcttccaggacgagagcgctttgagggggctggagtagggggagctgcctgcaaggtgaagacgtgggaaacctcagaagccctaaggagagaggggcgggcaggggaggagaggggcagcagatctattctttcacaatgctgttgggaactggccaggctgttgggttggagctgacacagggcgcagctgtgagcctgctgttaaccacacatgttcccttcccgtcccctaggagccacttggccactgaaacttggcctggaacagccaaagatttggtgactcactgtgtgagcagtgggggtgggtcttctctagcaaatattcacagggcatgaggttaggacatctactacccaaaattcactgcccaagatttggtgacttataccctagaaaagagagtcctcctcaatgtagaaagtggcaaagtcaccagaaaaccagaaatgagcaaacacagataaagaaatgacacaaccgtctcccctcttgtctccttttgaaagccctcattccacgcgtatgagcttcctacggctgctgtgacaaatgacacaaacttaccagctacaacacaaatgcataaccttacagtcctggaggtctgaaatctggaatgggtctcacagggctaaaaccaggtatcagcagggctggttcctcctggaggctctaagggagagtctgttttcttgctttttccagcttctagaggtcacccacactccttgctctcgaccccttcctgcatcttcaaggccagcagtggccgatcgagtccttctcatacctcatctctctgaccctgactctcctgcctgatcctgcgattgcatcaggcccactcatataacccaggatcatcccccatttcaaggtcagctgctgagcaaccttaattccatccccaacttgaatccgtggccacgtaacataccatatttacaaattccctggattaggacatgggcatctttgggggccattcttctgccaaccacaccaaaccgaggacactgtaaggagctgatttccaactcgcagggcggcctctgacctgctcacccactgacggtgaaccccccacgcagagtgactactcttttagcagtaggatgaggaccgaggcctagaacccaggagaggagcacgcctgggccccgacgtccctgtgagggcagcgagaatggacacaggtgggctacaggttcatgaccaggacctgcccgtggaggctgcctccacctaaggtcttagtttcctgtcctggcctaaagggcttcatcagttcccaaacaggaaaacaaaaagaacagaggtgcaaaagtctcttccagaaccctcctggaggtagcctggagccactaggagagaggtatcaccccagcctcttctcttgctcactctgtgccgtgcaccggcctcagggccaccttgggttaggggccaggatgcagcagtcagcaggacagacctggtcctggaaacccatggagctggcagttcccactcaccagagggacgcagcccatgcccactagtgacaggcaggggcagaggcagaggcaggcagggtgtgggggccacgggacgcagcccaccaccgattattcccatggccatgtcactgccagactgctcaggagcaacacgcactgagcccggtcacctggcacatggccggcagaaactggttcatctgctttgccctcaaagcccaagcaacaaagaacagggaaacagcgacaccttattaaacacgagccagacacacgcaaacaaggatcgcgttgcccccgctgcagaacgtctgctgctggcatgccttggatgaggccccagcttcctccacctgcccagagccaggcaggggccctacccatcttcctgggaacccctggctttgcgggtcaaagggcgatatggaatcttgtaggcagccaggatcaggacccagtccccgggcagcaggcttggggaaggtagctccttcagtctcatcaggaggataatcccctgcggggccgccgtgatttctcctcgcagctgcgctgaacttcaagttacaggatgaattgagaaaataaagatactggctgcacacagaagccacattcaggatacacccggaaagcctggggcccaaagatgagcctctatgcagaagcgagaacgggacatcaagttgtatttaaaatgaagaaactagggcttagggcattcactgcagtgctgggatcttggaccatagggaaagaggacccctgagaggctataacggggcaggaccatcaccaaaacggtggtgagggaaaacctggtggcctgtgtggctgtgactctccttttgcaactgtccagcggtcaccctgattagcacccactccctggaaaaccccaaagcctctgcctccaaggagagaccatctgccatttgtgcacccttgatagtagattgtaaaatcccatttcccccgcaaagagccaaggaggtcaggcctgggagaagaaactcaactcagaggtgagcctggatctgggactaaggaaagactaaacacaaagggtaagggaagatgcagacccagccaggaaatcaaaaactgccctgagtctggctcaggtacctcctacttctatgctgtgcctgtaaacatggaggcctaaagcttctcagcatctgtcagtgaaggagcagtgaatgcaccgcaaaacaaaactgaaactggggggacatattaacaacacccaaaagcaacacaactgatcttgctttggaaagcattttagttacagaaaaggcaaaaggctgtcaaatgacatctgtaaagttcaccctttcccccacttccagaaggctagagtaatgatgaactatattggagcattgaattcaggctcactcaacatgcaaaaagcagtacacgactgaagtgtgcaagccagcatggatgcgggcttggcacccgcagtacgttggcttcatagtgaccaatccagaaagaccacggagaaaatactgccacatctcagcgtctgcagcccatacaggcaagcagacacatgtatcaccttccaacgcctgcacagactcaccgcccaaggctcagcaacagaagggcaggccattccgactggacagtggatttggattatttctcttttctttctgttattcatgtgtcagaagccaccacgggcagaaatcgaacttagtcttacagtggcccgatttctctcatcctttgaggatggttatgtaagttccgaagacagagtaaagaacgtatttcaaatcagatgccaccagacagctcataaaagcagatttattagagatgcaacatcaggtgctcaaaggacagataggataaaaacaccaacaaagccaacaggataaaaaacactgccgctgaggtgaacggaaaaaggcctccaacatcattgccccatatttttgggaagggtgcaaatgtgtgctctctcctgtgcactggcctcattaacagcaatataatgcaaatgcaatacaaatggtgtacaattcgatcataaaatcatcctctgcgctgtcaccttcacatcccagagccacccgcccccggtgcttaatgctggatgaaacaaagtagctaatcttacaagagaatttaggcctgtgacaaaaatcagggtccctcagccagggaagaaggggagctaaaattttcacaggaggtggtgttgccaggcaacctgatcagctctgctccccatagcatcctgcagggacccagcccccggtcaagttgtaaagataagggtacacatacgcacaaatagtaaatcctacatctgcctggaatcactttccacctcatggaccacacaaaggggagtgaggagtcaaagcacaaaaacaaaatgttttgtgtcaatctagttaaatgtggaaaatccaaataacggtcattaataacagtgttaaaatgttaccatttgacattacttaccacatcctaaatggtaactcaggatgtgtcaggaattcaatgcttttcataatccttgcacaaagtctctgaagtaggtagtatagatggggaaattaaggcactggagaattaactaagtgccagaggagttggggtttttgttgttgttttgttgttgttgttgtttgggttttttaggttttttttttaagcagagtctcactctgtcacccaggctagaatgcagaggctggtcatggctcactgcagccctgacctcccgggctcaagctatcctcccacctcagccacccaaatagctgggaccataggtgcccaccagcatgtccagctaatttgttcattttttgtagcgatagggtctctctaggttgcctaaggtggtcttgaacttctgggctcaagtgattctcccaaaatacaggattataggtgtgagctactatgcccagtccaggatttgtatttgaagccagcagtccatctttctacgccatgttcttaaccactgcaccttattacccaaaactgtggacagagaccagtgcaattgtaggtaggttctgcaaactcaatggctttatcctgaagcctgggggatgctttccatactgaagtgaactgagattagcagctagtggtgacatgggattagtcccacctccttgcactgttatgaaccacttggaagaatgtttgtatatgaatggtgggcaccctctgtaagacagagggcaaagttgtacaacggttttctggagctgggacgtcctgggcctaaggcctaattctgtcactcctaactgcatgagcttgggaagttacttctctaagcgtcagtgttcccatctgtaaatgggcataactgcagtcctgacttcatgagcttgttttgtgggttaagtgaattcatgcatgataattaggaactactaacgcaatcaccaaaattgctagaggattaaataattccacagataaaaactttttttttcctttttttttttttttttgagacatagaatgttgctctatcacccgggctggggtgcagttgcacatcttggctcactgcaaccttcgcctcccgagctcaagcgattcccctgtctcagcctcctgagtactgggattacaggctcacgccaccacaccgggctaatttttgtatttttagtagatatggggggtttcaccatattggccaggctggtctcgaactcctgacctcaggtgatccgctcgcctcgtcctcccaaagtgctgggattacagccgtgagccacggcgcccagccataaaaactttcgccataaaaactttcgttagccatagtctcaccataaacatgccacttacaaaaaaatatgcgcacaataaccacgctcaggatgcaaacaacatccattaatgaactttgtagttaataccaaaagttactcctcactttattctttatttacaaaagctttcatggttcttaaaagtgtttagtattcaccaattttactgttagcgtttctaatgaggattttctaaaactgaggcatggatttgaaaaagtgttctgatcaatcagtaacagatttggaatggaatctccagcccccagtctttgcgcccaccctctggcaatatgccgcctcacgtgagcatctttaagacggagttccctttttattccagataaaagaattaggagccttctggtagaaaagaaagcagatcttcaggatcaagtcgcagaggctggccaatcagcccagcttctcatttgaacttgacccagacagtaaaacaaactttaccataaggcgagactaacttttgttatgtcttttctattcatttcctatttctgaatcaaatctgaactactttgtggccaatatacgacaccagcttccgagtgtgggaatcacaggatttcaggattcagcggcttccggcaggatcccctaggttatgtttagcaatcttcagttgcctttcctttttttctttccttcctttcgttctttctttctttttctttttttttttttcccaaaggaaagaacaagggagcccaggcggaacggaagtgagtatcccgacacgcggatcttaaacagcccagaccaccaagcccgacaggccgggaaagctgagcgcgcgctgctggggggacgcacactttggaggctgtgtgggcgcgcgccggcaccccacaagttctcatccgtctgctccgccgattcagccagacaaagaccgcaagttccccggtccaccgctccagacaggcggggaccagtctccccgaattaggcccattccgggcccgggcgccctcactcgccgcggggaaaagtccccaggtgcccctccgtgatccaggtcctcccacaacgctcccgctcctgctggcgccccgcaccccgaggacggcggccggaccccggcccctccccggtcccgcggctgcaggcccacgcgccccacgcgccccgcgcgcccccgccccagctccgccgagggggcgctgctcgctgcgcggtggacccctcggaccccgcccccgcggccccgtccgggccccgatacccacccgggtcccgctgcgggggccggattcgcgccggctccgagagccgccaccgtcgcctccgccgctgccgccgccagtgaggcgcggcggggcggggacgcgcggggaggcccggcccccggcccgcccccgggcccgcccccggcccggcccctgcctgcccccgccggtctccccgcccaccttctggcccagccctgggcccaagcctctagttccctgctggccctccctcaggcctcgccgcgtcccggcctcggggactgtgccccgtcccgagcctggcgtccccaaaggaaaggcagggctcctcggacgctccgcgtgcgcgctggccctccgctgccgccctctgcagggagatttctcctatttcggactaggaagggaagatacgctccggaagaccccccgggcgtccatgcaaggagtctccgtaggacccctggagaagggcaccggagccccctagggcaggagatggaaaagcgctcgccatgcgcggggtccccggcccccggtgcccccagcccgcctgccattcccgggcgcttagcagtccggggtccccaggtgcccggcaggtcccttcgggacctcgagccgcccgctgggcacacgctgacgccgctgtcgctttacagaaattgagcgcagccgaggcgggacccgggcgcagagagcgataaaggaaaagcatggtcgtgctctaatcattacagtctaagggacgacacgtcgagacggcgcgcgcctctgcgtgcgtggagatggcacaaaggccgcgccgcccccggcggcccccgccctcgcagcgcgcgtggtcccggcccggccggatgttgacagcgtcgcctagcaacgggaaatggcggaaccgggcggcgcggcgggccggtaagccgggccgaggggcagcgggtcttggagtcgccaggccgcgctctccgttcaccgctccaggtggcccccgcgtcggctcctgcctcgccccttcgcctccactcccccttcctctcgcctgtgtcccttctctcgccattttgctggcctttcccgtccactgcgttcagcccctcacccccccgccaacccttctcacttctcccctcctgtccctttgtcctctctcggcctccctctttcccctactccaagcgcgcgactccctctaaaacccgggaccgctcactctgcagtcaccatggcaaccactctgcgtggcggtccctgcgcgcagtcctcctaagagtagagggctctgcagggcgcggggctgttggataccgcccctgaccttgctccggggccactcgctgtggccggagaccagcccggccccgcgcctccctcctgcaaggacagatcccctctcgcaggcttgggggtgacccgcgatgggaggggtccctgcggttaggcggcccgcgatagtccgcggtcaccgtcctggggcctgggtggaagcactgagcgcgcacagggagggcggctgagtgaagatccctgccaccgggcctctgctcgcttaggctctgtttaaaaggatagaaacgattggaaa

SEQ ID NO: 600 - DNA, 65013 bp, Homo sapiens
  source 1..65013: mol_type = genomic DNA
aataaaataaataaaataaaattccaccacagcctccttcacttctacttctctcacccgcttcaaagccaggcttcgtggctaagtcctccagcttcggtgcatccatttttccacccctgtcctcagccctctccaatctggcttctcttcctgccacgccactgaaggggctctaggtgttgtcagtaacagcctccatggtgctaaacccagtgggcatttttttcaggcctcatctaaccttacagcagctctcagaactctttgtgggccatacctatcatcttactgttaacgaaaagattgacatgcaggtcaaaggcacttatttgggaagcaaaaatggcagctggggtacaccggatcagggcagccctgaagagtgccctataaggcaggctgcaggagagaatttttaaaatagaggattgtcataaaaagttattttcggaagtagttcattggccaggcagaaatcctaaatcacaaagccgttgtgattggttagttaatgagagtactctcagctgaggtgttgaaggccagcagatgctgacttcagttgtttgaccgagtctattggaacatcccctgggtttgaccttcagcaggtgtgagtgcgatcctcttgcaaccttcgactccacttcagaaagccttagcattagttactatattttctttcccattacgttgcttccatgatatgacattttagtcctcatcctacctccaagaactcccctccccagaatccatggcagggtcatcctccttagtccatgcattaaatactggaattcggcaaagttccatcctaagccctcgcctcttcccattctctactctctccatactcatggcttcaaatattgtctatattgcagactagtctcagatttctatcactggcctagtcctctcctctccactgagctaaatgtatcctgctgcctacatgacagcttcattcatatgtctcaggagcattctgatgtaacagatccaaattcaaattcatggttttcttccactcttccttcacaaacacgctggttctcttgcagtgtgcctgcctcagtgaacagcattcccatccatctagttgcatgagttagaaaacctaaggagatatcctgtacacctgcttcttcctgtccattcacatatgctacctgacttcctaagagcttgcacatcactgccacagcctcgcccaagcctccaccatttcttaccaggtgtgccaagcctcccaaagcctctgctcgggtttcctcttgcctcccccaatcccttctccatataataaccagcatgatctctttccactgtaagtctgatcatttcattcactcctcccctctcacaccctaaaacttaaactcttcaacggcttcacattgctcctagaaaaagaagatctaagtcccggaagcatctgtattaggccattcccacactgctgtgaagaaatacctgagactgggtagtttataacgaaaagaggtttaattggctcacagttctgcaggctgcacaggaagcatgatgctggcatctgcctctggtgaggcctcaggaagcttccaatcatggtggaaaacagagggaaagcaaggagtctcacattggaggagcaggagcaagagggaagggtgctacacacttttaaacaaccagatctcgcgagaatgcactcaactcactagaacagcaccaagtggttggtactaaaccgttcatgaaaaactacccccatgatccaatcatgtcccaccaggctccacctccaacactggggactacaattcaacatgtgattggcagggacacagatccaaatcacacccacggcatctggcccctgccctccttcccaccaatcttctctccttactctctgcccagaaggagcatccttcttccatccctgagctctgggcacagtgtcacttcctcctggaagcctttcctgacctcctgatttggtcagatccagagatccctgcaccaagtgcctcaccatggaagcccttactccagctacattttgcactcatttctgtgactgtttgattaatggctacccccatcctcttccagtcttctctgttccagaagggcagggactggttttgctcatcactgtactctggtacctaatgtagaacctgacacagcactggcactaataagtaacttgctaaatgaatgaatgggtttacatttgaatgtaactgagtctgtggcacccatttctaaaacaggtcttgataggaatgagatagagcaagagtgataacataattctaggaactcgagaggggaggactccagggaatagagtcaatgcagaaccacagacactttatcttcttcacagttttgccttgtgcccagtgagccccacttccatgtggctgctgaatggtttttttctgactcacctcttgctggccaactgagatgctgcaagaatgtacagtgccttctacatgggcagtgaaagtctaagtcacgcccaacttgcttgttgttttgaggatattttattacatgccagtccttggaaactgttgatccagttttaccttgcacattgtaatcacagatgtgcacctctaggctgtgagccgcttaagaatgtgtctggcccttcatgtggcccgtggttcatgttgggtagattagcagatgaaagacttaggaaaacaaaaattggaattcttatcatttgatctcagccagcgtctcaaactcagaggccctcgggggtccaggaatgatctgaaaaaaaaaaaaaaaaaaaaaaaaaaaaaaaaaagcaggacagatgtgagcgtgctcacctgtattacataagtgaggcctggggagagggctaatttgatcacacactctgtctaaaggcattcaggctcaaaaaaagtataaccagctgggctcagtggctcacacctgtaatctcagcactctgggaggccgaggtgggtggatcacctgaggtcaggagtttgagactagcctggccaacgtggtgaaaccgcatgtctactaaaaatacaaaaattagctgggcgtggtggcacacacctgtaatcccagctactcgggaagctgaggcaggagaatcgcttgaacctgggaggtggaggttgcagtgagctgagattgtgccactgcactccagcgtgggtgacagggcaagactctgtctcaaaaaagagaaaaaagtgtaacctctgagcatgccaaagagaactgatagagtcaaatccagtgcaccaggcatcagtttgcaacctctgactagtaaagtatcatagttatggcagacaaaatattggccacccttccacaagatgtccacatcctcatccccagatctatgaatatgtaacgtcccagggcaaaggagactttgcaactggaattcagttaaaaatcttaagataaagattaaatgaactaacatatgtacagtgcttggaaccatacccttacattataggcattaaatcagccttagcttattaaactagtatttatgatttgcagagaaaagagcataggcctagcaggatctgataccttgtctgaggtaaataggttcagagcagagcctggactagaacccaaacctcctagctcctgagctacttagtgctttgtccttacaatgccaccatatcattttcctcccaaatctcattttcaaggtcaaaacaactaactatagcacaggcccttctggcgggctcagctgcatgttatagctatgattagtcttgatgttctcagtcgctttccagagaaatgaaacacaaacagaggaactcatttgaaattatgagtgtttgactataaagcagcctagttaataacagaattttctctgatcagagtctagtcactcagttttgccccctccaaatatgaccacccataaaaaaaaggggaggccaccacagagccagttgtcatgttcactaatgagatcaatgggatggcaccgtcaaagctgatgagggaacaatgtagtctgcagacacttcgcataagactccaaaacactggcctgatctccaaatgtaggcgccacccacatttacaaggctttctcaaaacattctgcccccaaaacttagcttgacttaaagcctgggtattaccaaaccattccataaaagtggctgcgcatctcttataaaagcagcaagtatttttagggaaaataaactggcaggtgagaaagagctgttaagatctttcaacgtggagttggtaagctgcattccagacctctgacaccggctcactcagttgcataatcatcgctttcctcctgcagcgtgagaatgctattttagaaagaattcaaagactactgcatccaaatttagaccccctaatattgtgaatttccaaatacacagctggcccttgtcaatggggatgaaaaatgtcttaatgggattgcaaagagaaaaaacaaactttgactgggagcagtggctcatgcctgtaatcccagcactttgggaggctgaagcaggtggatcacctaaggtcaggagttcaagaccagcctggccaacatggtgaaaccctgtctctactgaaaatacaaaaaactagcacggggcatggtggcacgcacctgtaatcccagctactcaggaggctgaggcaggagaatcgcttgaacccgagaggcagaggttgcagtgagctgagatcgcaccactgcactccagcctgggcaaaaaaagctaaactctgtctcaaaaaaagaaaaaaacaaactttttttcactctactctcacacttaacacacttctgtgaccccacacatttctgtgtgaggcagctccccacacaccaagcaattctccagcagacatgaactggacatcctgtaattcaatttgattctgaccctttctactgggacagtgtcagatcacacaggttaaggactcagtcccacagaactgcccccacttcagatgccaataccaagtcataggttgtcacctatattatgacccactagctgtaaactggggttctcacaactccctctttgtgttcaaataatttgctaagacagctcacagaactcagggaaacacttactttaccagtttcttacagaggttacagatgaacagccagatgaagagatggacagggcaaggtattgggggagagaggcagagcttctgtgcactctctgggtgccaccctcccaacagtgccccccagccccatggtcagcaacctggaagctcatctaatcttgtggtttaagagtttccatagaacttcacctccagccccccaccctcctgcttcccagctgaaagctccaggcctctaactatgtgttctttctggtggccagccccatcctaagtcacctaattagcacaaactctggtgtaatccaaagggactcattccaagtaacaaaatacactcctgacaccccagaaattccaggggttttaggtgctctgtgataggaactgggtcaaagataaatatgttttatattataccacagggatattttgaaaaggaataataaatatgaaaatgttcttatactcttaaaaacactttggaatgcaatttccaacagtttcagggtgctataggctttataagcaggtatatgaccaaaaatcctttctctgacattgtattaggccattcttgcattactataaaggaatacctgagactgtgtaatttataaataaaagaggtttaattggctcatggttctgcaggctatacaggcagcatggccctggcatttgcttgacttctagggaggcctcaggaaacttccaatcatggaggaaggtgaaggagaagaaggcacatcacatggcaaaagcaggagcaagagagagagagagagtgagcagggagttgccacatgctttttttttttctttttttttttttgagacagtctcactttgtcacccaggctggagtgcagtggcgcaatgtcggctcactgcaacctccacctcccaggttcaagcgattctcctgcctcagcctcccaagtagctaggattacaggcatgtgccaccatgcccggctaatttttgtatttttaatagagacggggtttcgccacaaagttttaaatgaccagatcttgcaagaactcactgtcaagaagctaggaccaagccatgagggctccccatccaagcaccttgcaccaggcctccccccgagcaatggggattaccattcaacatgagatttgggcagcgacaaatatccaaactatatgagacattgaagcccattccctatataggatgtgtggtggtgacacgggaatgtcacagaagcaattgattctggcccagcacaataaacaaaaacacaaatgacaacaagctttgaattaaaaatatagtcctttctgggagattgattccaggactcccttggataccaaaatccaaggaagctcaagtcccttgtataaaatggcgtagtatttgcaaaaaactatgtgtatcctcccatatcctttaaatcatctctaaattacttatatctaatacaagataaatgctatatcaataattttagactattgttttttgtttgtttttttttttaatattttccgtcagcagttggtagaaccgaagaatgtggaactcatggacacagaggaccaactgtagttaggtttggagacttcattgacttgatattttcactctaggatctctctttagatttcaagatgtgaacatcttgccgactatagacaccagtttctaatacccaaggagggactgcaacttcctcaactaggagagcatcatttctaccccttagatcccaatagaggagtctgagaagcctaaaatttcttctacaatgattcagtttctcacacacctcatcccaatgggtgaagtggaatgccggataattgcaggttgttaaataattaccaaaagcttcaaaggtacagatgtctctgttcctgctcaggctcctgagtccgtgtcagtcattcctgggacctaatgcaggcattctcccctcagatgccatgcccgttccctggctacttctgtcactacgtgccatccactgcctgtcccgcctccacccattgcgtcattgcaggctcatgccctggctatgatgtttcatgtacggtggctaaatttcacgcctggccacagaagtatcatttctgtgcctttgccactcatgtcttctaagcctccgaaataagaggagcaggaccagaagaagagcagccattgttctctgcagacagacacattctctcacatgtccccggggccacagacctctttatgttctaactgggtctgcacagaagaggcaggagacaggctttagcctcaagggagggagagagaggcaagaggccacagtccccaagttaggaggccacaaggaaagaaaaggacttctgtgaagaaaagagtcccgtctgagttgcagtccacttgcctggggccactggaggagatggggctggggaggggccgctgcagggaggagggcgggggtcagcggctgtgacatgacgcacgtgcctctcctgggcttgaaattgaggaactgaggaggcggtggtggcgagagtcagtctttcagagcacaggatggaacaagaactccagccactgactgtctcatgtatctgcaagggccgaggaaattaatgacccaaggaggctatgatatggtccaaaaacttttcctggattttttccgtaggcggctgagccagaggccaactgcagaggaactggaacagaggaacattttgaaacgtaagtgactaagcccatggcaatccctgatgttttgtggcggcttttgttattatttaatggtaggccacaaggtttctaccttgcgcctctgcggaaagcattgaaaacctttctaacggttgaagcttcatgtgtgcatgttagaacaccaaagacgacctccccaaagagaaggcaaattttattccactttattctttagaagctcacgggcggcaggcagaaccttccttttagtgagttgtaaagtcagagagaagctgaaaaattagagtgagaccacttattatttaatgatttttaagagcagggtcacctttaaaccagaattggcttgaaaatggagactgtgatatgcacggctaaaataagggaaatgtccatttgaactgagactagaaagcatgactttgcattgcagctggctgctgttgataaaaatccctcatccctttgaatgttaaattgaaagactaagaaagcatttccaagtgaagtgcttcatgtctgtctctcaggattcccacagctggtcccgggcatgcctgtctgatgctctcattcgaggaaaactgcctttcaccattgctgcagacagaaaaaaataaatgagccccttgtttggtttaggacacagagacatttgaatatgtacagaggatccacttggtgctttaaaaaaaaaaagagaaaacaggatacaaaatactaaaagagatcaagcatttgatggacagcagtatgcgtcagtttagtggtagatattaaataacttaaatatcaaaccattctattcattcattgctaccattctcgccaacactggcctcaagatagtgaacaaatatttctggcttaattcatgaccctgttccccctaccccacaacacacttctaatttctctccagaagagaaagatatatactatgcagagttttctagaaatgctatgttgtacagactgactccttgcctcccccggcccccccgccccgccccgccccgtgcccagtaaatcacatgcaaccgcagtgtgagtttgccgggaatttccactgaaaccacactaagatattcttgactttacctttctaccgtgctcactgtggccttgtgacttggtcggcatttcgtagtctgctgaaggtgggtgctgggttccgctttggtggggagacctgttgcctacagcacccacccccgcccgacgcccccgcatgtccgtttatgtcaactctgcctttatcaatgtcttgcctcccgtccccacgccagccgccacttcctcaactctcagtagaagttattttcaggattagccttcctcagtcgtgggggaaccctacgctttgcctaggtctctaggaatgtgtgtttacttttttctgcccaaggggtaccctttaaagtttccaagcttaatattctatataatgaattcagagctttttcaaagcatttccaaggtcagggaagcatttggcttgtaggatgtcttcctttcggccccaatctggtacctgagccattataaacttcccattgttggagagaaagataaacagccaggtgaacctgtacaacttactcacagcccgctgctgtacttgtggcctctgacctgagacctaaactcaaagaagctaaaagcctccgggggattatttaggtttcagaaaatagtgcttatcacaccaggagtacggtttctggagagatctaaaatcccctagctcagctctgggctctctcaaagatatcagatccccgctgtggcttgtccagatccctgggagactacaggtcctttgagcttgggtttttaccgccatcaaccagggaacttagattcaggggaccaaaaaggagttgtgaaagattgttcccatggttctcttttattctcttccctaatccctcttgtcctggccacatagttgcaaattaaagaactacttgaccaattctaacaggttggtcatttcatagttttgaaacttttcagaaatcaacttgttttcccataggttcttatttttccctgtattctggaactatgttctcctaaatatttttttaaatttaatctattgcgattgttaaacaaaaaaaatgtctagtggtataagaaaacatcctccaatagtttgttttaaaactgattttctgagctttcagccatttgaggaactgctcggtgttgggtggtggggaacagggcacagagatgccatggctcagccctggagctttgagagccttgggttggtttccagccccaccctgcctggtcctgggagcagcccctgttctgtccagcagccagtgaggccctgtgcacctctgagcacataatgaaccctctgacggtggcagctgtaatgacgacatcgtaggcctttcctggcctgtcttcctagttgcctaatggggttgtcttggtaccttctgcctgaaaattcatgaacctgggttggtcaatggctttgaactaaaggtatcaattctgtaggtggtagcttgtggccccacccctcagagtgacctaagaaacgcacataggagatgaaggctccatgctgtgtcagctgtgtcacaggatgcccgccttcacggctctgaagggacctgtaggatcagaagtctgaggctagtaatgaggaggagagccggccccacacaaaacatgaccacaggaaaaaacctatctgtgtaaccactgagccaggtagggtgtgactggccacttaacacccctgaggcttcagatcctcagttataaaccaggagtggtagacgaggtggtcactaggtcccctcatggccctagtattctgtgcttctgtaaattttcaccgtgtgccctctagctgtccctggtgacccaacatccagaccaccttttcttccatccgttttcccacctgagacatcgcaaaatgggagttccctccttctggttcttgctgtctgcctccccatttaactctgctagattaattcatactaagatattaatggctgactagtttaataggttttatcccactgaaatttgcatttgtacaaatgtcactgtctgggggctccctacttccgggtgttgctgtctgccccccagtttatctctactagattaattcatactgagctattaatggctgactagtttaatgggcttttattcaagagaaatttgcattaaaaaaaaaaaaaacctctccgggagggagataggatctctaaatccaaaggaaagcacactcatggtgacggtttcaggcactgtagggtaggctggagcagggacctctggtgacctcagcccacagcaagatgtggctgtttcttgtgctgcctttctacaaagccttatgcccacaggcggttggggggccaaatcaggcccgtgggggtggccctcaagggcctgatttctgctctgaccttacaccacttgtgctagtgggaggtatagtcaccttgagtgtaaaggtgacacagttatcagatggtccccacccctttctaggcacagggggtttccttcctttaaagacctgtcccaaggccgggcgcggtggctcacgcctataatcccagcactctgggaggctgaggcgggtggatcacctgaggtcaggagttcgagaccagtctggccaatatggtgaaaccccatctctactaaaaatacaaaaattagctgggtgtggtggtgggcacctgtaatcccagctactcgggaggctgaggcaggagaatcgcttgaacttgggaggtggagtttgcagtgagccgagatcatgccactgcactccagcctgggcaacagagcaagactccatctcaaaaaaataaaaaattaaaaaaatttaaaaaataaaataaagacctgtcccatactgagacaatcagcaaccatacctgaattgcatgtgtgcaccaatacaacaaactaatgaagttaccaaaatataattcaacaactgtgattttcaaaatgagccaactagtgtcccaggcagtcgtgatgcaccctatgccaaaatcaacgtgtttccttttactaacgccatttgaaatttaacggctgagaatcacaggccttctttgatacaagctgacttccatagtttttccaagtccaacaatgctacgctgatatctgtgcttccacagatatcaaggaattcttccaaggttcagaagggaaatggtctaccccaggtcatccagttagcttaaaaggagaaataagcccagattctctgcccttcaagtatctgccccctaccccagactctcccatgtacagctatttaaaaatctgatgagtaaatcacccatatattaaggcaagagctttcaggctctgcagtctactcttctgagccactcctaaagagtctacatgcaggcaattgtatcccacactctggcctcacccatgctctgtggacttcatggaagattcaaacaatcgatggaatcagggcttgtgaaaggtgagcgttttgaaattcctcctgccttgtcttgttcctgcagcaggttgagggcagtcttctgctctctctacacccacagggcaccagacacaaggactataccacaatgagcctccttcagtgtctgggaggctcaacaaagaatgagtgagccccagtcttatccaaagaaaggagcctcacatctccccaaatgcctgtgtgtccccgtgtcaacattcccacccacctccttgggctgtgcggtggcttgcacctgtaatcccagcactttgagaggccaaggcaggaggattgcttgatgccaggagttcaagaccggcctgaacaacatcatgagacccccatctcaacaaaacatttttaaaattagtcaggtgtggtggcgtgcatgtgtagtcctagctacttgggaggccgaagtaggagaatcacttgagcccaggagttccaggctacagtaagctatgattgtgccactgcactttagcctgggagacagaacgagaccgtgtcaaaaaaaaaaaaaaaacctaccttcctgccttgtagccacatttctcaacccagcatctctgcctggagacctgaaaccccatgtgatgtaaagaaggcaaaatgacaaggtcagcctgctcagtagcaatttgaaacaacgcaggtagtttggaaagcaatccccataaggagaagggcagctgggggaggggacaggagtactctcttccctttattaaaatgagatgcttggcctagagcctgccaaggtccaaaggatgcacctgtacacaacactgtttactgaaataaaaaaacatcttaaatattttttttagctcggaatgaacaagaggaacaggaggagaagagagagatcaagaggaggctaacccgaaaggtaggtggttctccatgccaagagctgggacaggagagggtgggctgcctgccacacctctgccctctgctggcctcagtggcctcaccgctgcctggttcctctcctcctgtgtcagagagtgccactctcttactctataagacctctccactcagcttcatgaccctcagtcctttcagctggtgacactcaatgttgtttgattttgtgacacccacctacttcctaacaactcgatggctattgcgttgtatttttgattatactaaatgttttgttttacaaaattcactataatcccattaagcaatgggaaattcataatcaaaatcagtagttcaaaggccaggttcagtggttcatgcctataaacccagcactttgggaggccaaggtgagtggatagcttgaagccaggagttcgagaccagcctgggcaacatggtaaaatgctgtctttgtcaaagtaaatatacaaaaactagctgtgcatggtgatgtgcacctgtagtcccagatacatgggagtctgaggttggagaattgcttgagcccaggaggcagaggttgcagtgagccgagatcgcgccactgcactccagcctgggcaacagagcaagactctgtctcaaaaaaaaaaaaaaattactagttcgaatattacacaattatttgctatgaccctgggaaagtatagactttttttttttttttgctccccctgacactattctttccctaggaattaagaactatgcaactttattaggctaaattacgaaagtactgacaaatttaaagcagatgtttgagaagcacatagcttaaagtcataaaactggaattttaatatagtcttaaccccaaaaatagatggtttggcaatgcactgtagcctcgcatgcatctcattccacatgagtgtcctctttaataataaacgcattgttaaggctattcttggatgatgctgaaaagtttaattaattgatgacatgcaagatacaatactcccttctgtctgacgaagtcaaagtgtttttaatcagcctcctacagtgaccatcttgagagaaagatactctcatatcttagctacagttaagaggcccattaatattaattttaaaaaggtttattagtggatttttctctccagaaatatcacacaaaggaagaaattcagagatcctgaaatatcataccaattattaaggtgatggtttgtatttctccacactttccctgcgagcatcccaaatacctggtgacaagccaaatgccaacccaattagcaagagctggacaaacaagtgcctgaatggccagacgactggctggggtcaccctggtggagactagagcaagagctaagtgacttcaccagccagtcgctgtcccacccgtcaaggttggaccctttacatccttaagcccacccactctttggatgcagggtgcagtttttcctgagcttgagtagtgagaagagcaggagagatgcattagctttttctcatcgtgtccttgaaatgactggggctcgaaaaagacactgtgataaactttcatttctgatacagaaaggtctagacacttagaaaaaaaaaaagttgtttaaatcagattttcatcaaatttttcagaattggttgctggatccccaaaattcacccagttttaaggttgcttgctaaaagacggtcacagagaaatacttagacatttatttaattcctatctcttaacaaagttgatatgattttgcggagaacttgactaactgcatgatttggtaatgagcgagtaaagagtcttcctttccacacccatctccctagggtaggtgacactagggatggggaccccaaatagttcataggttttgcgggtctccacaatcaaataattgcctctctgttcctgctcacctctcctttcttctcccagggaaatggccttggaattttagcatttgccctcccctgggactggctgggggggttagaaataaggagcttgagaggggataactgcttctaagagagagactggagaacagaggggcaacttccatatctgcttttgcgggcagagatgtggcgccttccggcaggtagggaacctacatcatcacttcctggccctgtgaaggttcttctcctcttgagcatttatcacactgagaccagatgccagtgatgggggctgctttacagtgatctgccttcagcccaataacttcttcaataaaattctatttaactgtaatgcactagtaagaaaaataaaaaataaagcgtagtaactgaggctgatagcaacagaccagtcattttctctgaccaaactgagactaatataaaaattacatgctttgtctttttaaaaaagacatgcctgcggccaggcgcagtggctcacgcctgtaatcccagcactttgggaggccgaggcgggcctgactttggctgcaaagattatttttgcagcattcaaggaaggacttcaggttccagatgccccgaaggctacagccagcaccaggccaaaggtgcgtcttctgagcctttcgtggtcagggacatgagcccatgcacacagaggagcgtcctggtggccgtttgttagtgctggggtccgtgcaccaactgtgactctgagaggcagcagccagctgcatcctcgctcattccctctgagcacttgtgctctatgctgtcttgatttggaaagacggtgtccaaggccccgcgatgttcaggcataagaaacagcccctgacctgcagcatttatgcttagtcttcggttcactccagactctgccatagataggacattagtaaaatccaggtcagtttccaggaagagaaatttgaaagtcagggcttaacaacttttctcacatcatgggtgcactcagaaaataaccctttgggccgggctcggtggctcatatctgtaatcccagcactttgggaggctgagaacggcggatcatttgagatcaggagttcgagagcagtctgggcaatatggcgaaaccctatctctattaaaaatacaaaaattagccggacaaggtggcgcatacctgtaatcccagctactcgggaggctgaggcaggagagttacttgcacccaagaggcggaggttgcagtgagccgagatcattgcaccattgaactccagcctgggcaacagagtgagactccgtctaaaaaaagaaaaatgaagaaaagaaaataacactttgtctggccccttgaggtaaacccagcaagtcctgaggaacacagacaggattctgagtaggagtctgtttatctggagtaaatatggcaaatgttgcatgtctttatgtattttaattatagcacaaaatctccctgcactcacattgtggagaacatgttttggagtcaggatgactgctgtttttgtttacggtgaccacagccataacagcctgggaagcctgtgggttcccgcgacaggcccacactggtgccagaatgttgtcgtgcctaagaaagccaagggaggcctacatgcagtctaggcaggggggccggcaccagaggcggctgagcccctgatccccagagcttcctgcctttggctgagagggagctgtaggcctgccttggccctgtccggggtgtgccaccactctatttgatacctgccagccatcctctaattgtgctctgccagcgtgggagcaagttggaacattctcgcactagccacgggtgtctggaagctgcctgttgcagagtcgaaactgccagggtggtttggactccattgtgtttgttttacgggcctgagttgcaagattctatgagatagtgtcttctagtaatagaattacacagagtctagggctcaaagggaaaactgcttttaaatagcattgattgaacatcatttgacagcatcttaaagagagcaactgtgttgctccaggagaaataaacctggtgacaggaagagataatagaaatgtcagccttatgttgctaaagtagaggaagggtcttcatggctaatatcgggagatggcaaaatacatacgaatcttccttttacttgcttcatccctcattcctgcagtccttcatcatgcaccatccaaagggctggtcctgagtctcccttggcataaatgtggcctttttctgtacttactcaactccgcatttgttgactgaccttccccttgaacttcttgcagagggccgtcagcaatgtttgggctgacctcttcagccagcagattcccatccctgcataccccagagtttgcataccatttgcacatacgcttttttgcatctaaaacccacacaaaatgcactgcaaaacccccttgcagaaagcactcgatgtgacacagatgtggattcacaaatccaaaataagacagaatcattgtagaatgtccctgtcacctggtgggagtaggacagataagaagaaatccacaacaggcgcccacagccaaacagaaagacaagcttctagtaatgactgggactcagcaatgttatgaagatagagactgtttactatcgatttgtataggtgtaaaaacagtactgtgaatatgctttgaagtcctaatctttatatattctatactgaaatatacacagataaaatgatatgatgcctgtgatttgtttcaaagcaatctacatgtggatgtagtcaagagttgattattgttgaagctggtgataatacaccaaattcattacattagtctccttccttgttttgaaaatttacataataaaagattttttttaagtttaaaaaaaaaaagagcttggcctagagggtatgtaagggataacaaagctctctcttaggacctagaaacgtcccactcccaagagtcaggagacttgggtccccccaccctggccctccccctgcccctgcccctcactcactatgcgatgcatccatcgcctcactgaaccttattttccacacctgcaagttcacagacaggaccaagtgccatggtcaacccttctggctgactgggtccatctctctccctccctgcagctcagtcaaaggcccacggtggaagagcttcgggaaagaaagatcctcatccgcttcagtgactacgtggaggtggctgacgctcaggactatgaccgcagggcagataagccgtggacccgcctcaccgctgcagacaaagtaagcagaggggagtgctggagagtgggaggcaggaccgtctgctgggtctcgctgggctcaccgctggggagcgtgtagggagacctgcagccaggcctcagccgcagtccccataatggagtgttgagaccccaacacctttccccaggggccacagataatctgcggaaaggctgctgaatcggagaaaacacaaggcacataatactgtgcccattttacaggaggaggagcagcagcctgggaggctgtgcccagagaaagagaatagcactggataggtgtagacaggtgaaggcaagaggctccaggctcatcacagcccttccgtataggggatggtgctgccggcatccaacgagggattcaccaaaccaaaagagaagacaaagtagacgcataaccccaggagggaaatagggcataaatcaaagagacgtcgcaaaacatatctcactgcactagcccctcgccgatttagaaaacaaaaagaataatctgaggttcagtttgttttttaggaaaagcagtgatgccaatgagaaatcattttctctgtccaccagacaaggtatcagaatgaacctctgtttggtaatcctctctgattctagtctggtcaccatgaggagctggagggttaagggcctttttaaaaatgtagtctgtgcgccaggcacagtggctcacgcctgtaatcccagcactttgggaggccgaggcgggtagatcacttgaggtcaggagttcaagaccagcctgaccaacatgatgaaaccccatctctactaaaaatacaaaattagccgggcgtgatggcacacacctgtaatcccagctgctcgggaggctgaggcaggagaattgcttgaacccaggaggtggaggttgcagtgatccaaggtcacaccattgaattccagcgtggatgacaacagtgaaactccatctcaaaaaaaaaaaaaaaaaaaaaaaaaaatatatatatatatatatatatatatagatacacgtatatatatatatatatactggaataatgattctgcccaatgtgtaggtaacgatagaaactatggagtgtgtcaggggccttctgctcaacagtcctgccttcactgtccgtttcagggacccagggttttcttatatgatacagcaggaagtcatttatggcccaggctggctacattatcaccaaccctggatccaggaggtgcaggaaacatgtatgcaggcacattgctgcacttggctgggacggaagcagcaagaggcagatagacttccagagacgacctcgcctgtggcgggtcaacccacagacaccatgtgtggaagactgtgccctcctctgtaaacacagcattcacatcttctctgcaagggaatttgtgggagcaacccaggaactggcattgccatgcccctgacagacaaacccagctccccaggagtgtgtcatctaaatacgaagaggaaggggctttcactcttgtcctctcctgtccacactctctctgcggtatgcttgcaaggataaggatattagcaagtgtgcaagaaaaccacagacatctctacttgcaccctcatagagttctgagtagctcttaggccgaaaacatatccagtttctcaatggctgttggggacagaagacaggaagcatggggtgacccctgcccccacccccaaagctgctacccaggcacttaaacctaagccagccttcttttcctggggagggccattctgatcctacaggaagacttttctctcctcaaactcctggggccttgatattcccatcaaagcaagtatcggccatagacagagctatgcaagaaggcacacgtttgcaatttccacccttgaggaaggagtgaggttgtctctggccccagctgccttctttaccagcccctcctcctcccctgctctctcatggcctctctttgctgtctgattccaggccctgtgtcttcagtggcagtattataaggatggggtgattcgggatcatctcagaacatgtgaggttattcaaaatgtatctcacatggtgaaatacatcactgaagagtcagggaagttgtaaaagagcaaaaacaaactgttggtagggagctggccatcacctgtccccctaatttggttggagaatttgatccacgccttctggaagtctccacctcgaggcatcactgtgcctgtgctgagctttgtttatttatggaagatgagaggttgacattgaatgtgttcttgggcccccaggagtgtggggtaggtgtacaccaccactgatgcctcaatgccacagctctatgaaaagaggaagaaaaacacactttgggcaatagcctgtcatcatttgcaacttagatttagggaaggaggggaatctttgttttaaaggacatctcaggtgatttttcttcctcccaatgaaagaatccatcttaaacttgtttgtctttgttgaagaagaaaaatatgttgttaggaatgaactgaaaggggagtttttttctgtctctctcccattgcacattgatgggcttctgttgattccaggctgccatccgaaaggagctcaatgaattcaaaagcactgagatggaagttcatgaattgagtagacacttaacaaggttagtattaagggttttttttttcctttttttccctcaagttgcaatatttatctccaaataaagctctcccacttgtgggacatgagtgggttggagggtgccatgagagggaagatagtaggaaggcaggcatgcggttccactttaggttactgaaacgaggaagtggaacacagatggcccgggctaaaaccaactttctgcaaagtctgagtttcactcatttaaactaaaggtctgataagcaccagactaccaacgaccccaaggtgggtttttgtgaaaacttaggtcaaggagaaaagattgttgccaatttgcaaccagtcagcagaggccaaacctgaacaaaataccacatccacacgggacttccaaagtggaccacttctgttattccctgacattctccctgacagtccagcatcatgatgatatttgggaaaaccgaggcatggagtgattaagaggattatataaggttgcattgctagttagcaacagagccattgatttaattctgactttcttttggggggaacatttagagaaataggatatagcaagtatttagtctagagactcagagacacagattgggttctgcaccttgctgctggatccaggctgatggcaggaggtggaggccaccagggctgccccagatgaaactttcaaagccaggtgtgtgttcagtggtactcctgtggggatgacggtgggaagctcgcacctccctctcacggtcaagaacctccctgaagatgggagattggactgttgaatcctgcacctttggcagccccttggtcttgatgtaattgtttgtttccttaggtttcaccgaccttaacagtcgaattcctcttgagtgctatgctgtcttcaaaacataaatttataagaaccataagtgctggtatttattcacttccccattacgatgtaaatcttctgaactgccttttttttaaaaagaagaaaaatcaaggaaacacaatcaggattttatgtgtgaaaacgcaaaagtgatggctcggcggtccgagctgctggtcccacttctgacaccaaaatgcatcccaacccccggcagtgccaagggcaccagcagggccctgactgaagactgtctggcaggtggaacggtccttgtcctctccagccaggcccagcaggcactaccttcatgaagtctccagcaaacctcttcctcacaagtgtctgtcatctgagtccaaagaaagctgaaggggtgggtttgttttgggggtactgtgcaaagctaatgatctggttggacttctacacttggccaaatgtactggctccagacatgacatttggtttgggggccctttgaagttgatgccaagaaggagtgaacacttctcagttgcccctggcttttccctcctttcagccaccacccacacaatgaacaaaagggaagggcccatttctgggggagtctggctgcctcttggctacgaaggctggcactgagcacccatcctgctccctctgcctgagctgagctgcctttcaggaagctctggtttagaaggggaaagatgtcatatgctcagttcaaataatcaacccaactgtgtccagagtgtccagtgtcatgagtgacccacgcacacacacagccattgctaaggtactcctgtgctgtttataagtctgagtgggaggaccctattgaatcctgtggggtcagaaactgcttggctgacatttattttctctgtgcgccttgaagctgattatatggcttgggagttcttagcttctgtgtataggaccagtgcatgcaggccagaaaccactcctgtaggactggctttccagccactgagggacttggaaccactccatggccttctcttttttttttttttttttttttttttttttttttttgcactgaagagtttctgtgaaggagccccagagttgggcatgtgccagaatcaggccaacaccagccacacctgtccacagtgccccttcctgctccagttgatccagagagctcctccctctaccctcatgatgccagggagcgtgactgtgggtgtgtctctgactgggacacccaggatagggtgtgcgatgaggccaggaccctcctaaaccctaacagcatcctaacgaggcccattgcagctttcgatttccttcataacagagctcgcaggccctcagttgcagagctctctcaccttctggagtgactccatcgttactccagtctttctaggtggtggaactctccaccacacatgccatttagaaagacgccagcttggcctttccaaaaagttaaccagtcgtctccccaccacaaaccctgtgggagcaggttactcttaggatgcacacccgtcaacgaggccattgcatttttttgcaggcatgaacggctcccatctaggcactaacccaggagccaaacaactgctggggagagttcagggcagctctttgggcggtgcctccagctgcagctttgccttgccacctggagccagcacgcctctgcccgacccaaggaggatgccatcactagatcctattttttttttttttttttaactcttgaatctgaatagttcctgccgtggggagaggtattgttcagggaaaatgtgatcgggattttagtgtggctgtaaacacagtcttcccgaaaggcttactgacgtttgaatgtgcaaatggtatgacgaaagatgtagggctctttcgttgaacttctctacggcgggcgggcggacacgtgttccaggtggacttgcctgccggccaggctttgagtctgaacttcctctaactgcagctgggctcctggcacacgcggtgccctggcatgatggtcctccctggccaggagcgagtcctaaggaaattcattccattgaccggactcctcccatgataggcccatggcttctctgctggccttagttcttggcccttcagattccctggggatataaggcccaagcggatctccctgcagccagccagcagacagcccagggtttccgcccaaagtgccctcatgttgcagtccactttgtgcatggaagatattgaacacaatttccactgctcttcctgcagggcctcctttccagcagtcacttgctcagactgaggggtgcacctcccctgccattgacaggtcctgcgccttcaggatgggctatttcaagcccgttttaagtggctcttacacaggctcagcaacctctgtggcctgcaggatgggccttctgctgtctctttcctttcttaaaaccttaaggtctttctagagacctattcaattttctttttttttttttttcactacaatgtcatgacaactgcagcaatttgtgttactttccaagatgacaatttgacattaattaagggaaaaaataaaaaggtgagctagatgacttaaaatgcatctcttttttgaaaaagctgtagctggcaagtcaaagtttattttatgtgtgtaaattcccagttgagcatttttttcatttggattagcgtgagaggaaaaatgtgaaatgtctcaaatcaaatgcttccttctaaagattagacattgcccaaccctgcccccgcccccaatcaatcagtgacagaagagaccgccatcagccaactagctttttttaaatggctgatatattcatctctaaaggccctcaaagcactgtaaaacttttaaaactttagcctttatgtcagattagagaaaccaaacaatgtgacggtacatgtgatgaaaagctctgggtttatttttctcccgcttatgaacatgtatttttatttgccgaatgaaaatcgtggtgtgttgctttgatgaatggaatttcaggctctccctgtgcacagccggtgggcaaaggtcaccttaaatgactttttctccctatctgtctgttaatccccagaccggttgcattttccagttgcttcctgggtgtctgtacatagtttgtctttgtataggagtgagtgtggtgaccgtcaatcccctaatctcccaggttctaatttaacagatgatggctgtatgaggaaaacgatgtaaatagagaatacaaattaaactggatctctgtggcctaggttttgtacatacagaaactgcatggtatttaaattattgtttgtctctgatgatgtatgcagtttctttaaaaacaaaccaaaaaaaagtaaaaaaaaaaaaaaaaaaattcttgactcttgtgtgttttgttatcaaccagcagcagaaaccaccaaaaatgctttgactgggaaagggaggttgcaggaatgggagaggtcagctcatctgcaaaatacatagtgagagtgagtggacatacgggacaaccgcatgtctcctctggtattattgggggaaggaagtattgtagcacatacattaactttctagaagacttttgtgtactaggatttttttcctcaacttttttttttttttgagactgagtcttgctccgtcgccaggctggagtgcagtggcgcaatcctggctcactgcaacctccgcctcctgggttcaagagattctcctgcctcagcctcccaagtagctggtattacaggcacgcgccaccatgcctggctaatttttgtatttttagtagagatggggtttcaccatgtttgtcaggatggtcttggtcttgacctcattatccgcccacctcagcctcccaaagtgctgggatcacaggcgtgagccactgcgtccggccttcctcaacatttttataagaatatctaaaatgtcaactgtccttttaacgatctgggaaggctggagatcttggctcactgcaacctccgcctccctggttcaagtgattctactgcctcagcctcccgggtagctgtgactagaggtgtgcaccaccacacctggctattttttttttttttttttttgcattttatttttagtagaaacagggtttcaccatgttggccaggctggtctcaaactcctggcctcaggcgatccaccctcctcggcctcccaaaatgctgagattacaggtgtgagccaccgtgcctggcctctatctccgttcttgagaagcctgagtatttgatgtataaagcaaagaactgcattgcataaccttctggttactacttgtctttgaaggctttcagcggaagcagaggggctgcattttaggtgggggacgttgctgggtagcatatccttcgtccagcagcgtagaaaggctgttctggtaaagggcaacctcgtgccgtgctgctcaaaccaccttgcctaggaatcacctgggggtctcgttaacatgcaagtactgagccagcaggtctgaacagggcctgggagtctgcatttctaataagctctcagggcctgctgatgctgctggtccaggaatcccacttctgagtctcaaaggctgggagaagaatccccaaagggagccacctctcctttgcctgagatctctgagtgcccccatgtactgctcatatctttgctgggaagcagcagtgaagccctcctggatgttcaggtcctgcagtatttgcatcagagtatctgtgcccagagctctcacctgtgcagccagggggcccctggagcagcagtggctatgacagaaggggcaagtactttacaaaaaggttttcatatttcaaaaatccatcagtttctctttctttctgtccttgcagagctttttttttttttttttgagacacagtcttgctctgtctcctaggctggagtgccgtggaatgatctcagctcactgcaacctctgcctcctgggttcaagcgattctcctgcctcagcctcttgagcagctgagattacaggtgcccaccaccacgcctggctaacttttgtattttagtagagagagggtttcaccatgttggtcaggcaggtcttgaactcctgacctcgtgatctgcccgcctcggtctcccaatgtgctaggattacaggcgtgagccactgcgcccggccgctctctgacttttgataaattaatctgagaacttgattgcaagttttagggcagtgaaaggacaagaaagaaacagctttgataaaactcctagcagactgcctggcaagagggaaggaaactggccataatcctgctacggagggagccctttcccaaggaaacaaaggttgtggctacacattctctctctgcaggaaggggcagcctggtgtgtctatcgcatctgtttatctgggcctcaatttcctcatatggaaaacagagacagtgaattagatgttcctaatattctttggagcatcaacttgtccatgatttgggaatactggcatttttaaaacattcaacttagttattaagaaagagttaactttaaagcaagtccggctgaggcctgtctctaacagtttagattcctctccttcaggtcaccacaaatctgccatctgtccctgcagtccctccctgccatgcactgccctcctggagagctgggtggccctgggacctaccctcccaagtgccttcatggggcctcatcccgaagccgccatcaatcaggttatctgacatccttctgcctctccctgcccttgggcaaaacaccctggagtgctcttgggtcttgatgggtgatgtctacgacacaatgctttgtcccctacagcatcgcaggtttgagggtgctctgcggatgtagctacttaacctgttaagccaaaggacacgtttgacttgtttgactcggcaaacgctccctggctcactctccacaggtcctaagtgatctcctccacgggtgtggcttcagatgactccctgtctatggctgtagctcagatctgtcccaagcccctggcccaggttttctaaaaagcagcagggtatcgtagagtgtcctgcaacttggatggagctagaggccattattctaagtgaagcaacacaggagtggaaaaccaagtatcgtatgttctcactcataagtgggagctaagctatgaggacacaaaggcctaaaaatgagataatggactttggggactcagaagggggagggtgggaggagggtaggaatgaaaaattacacattaggtacaatgtacactactcaggtgatgggagcactaacatctcagaataaactactatatattttatccatgtaacaaaaagtcacttgtgaggccggacacagtggctcacacctgtaatcccaacactttgggaggccgaggcaggtggctcacctgaggtcaggagttcgagaccagcttcgccaacatggtgaaaccccatctctactaaaaatagaaaaaattagctgtgtgtggtggtgggtgcctgtaatcccagctacttgggaggctgaggcaggagaatcacttgaacccgggagggagaggttacagtgagctgagatcgtgccactgcactccagcctgggcaacaagagcaaaactctgtctccaaaaaataataaaaagccacttgtaccccaaaagctattgaaacataaataaataataaaataaaatacagatatactaatttttgaaaaaggttctcccacctggatgacggcagccatgatctttctgcctgtggcctcagcatccagtcctgccatgagagtcatgtctcccaactcagatgggctcaccccaccctccctcttggtacctgcctccactgtcttacccatcaagccccactctgcagtgtggcatccgtagtgacagtgtggcccttgctcacttccgccagcctcacctcctgtcccctgctacatcactctgctcaggcttcccaagcagacccttctggtgcgtgtgacctgggagtcctgtgagggatgctattgatgtggccatgttgtggtgaccacctcagggacaatcagggtttaacaagggccctcgggcactgagcaactaagctttcctgaaaggagtccaagagaggtctcatgtaggcaaccttggaactcaatgagaagcatacaaagaaaaaaaaagtatgaacaaatagctgtctcttctgacacctggcaggtggcggccctgatttctaactctggctacctggtcacttgatccctaccaacagcaccactaacagctcccacacagtaaacacttaccgtaccccaggcactctgttaggccatcttcatgcaccattttctttaacccttacgacaccttggtcaccgatgaggaaactcaggtccccaaacaacaacgtgggcaaagtcacacagatggtaagtggcggaggggcttccaaacccaggtctgcctgactctaaggcaatgcccttaacctccctgctacgctgacgtgtcgtggctttccctctaccttcttgagttcacacttcctcagcatccatccagttatcccatttgcctgtcttgagtgattacatagttttctgacactgaggatcacagacggaaagatcatggactgcctccaagccccggcttccagctcctccctctcacctctcatgcacaactttgtctgtgattaagctgagtctcccgcttctccactccgtggggacctcccacaagcatttgacagtcagccaacatttatgccttcctgcaagggaagcagaagtcacgaatgaggcacttgtacagtgtgggtcctacctagagctgttgcaaaggcaggaagagaagggcatgctacctaatgagagagaagaacaccagacacttcatcgtgtgtgagcgtccagtcccttacctagaggctattttctgggggggaaaagggttctgctcctaatcaaataatgctctccacatttcataatagggagccatgatcatccactatttccatgggcaacactgcagaggaaggcaaagggctctcattaattaaactaatgaattcatctgcaggagacaggaagagtaaaccacggaaacagaattgactaattcttcttccgttaagatgcatctaccctgagccagaattccagaactggttcccctcctcatccatgatgaagacgctgcggctcatgtggtcacaaaggcttggtgtttcctatgtggagataccattgctgttctacctttaatcaacaaaacaaaacaaaacaaaaacgagaaagagaaatggtagagggagggaggaaaatgctgtctgttccttaatcaccaatcaccaacctggagtggtcactgacaccttgtccagtgtggcaggggggtccctggggtccatggtcctggggtccattcagagcccccacccagaagaggacaagccagtcttcagctacacaggtaaaaaaacacttcacacatggattgaacttcttatctcagacagtcctgaccagggacggcatcagagtaaaggctttggtctcacgcagcaaccctgtggccagtccccgcagtgtggcaggcctgccactgtgcgaccgaggccgtcatgcatgaagcacatctggggctttatggctcaacacctgagcctcctggaaggccttggccgcctcactgaagccccagcgtaccggctctgcaaggccctggggttaaaatagcaaaaatgccatctggcaagaggctggctttgttcagactgtgtgctgcgttgtcgctggggtggtggggacattttccaagccaccattagaatatgagctgtcacctgggcgagccccactcccccatgcccccagcccgctcgtcagcatccacgcaatcatggcaggagcccctgtggcagctgagccaccttgggttttcctcaattccatctcactgacttggtgatgacagccccaaagcaggcaggacaaatcccctctttcttcctagaaaagtacctgaaataacacgctcattgttagactccaggagttggtgctgaggaagggtccttggggctgggacacggagaacagccaccggtcactgtagacccttttgtcctggctgcctttcccctctattggcacatgttccttttccatcaaaaatttagttacaattatttttttaaaataagaagaccagaaagaacacacagggctgactgccttttgtaggacaaaactcgaacagggaaatttaacttgcgtgtaacatgcacacccagacgaccttatttcaatcatacccaattttaaaatccaggaaccggccacagtaaggaaaggcaggcatgtttcaggctgtccagcagctgggcagaaaaacggagacccactgggccaaacagtgagaggctccaattgagccatcctagttcaggtctccctagtgacccccctctgtgcggggaggtaagtgcgtctcttgatatttttagttcactgtaaagacatggtttttgccctccaggaatcagctagctatgcatgagcggaaaccctgcaggtgccgaacgtaactgattggagtggggaggaggggaaggacaaagagtgacagcttcaggtttggagagtagttgagtgatattagaagcaaaaagcatctctgatttggacagcagaggtgtgcacagttctgctgtggtttcaatcttactataggccccagtcaacaggacagcacaaatgctctttttttgaccggacattcggctggctcagagcaagtagcggggtagagtcacttagatttcagcagcaaagctgtgcggggaggcaagatgctgcctgggctgcctccccggcctcagcatcatgcctaggtggaggaagacgccaaggcaggtttcttgagcccagtggaaagctgcttgtgctgcccccagctccctcccaacaaaaccaaaggccattcatgctaaaagggtcacttagtccaaaccttctggtcacaacagaggaaggtgctctgctgccctcagcacaccaaggggggacacccctaaagaaagcactagaaggtggggtgcagtggctcatgcctgtaatctcagcattttgggaggccgaggtgggtgaatctcttgaacccaggagttcgagaccagcctgggcaacatgacgaaaccccatctctacaaaaaatgcaaaaaactagctgggcatgtgtctgtagtcccagctaccagctaccggggaagctgaggtgggaggatcacctgagcccaggagctcgaggctgcagtgagctgtgattacaccattgcactccagcctgggtgacacagtgagaccctatctcaaaaagaatttttttaaagcaagcaaggactagaagctgcactgctgccagcacccaagcttcaccccacggggcccctccttgctgcattagcactggccactgcatcacatccccacaccatcatcctgagacacccctgcccccagcaccagcggaatgagttttgcaccccagcactgtgctggtcactttcatctctcatccccgttttacagatgaaggggctgaggccaagaaaaaacagtcacacagttagtagcagagatgagcaaagaactctcaatccagttcccttgaccctataccactagtgaatcccagaaagggcagtcagaaagatgatggttttagacatagatttaaacccatatctgccttgctaatctgcatctgctctggtggtgtcagttagcattaggtctaacagtcttcacataaccaaaaactcaaataatagtggctgaaacaaatcgggattttttaaaatgtaaaggcagtctggaatgaagcagaaaagagcgtgtgtggtagtgacaccatcaatgtgtagctctatttttcggccccaccatccttatcatgtggcttccattcttgatgttgccccacattccaagatagctgctgaagctcctgccattatggatgtgttccacgcagaaagtaagaggaaataccaggaagaggaaatttacctgccagctgaataaattctctttaaaaaccttttctggaagtcctacctaatgactttaccttccatcttattggccattcctttcagcaagagggcctggggaataaggtatgttaacacactcctgcctcaaataaaattggggtgtcgttagtaaggaagagagaggatgaagaatgagtaggcaactataaggtagttggtagttggtgagctgccacagagctgtccttggtaatgagctgatttgtaatacggttagagtgacaccacttcctagcatggaaagggaacaatttgtggaaaacattcacatttcagtatcaagattttattccaggtttgataaactattccagtgatttataaactttagcaatagcttagaaacgaggtcagactagcttaaaaatgagaaaaaggcacaggcaagtggcatatttctttcttttgcaatcagcattaaacctgtcatcattaggtgaaatctacattccctgggcccttgctactcaaactgtggtccccctggacaagcagcatcagcatcatcacggaacttgttagaaatgcagaaagccagacccaccccagacctacagacagaatctgcagttcaccaagaccccaggggctcccaaggcacattcaagtttaagaagccctgttccaacgcaatgccctaaagagtctgcaatgggcctccactctcctaaaaacctcttctcaggaagcagtgtgctctgggactcttagtctttggtgagactctgcatcacagcgccactctctgaggagaatgcacattaaaacacttgtagaactataatacctaacatttaccaacttctgtgccagacactggtctaaggatttcacgtctgtttctgtagctcatccttctaaccactctgtgaagtgggagctcgtactctcatcccctcccctggggtacaaataaggacatggtgctgagttacccagccagccagccagcaataggtccaagcagatgctgcctctctcgaatgttttgcccagatggagagattttaaggctcagagaaagatgggtcagtgtttccgaatgagggagcagcttggtgaaatacactctggacaggcagcggggatgactgggttccagagcttgctcagctactgggaccttgtataaataactcactagaccacctggaacctcacttttcttatctgtgtatggagtgatctgcaagctcccctccagctctgacgtccctcgggtccggacgtgccttccgtatgatcggaaaatcagtcagccttagcagctgcctcccctaactggctttatttaggttcactcaactgccacccagcctggccacagcccaacttggtctggacacccagatgttggacaccctgcagggaaactatacaccctcctgagcaatcagagacaaataaacacagctgctgccagcgaagccccccagttgacccaggtggaggggaaggagctgggcaaagtcgactttctgtagactttcggactgaattcgacttggtatgaaagttcgcaaagggagcacctggccatgtgagtcagttcaccaaggctgctggtgtgatattacccctctgcccaccctcgtcggaaagggctggctgcccacctgcctggctggcagaaaccagaaagaagtggtgcaggaaaagtcactgagacttagtcgaggtggaaggcttcttgttaccccctggcccttctgcagggcatttatctggtcaacagatctaagtggagcggagagtctttgagagtctcttcccagttcacagtggacctgtccaccaggccccttgctcaccactccctgcactgcagtagacacaagggaggctcctggtggccctgcgtctgctgtgggatgcctccacccactaggctctacatgattggcccacaggcagccccaagcccaggccagaccacagcctctttcccatggatttaggaattgcgtcacgaaactctgtctccagaggctggacctgtaatgtatacatttagcgtcttagggtggggcatcttctaccagagtgatccagactgcagagacacagactctagacagagcccacacactgtgtggatcatagataagaggacgagagggtccagggtctctttagtcccatcccagactccaagccctccctctttaggttctcagcctcacccctgcatcctataataaaatctcctttaagcaagcgtgcttcagaacaactctattacttgtcaatggaggcgtcttaatgctgaaccaggccttcccatattcaacaaatattcatgaagagcccacgtgggctaggagatgtgcttgacactgggggaacgaaaaaaagaataagtcattaccactaacctcaaagaggtcacataaatctgggacgtaaacagatcattctaaaccaatgtattagtctcaatgtttgtcttcccctaaaatgtgtgtgctgaaatcctagcccccagggtgatggtatttggaggtggggcctttggaaggtggtgaggtcttggggtggttcctcatgcatgggattaggacgcttgtaacgggctgaaagagcagagttcattccttccaccaggacacagcaggaaggcaccatctatgaaccacacagagggccctcgccagacactgaatctgccagtgcctcgggtgtgctaaaggcagcccctggcttcaagaatcttgcatcttagagggaaaccacatggaacacttaataaaagttcaagacaaccgaacaagagacttccaaacaattattgctaaatgagtggtccctgaaatgttacagaagctcagagttaggaaaatgcactttgagcttggcagttaacaaattttcagagaaggcagagctgagttaggcctccaagcatacggtagattcaaacagagacagtgcctagccacactcttgcaaatgatgctcttgaaaatattaaatatccagagttccatgcttctaaaagtgctttcacagccaactcatgtgatgctcacaagcacgctggggagggagggatgtcacagaatcactgtttgatgatggggaaaccaagacacagactgagtgattggcttggtttgcaaaactagtgagtggggcagatgctcatgccccctgcccggtccaaggctcttcctgtcacctcttccattactaagtgaaggggacacagaatcacacatctcacagcaattctacccttcctctggagcttctggacagactcagtccaccttctccctggtgtggcagcacaggagttgagagtttctactaaagatgtctggaacaaaacatctatctgttaaatatgtcttccctgcatgcttgtacactccgagagggcagataccatgtcttgttcagcaattaagctcagtacctggcccataattaagactgtattcacatatattttgtgattgaatgaaaacaaataaaaagacaaatgaaccaaacatatcggtcagaggagggagaaacgggaggtgggaatgcaggcccactgcggtatagcgtgcagccacctgatgtttaggagtgaatcttccaaagcttctcctctttgctgcccccctctcaaatcttcttagtattatgtccagagggcaggcagaagcagggaaaagagagatgctaaaatgtccagcaagcaccagcttgctacttattaagactctaggaaaggatgatggagaagaccaggaagtgactctgtgataaagccagtgcttagcgtgagctctggcagtcccgagtgcctgccatgtaagttcctggtaaactgcaaaggaaaacctcagtattaggtatgagttggagatgtgaaccttaagcgcttgctatgacattcaatttggagttgtgcttaggatgagcttctaggattcttgtgtgtccttctctgatgacattctccaactccctttgtcattgtcctggagtaaaatcagcccctgggagggggctccccttatggggagttatcacctcatctagaaactgtccactcactttttaacctccccaaggcaaggctgacagagggaccaaagtggaaagggcgactggtcgggaaagccatgaaaggccagcacccccaccgtggtcccccagaaatcactaccaccctctgttctccacaccgccatccatcacccctccctcctactcaaactggtgccagctctggaggaacatcagctgatctaggagccacggcttgtgccaagagccacggacagtttcatttggcacacagtctcaaggagaaacggctctttgttttcaccaacagaggagatgccaccaactcctgctccccaaattcccacactcctttccctctctgtcaagggcagaggaaagcaccttctggcccttctagacccaaaacacccagctaaagacaaaggctgctgaccttatgtgacccgggcagattcactgtccacaccccacacccctcaccaggctccccaaaggctgccttggctggagaacttgggatgtcactctgctgcttacggtcacagagctcgagcaggcgctgtcacttgggccatgtgagccagtgactcattttaggatctggtcctgggcatctaagctctttgcttaccctcctcatccccactggcttccctccaggttcttcattttcagacagaaaacaccaaaaccttgagtcaccatagggacgtgataaccacatgacaggaaacttatgcaattcaagacagggcaagtgcctgtcatacccagagctacagtgcaagaaggtcctcggagctccttcagcgcatcatatgatttcagtgttgcctcataattttcaggcgaactttccattaacaaagaaagtgcttcattctcatgaaccctgacctcatttcctgaaacagccttgacacacaagcctgtgtacacacaatcctctacacaattatacctcgacgcaatccatccattcgatttgtcagcaggccaaagccacacccccaacacacacacactctccaaccttcctcggccttcctttctcctggccaagaggactgagatcttctctcatctgtgtttaaggcaaatctctagacgggaaagagcagaaactaaatttgatcatgttaaattccagctttccaagggcgaggaagaatctcacattttagccgcaatagtctgtgacaggaaccgtgggttgtaatatatgaaggaaaaattctgcagtatcctgacaaaatgttttgaagaaaaggcatatggatgtatttttatcaggaactgcgctcctcacccaagacagcaggcacaaacattttcaaaacactcagctctcagcaaagtgaaattctgctatgaagcgaaactggatgctcatcctctccatccaccactttctcaggatgggccttaaaaaaatcattccgccaatcagtgttttaataaaaactctcagattgactaacttcaagaaaaaatcgccgccccacaccctacagccagaaaggttttaccaaactgggtttgacagaatatacttgcagaatatttatttttagatctctcagcagtacagtaagagtctttcgtttcagatcagctggcctccagccaaagcagcgaagtcagaggaacttcagcccctaagccttcctgctccctaagagtaccagcgctcctgcctggctccggcataaatggttggcaataagtcattttttattaaaattttaactctaggcagcaattttgctttaaaaggtttttctttggagtgcatttttattttaaaaaattaaatactcttggatatgttagtattcagaagcagcagatttcaacagctcacactttctctgaactttttttcaacagatatttcacacactaaggagggcctgaattctcagaattgtacctctataagttcatagctgccctcgtcttttagggggtgggtggaaaatccaactcaccactcaggctcttgcaggtctgaaggctaaaccggtgtgaaacaaagggtcccctttcactcactactcccaaagccgggaactatccagtgaagagtggccatgccatttacgtggcacaaggtggcccaggggtgatgagctgttcaccttcaccggccatttctctcactgctttagtgcgtggcacagtgcaccctaacatcccacatttaacaccccatcaagaaaaatgtgagtgcagcaaaatatccaacaagtacttgctcctaggagcaattcaaacacattttgttcaataatggtttcattccaactggcccaaagagaaaaaagagtaaggaattgtttaaagcctgtttagcaagatgaagcctcagaaggcagttggcttggatttaaacacgtattgcatcaacaaaagccaaatctgaggtgtcaacaaaaggaagtcactcttattctagaaacagaccttgaaagtaactagcttggtgctaattagagacaggcagggcaggcttagttatgcactgctggttaacacacccactcaccctgactaaaccgctttaaaatcagggagctattttctaacaacccttttgaaatgctattcagagatgaactttacatttctatgtaactgcaagatgctgctcgccaacacagcaacaccaggcatttcaattaaataattttattgggggaaaaaaaccactttgagcaccaaagcaagaaaagtgtattattcaatcagtttcccagatcacatgccaagaacacaatgctcactgtggtgcctggcagacggtccacaaccagcgggtgcgttcagcttgaatggaccggggtcccacagtgtttgtgccacaagtcaatggccttgctcacgatcgcgtctgagctgtcctggggaatctgtgggcaagcaaatcagtctttgtgaaatttcagtgttgacaacttcagtgtcttccctcattcgctgtggcatgaaatccacttccatgggagtttgcactgtttttcagaaagtgacagcataaaagacttgcgtcacatgctacctgaggacatgaaagggctccagtgtcagcctgcctgggttcaaatcctgcactgctcactaactgtgcacccccgggcaggttacctaagctacctgggtttcagatccccatctctaaaatgggggaaatgatagcctgacttcacagagctgttcacagtaggacatgaggtaacccatggaaaatacttagcacaggcttcgcactgctagccacctctggttataatgatgattattcatttattcaacgcatattgactcagtactttattataatttaccaggccatttttcaaatgttaatactattttaaaaatgaatagattttggattctgtgaaaatcattcaggcataagtctctttaatcctacttcttgcctggtaaagggtattccaagatacatagcgagggaaaagttaatttcattaccattgcctttttcagcaatatactaggttaatactgtatattaataaacccaactgggactacaccagagacagtaacagaaatgaaatggcttacaaaatcctccaaaatacagaaccccttttgaactgacaaaaattactcattgtaaaatgacagatcccacctattccttttcctgacatgcctgctgatagtcacatggaggatgagactctggttctaagtggacacattcacgagatggtctcagaccatcatttcccaaagacaggatgcaaactaaccctcaggccaactttaggccaaactttttcagggaaaagtgtttcttataatgtaaaaatacactgtatgatttctctgaaataatctaatgtaacaggaaaatctcacttgctaaagtgacttcatttctagattcaaaatcaaatcaaattattatttctcttaaataatttccctaaaataatcattattataattattctctgaaacattctaaggtattatttctctaaaatcatgtaattatttctctgaaataatctaatgtaacaggaaaatctgacttgctaaggtaacttcatttccagattcaaaatcaaatcaaagcacacttacattttccagaaactttgttatcttctctgcactgttcagtgccataacttttattttaaaggttaataaaatttcgacagctacaaaaactaggatcttacaggatccactcacaactttatcccaaaccctacaaaaataaggagatataatcaaattatatgagtttcagaattatgtttagcctagacatctcaaattacaaaataaaatcaaattgctccaattttatgtaaaagcttcaaagaacaacttttatgaaataatcaccaaaacaacaacaaaatacagaagccatttgaaatctattctagatacaatcagcactagaaggagaaaggaaagtttactaaaaattactgctccactaggaatctaccaaaatcatattccctcatgttgtgaacctgacatttctgaggaagaaaaagaaaatcctaaactaatggtttatattctgctaatatgccataatgctaatataattatagcctactaagggacaacaaaagatgtatatgaaatgggataaattcaatttcattgccagtgattctggggacagactccttaaacttctccaagggcgtaaggagccagttactgatctataaccactctaaaataataattctgatcattcctgtaactcctaaaagttggtattctacttcatacacttagttacatattatcttataatgttctctgtgtattgcactgttcagtgccataacttattttaagagttactgttctactacatcacaaagtcttaatgggtggcacctggactccgaaatacccagacatgtctgaaactgactggaagaacttagtcaaatctttgactgctttcagcttctttaaagatatcatgatgaaactaacactaagatttctactggaggaagatttgtcacatttctggaaaaaaggggctgacgcttatataaactcatggagaccatttgaggtgtgactgcttcacagcatctaacgcactgagggcccttaatttttctaattgtatattcaagaataagcagaatcatgtgctgttacggtagctgctggaggactgagcttcaaattactgtattgttctaaagcaaatttataatctgagggatgaccacatgaaaggccagaactctgctctaacgccaagccttcaatatgtcttcgaaagacctacttgcctctgtaaactggattcaggcaaacatcccgcaaagcacctcttgaaccagagatcataaggaagtttgggcgccgcggaacacatcctcagatgagtcagcagtctgccatcttccagattcaagtattgttcaaacgcttttggctaaagattaagcaagaacagagattattcattttctgtgtcataacatcatctgatattatagtctctgatgaaaaaaaagtacatgctgaattcaaggaagtattagaaaacaaaacttcagaattatccaagtcacttgtgacacagcagtttcctaggtcagccctaactaaagtaacaaaccatccaggactgaggagtttcccaggacacagggctctttcagtgctaaaactgaggcagtcccaggcaaaatggaatggttggtcaccctaatactaacttcactagccagattcaacagcctaaggcaaaagtccaaagcaaaattcagttgttctgaggagctaaggaaggcccattatattactggctggtctagagcagcagattatatactaaggaaaaaagggggaaagaggaaaggtaaaaccaaagaaatagagtgggattagagtggggagagggcattaggaagagtaagacaaaaagtgatggtgatgagaaggggctgaccagtcactgaccatacatacactgccctggattgagcaccactgtgcaccagtgccaagcaggctcacacaacagggatgtccagagggtgaactctgtattcaacataaatgtgcacaagaatttcttagaattcaagggataactcagagggaacaaagcacctggattccacttggtagcctctctcatgaggtcaggtggcagccaacactagaagactggagagctaataaagccagctccccaaacctggccaaatccatcttgcattggctgctatatttaggctggctgctatatttagggtccactggctgagaatgggctctaagagtcaaatcctaaagtccacactcactatctgcaggagtacaaccagggcccgcatcacttaagcaaatgtaatgtttattttactcaatatctatacctctctgcttctgttaaagaggagattcatcacctttacaatgtccactatagtcagagactgtgctacacacaatgaatggagtgaaaggtaagagaaaatccctgccttcaaggagcttacagcttgagacatactagtaaagaggtaactacaatacactgtaacgctgtgatgctatgatgggaacaagcacaagatgttgggtacatccaggagaaaatcctaacctgggctgtaggaggcagaagcagtttctcaggagaggtgacatttgagctgacctctgaagaacagacaggagttagccaggcaaagaggggcccacatcataatatctggtccagctttcccctttctgtttcaggatatctcttcttcctgtttatccaacctccctatactgctcaacggttcctagaatttctcaataacactgcagacaacttcccaaacaaggaaatttggttggttttgcaaaggggatatatgcacttttttcctattgacttggttgaaaacacacacacagagttatatattatgtctcagagcaaagaaaatttcatccaaaagtcagtacaaataataaacaagatggagatgtgtgaacattttaaaactatgtattgtctttttcctttatcagacaataagctcacggggggaagctactgtatctgttttgttcactgctggttcttcagtacctagcacatcacttggcatggtaagcactcaatatataactgttgagtgagcaaatcaatactgtgaattaatataaagttttaaatacatcaatcaatatcttagtaatcgctcaatatacatctttttgccaatatctaattaatttcttaacctttttcctggtttattatagcctattataagaaatcttgaaactctattaaagaataaagaggacatagacagcaagtataatcacactcccaatgataactactggtaatacttaggttatagagcatctatcctgcatacatacagacacacttctctttcttttattagttgaactcatactgaatacacgatttagtattttgctgtttgcattcaaattgtggacattttcccaggttaatgaataatcttaaaaggttaatatccctacctaaagagagctttttaaaatggagaaggaaaaaagccaagaactctatagggaaaaaaaatgcacctgcctcttacccatataaaaacatgctcaaccttgcttacaacaaaataaatgcaatataaaattacactgaagtatcactgcctacctatcagaatggcaaaaattcaagactactgacataccatgttggcaaggctgtagggaaacaatctactggttgtgaggatggaaaagactatgagctctatgaaggggaatttggcaatatttagcaaagtaatttatgcatttaccctttgatccagccaatctattttcagggaatccaactcaaatatactagcaaacacatgagaagctgcatgcacaagtctatttacctgtaacactgtgtataacaaacagcaaaaggctgaaaacatcccaaatagccaacaataaagacaggttgaataaactatattcacaatagaacagtatgaatatattaacctgagaatattttgtaggctgggcgtggtggctcacgcctgtaatcccagcactttgggaggctcaggtgggtggatcacttgaggtcaggagtttgagaccagcctggccaacatggtgaaaccccatctctactaaaaatacaaaaattagctgggcgtggtggcatgtgccggtgatcccagctacttgggaggctgaggcaggagaatcacttgaacctgggaggcagaggttgcagtgagctgagattgtaccactgcacttcagcctgggtgacagagcgagactccgtctcaaaaaaaaaaaaaaaagaatattgtttaagaatatatacacaggacagtagtatgaaactatgacagggaataaggagtatctctgtatactaatatggcatgatctccagtacatagcaagtaaaaagagcaagatgggaagaatgtgtactgtatgctactgcttcatctaagaaagaaggtgaattcaaatacatatgtgtatatatattttttaatggaaggagctaatatttatattgcctgacctttttcatacttagcaaatgatagataacatagatgtgatttattatagatagatgtgatttattataaccataattatgttttactcctaaacattttggttattttcaatatttctatgacccccatagtcttacttcatgaggacaataaactatacatcatcaacagaaggcaaaacgtgacaaaaatatgtacttaatcactctgagaggaatttatattaaacttagcaagaagctgctaatagtgcttacaaaaaaaacctctttagcagagctttaaaaaactgtgtcaatagcaataaaacaaagatcacttactttaatgattaacacaattaagtttgagatggcttaagaaaaaccttccatgccatacaattgaagttggcctctattctcctcgactatgagagaccttgtcaaaaagcagaattcaatttgaaaagcttgtaaggagagaggctatgatgcaatcctaggaatcaggatagtatggcagaatagacatatcaccactcaggggcatcattatcttcttttgagtccatcactgtccatcatacacacatttccatagaactaagcagcaacctaaactgtgtgttataagatagactaaagatggtttcactagagagaaaagtttaagcaaatcacttgatgccgaaatcaaacagcaagcaacacaaggaagtttaggttttgtatacattctggatgacttttctgagaacttcataactacttaaaactacttgctaggcactgtaatgcatacacaaaaagaagccccatttttaaagatgaggaaacgaaagtttaagggacatgaagtgtcttgctggttctaaaattcatttctgaaaagaaaaaggcaagctcaagaatagccaagacatttttgaaaaagagcaacaataagagactttccttatcagctatcaaaatacgctagaaagttgtattaaataaatcatgtgatttggcccaggaatagacaaatacctcaatggaataaaaaggagtccagaaagagatatagatataaatataaatatatataaaaatgtatttatatatatatacacacacacatatatggaaatccagtatatgataaaggtggcatttcaaatccgtggaaaaaggatgaactgacaaatacaccatgtaagtgctgttctactgcttactaactgagaccttggtcttacttaacttctctgtgcttcagtatcctcatctgtaaaaacaaagataatatgcttgaatgaagtgctcactaacaatgtaaatttagcactgcctgacatgaagtacattctcagtaatacaccaaccagacggggagaagaggaacaggaggaggagtgatgtgttggtagaagtagtggtgttgcaggtaagcgtaagagtgaaatccagtatgtgtctgatgccaaccaaagataaatccctgacaaagagctaaatttaaaatgtttaagcatttttaaaagttatgagaaaacaggccaggcgtggtggctcacacctataatctcagcactttgggaggccgagtgggggcagatcacctgaggtcaggagttcgagaccagcctggccaaaatggcgaaatcccgtctctactaaaaatacaaaaattagccaggcatggtgccacactcgtgcctgtagtcccagctactcaggaggctgaggcagaagaatcccttgaacccaagaggcagaggttgcagtgagctgagatcgcaccactgcactccagcctgggtgacagagcaaggctccatctcagaaaaaaaaaaaaaaagttaggagaaaacaaaaaaatatatatttttttaatcttggggttggaaagggctaattaaccagtaagacacaaaaaagcaaaaaaaaaaaaaatgctggcaaatctcattgtatcaaaacctaaaattttgtacaacaaacagaaactattttcaacaaacgtaagggataaggataaatatccagggtacagtcgaccctcatatccatggactcaaccaaccatgggccaaaaatattcaggaaataaaaaatggatagttgtgtctgtattgaacagacacagatttctttgtcattattccctaaataatacagtataacaactatttacatagcatttacattgtattatgtattataagtaatctaaagtatacaggaagagatgtgtaggttatatgcaaatactatttgcaagtcccattttatgtaagggacttgaacacccatgaattttactgtctcaatgagtcctagaattaatcccctacagatccaagagtgactatataccaataactcttacaaagaaaaaaagtcaacaaaacaatagccatatgcaaacatactcaacttcactagaaactgaggataggtaaattaaaataagatgccatttcactatcagatggataaaaatgtaagacattgatactatcaagtattggcaatggggtggaaaatgggaaatctcatcatctgtttggtaggagcataaattgatatggcctttggatgagcagccaggcagttcaaattttaaatatgtcaaaaataaatgaatagattttaaatatgtctcccctctgcttgagcatctgctcgtaggtaccaagcctagagagatacgcatacacacagggagcctggacaagggcatgcttactctcagtatggatctcttaggtttaaatagagcaaatttgtaacaggaaatgctaggagtaaatattttttaaaaggtggttctaaatgagtgcctttcaacccttaactacacttcagaattgcctggagcttttaagaaattagaattccagggccctaccttcagagactcagatttcacttgtctaggtggaggaaaggtgatggtaatttttaaaagctcccaggtggtactaacaggaagtcaggactgaaaactagtgatttgtctaaactgccttggaaagttctccaaggcagtaagttaaaaaacaaaaatagaaccatagggccacatgtacagtataatactacttaatgtgattaatcccagcactttgggaggccgagggggcggatcacaaggtcagatcgagagcatcctggctaacacggtgaaaccccatctctactaaaaatacaaaaaattagctgggcgtggtggcgggtgcctgtagtcccagctactcaggaggctgggatgaacccgggaggtggagcttgcagtgagccgagattgcgccactgcactcccgccttggcgaccaagcgagactccatctcaaaaaaaaaaaaaaaggaaaggaaaatcatatcatagatgcatgcacataagagaatcttgtaatacacaccaagctaatgacaaatgtttacttcttagaaggagaagtagggaattgcagggatggggggtggttagtccaggtctagggaaacatggattcatctgaattgctgaatttcttttgagaatgcattcaccatttatgttacgaaaaataaaggatgaatttttaaagaatagcataaactatcaaaatgctactgacttactcgaatattaaataagaaaagctaattagatcatggtatgatataactgagacctcctgatttgattaggcaactgacatatttacttaagctccatttccaggctgaaattatttttattgaaatcaacaaagtggatcaaatttcaaaatcttaaaaatcaaattttacttagttgaaatatataaaaactgctcttgtaagtgttctcagaagctgaagggtcttgcacattgccttattaacaattaactgcagtgatcctcaatgctcatccaaccatcatcagtgccccgcatctcatcttgcaccctgtaccacagttaccactttcagtagaattttaaaaggaaataacccaatgatttaagaaaaaaaggtttatttttataaatgagataaataaggggaaaaaactagaaaaaaagaaagtggcaaaggaagactagcttgtgcaatgcagcaagtaccattcagttctctgccttcccaagccaggctatgacagaaacagcttgctgcctgccacactcccatgtgcccctcctatgtcactcacagagcccctgttttagtaggagatcacacagctttttttaaaaaaagaacctttcccagcctctactgcagacagggcagccaagtgacacagtcctggtcactaacatatagttgacccctgaacaacatgggtttgaattgcaaaggtccccttaaacatggattttcttccacctctgccaacccctgagacagcaagaccatccttccctccctcctcctgctcagcctactcaacgtgaagacaatgagaataaagaccttgtgatgatccacttccacttcataaatagaaaacatatttaattttccttatgattttcttaacattttcttttctctagcttacctcattacaggaatatactgaatacacatataacaaaatatgtggctgggtgtggtggctcatgcctgtaaatcccagcactttgggaggccaaggtgggcggataacctgaggtcaggagttcaagaccggcctgaccaacacgatgcaaccccgtctctactaaaaaagatacaaaaattagccaggtgtggtggcaggcacctgtaatcccacttacttgggaggctaaagcaggagaatcatttgaacccaggaggcagaggttgcagtgagccgagaccatgccattgcactccaggctgggcgacagcatgagactccatctcaaaaaaacaaaaatggaaacaaaatatgtgtacaaaatatgtgttaaacaaccatctatgttatcagtaaggcttccagtcaacagtaggttattagtagttaggttttgggggagtcaaaagttatatgcagagtatcaactatgctggggttgggtcagttctcctaaacctacactactcaaaggtcagctgtacatgcagagggaaagcctaatgggccacagttgtggctggcttgtccctcttattcctttgtgtttacctttgccttccctttccttctgcctagaacacagacgtcatggccgctggtccaagagcaaccttgtgagcacgagaggaaagatcattcctatgaatactggagcagaatggcagcagtctgcaaccctctccatactgtggttctgcagcgccagctctgcactgcctggattcttagcttctggtatttgggcttcccattatatgcagccaaatgaaaaccttaacttacacagagggattactctagaccagcggattctagaccagaataaggaatactatagagcaggactggccacctctggcctgcagcagagcaaatccagccaggaacattattttatgcgttgcctaaggttgcttttgtgcaacaacagcagagttgagtggttacaatagagaccatctggcccaccaagctggaaatatttagattatatggacttttacagaaaacgcttgctgagttctactataaagggttattcagaattgcagcagccccaggaggtaagagcactccctgaagacccccactaccattgttcactctccaatagccaaaaaaaaaaaaaagccctcaccaactggggcaaggaatcccggtacttggtatttaattggttcacaaagcgtcgggtgatccagtaacagtcgacactatcttccaccatttcctccatggctttagctatggcaagaaacacttcatcatctggctcctgaaagattaataataaatctcaagaggaaggcagtgaaagagaggaatacatatttctttaataaaaaatgaaaccttgctccctaaattttgaaaaggctacattaataaatcaaagtaggatcaaaaagcacagagtccctccctgaagaggggagcaagggggagaaaaagatgagtaactacagggtcagtgctgcttatgaatgaccaggtttcaggctgagtgtacagacactccccagcttctaacattaagcccctcacagagtcaacataaatcataagcaagtcactgactctctccacccaaaaatattctcagtactaggtgaggatatctttgaaaagggtgtaataaacagcaccatcagtaactggagacatttttcagcacagtaatttgcaaatattgaagagctccaaaaagactaataaagcatttgctttatttcaaagcattcacgcataccttcagaattttgttctatcttaagcagtacaaaagttaaaatgttcctagaatcagaattttaggaatcaaaagaatggcatttctcaaaccttgtgtcaatactcagaatgcgaaagtaaactctcaggtaaatttcaacagagaaatcttagaaaaaccgggaccttatttgaaaacctcttctgctttcaaacaccatatcatatacaaaaagctttacattttcatctaggatttaatagctgaaggattttaatgttaaaaagaaactaagaagtatcacactttcccttaaaaagtaccgacttaaatcaaaattgttattttaatgtattatttcattctaagcccttctttcaacttgttaatattctataaaatgtcaagaaaaacataatttaaatcatagggaataagttttctcaaaacattttattaatgtgtcaaaggagaatggaaaataagtaggaagaaaagggaaaggaaaatctcctttcttggactcccgtgcagttctgtgcactgtgcttggcaccccgaaaggtggcatatcactgactgctcctgaccactgacaggtcaagggaagaggacccatgtcgtccttcctggccctgtgatgagcactgctgcaccctcttattaatggattaaaaaatgaggcagagtgggcgctaagtaggtgctacggttcaaatatctgtcccctccgaaacttatgttgaaatttaatccccattgtggcagtattgagaagtggggcctttaagaggtgactggatcatgagggctctgccctcatcagtgggtcaattcatagattaatgggttatcacaggaacgggactggtggcttcctaagaagaggaagagagtcctgggtgagcacgttggcacgttcagccccctcaccatgtgatagcctgtgccacctcaggaccctgcagagagtcatcagcaagaaggccttcaccagatgtagcccctgaatcctggacttcccagcttctagaattgtaagaaataaattcctttttaaaataaattatccgatttcaggtattctgttataagcaatcaaaaacagactaatacaatgaggatcatgactgggagacgtgggatggcagagtccaaaacacacactcagaagcacgtctgcctgaggctgcagtaaaggtgtctcagcttggaacacagacaagctgagtagcggtgaggcggaacctataccctgtcatctcaattcctaatctaatttaatttgatatataatttaagaacttgtgtagtactatcaacttcactttgccaataagtgaaatttaaagatgattgcttaaattattccaattattttttagggaccttctctctcgataaacgtaagaaatataaatgatctttattagctctaaggtttgtccatggatacctcatcattaacgtcaaaaaaaattagatctgcaataaaaataaattttgtaaaataggagtgttccagcaaatccatttgaacaattcactgttttagccaaacaaataacactttaatttcatactgatataaataaagaaggagaagggaaaactcttccttagagaagaatgccaactaatacatgcagaaagaatgaaggagttagatcaccatttggcaatcagcatagtaaaaattggttcaggcaagaatcattagtggatggctacttacaagtctcaaagtacttctccacagttatttattaattacaaagaggaaaatagtaaccttacagtggagaaactccacagacaccatcttacccaagtgatcaaagttagcagcacagtaatgagtcccatacttctgtgatattcctgccaataatgcgtgaccagagtttaatcatggagaaacatgagacagacccaaattgagaaatgctctactggccagggctcttcaaaagtgtcaaggtcatgaaagacaaagactgaagaactgttccaggccaggcacagtggctcacgccagtaatcacagcactttgggaggccaaggcaggtgaatcacctgaggtcgggagttcaaaaccagcctgaccaacatggagaaatcccatctttactaaaaatacaaaaattagccgggagtggtggtgcgcacctgtaatcccagctactctggaggctgaggcacaagaattgcttgaacccaggaggcagaagttgcgttgagccaagatcgcaccactgcactccagcctggtcaaaaagagaaaaactctgtctcaaaaaaaagaaaaaaaaaaaaaaaaaaagaactcttccagattaaagactaagacgtggcagctaaatgtaatgtgtgatccggaactggatcttggatcagaagaagagcatcagtgggacatcagcaaaatcccagtgaggcctacagagtagctgtcagtattgtgattctccggttttgatcattacattacggttgtatgagatgtaacatttgaggacactgggtgaaggtatttcagaacactgcactatttttgcaacttttttctacatccaacattatttaaaaagttaaaaaataaaaattttttagaaatcgtcaaatgagaatactcatgagcaaaagtttaataaggaataggatgtttacatagcagttttaaagtgtctccccacaaagagaaatagcaattacaaagggaaaagtaaaaactttccagcggaaaactccagcaggcagcaccctcgccaagtgatccaagttaacactacctcttatggggcaaattcacactatgtgcctcctgataagagacactgagaaggacacagcatcacctacttggtatccctgccaaaaatgaataacctgaatctaatcaggaggaaacaccagacaaacctaaagggaggggctttcttcaaagcatctgattatgcccttcaaaaatgtcaaaggcatgaaagataaaaaaagacagaactgtcccaagtcaaaggagactaaagcaatatgataacccagtgcaatgcctaaaccaggatccagtcctcacccagaactttgaccgtttgattatttgtgaaggcattattggtgaaattcaaatggagctggtagattacgttaatattgtatcaatgttaatgtcttagttttgaggactgtactatggctatctacaggggtgtcctgtctttaggaagtgtacactgaaggaatctgaggtaatagggaatcctgtctgcatcttactctcaaatgatttaggaaaaaaaaaatgtgtttaaaaaaatacgttttaaaacaacaaagcaaaacagatgcacacaaagcaaaacagatgcttaaagctacttagcacctacaattttttattttttaactttttaaataatgttggatgtagaaaaaagttgcataatgttaacaactggagaatctgggtaaagggtatatgcaaattcttggtagtattcttgcaacttttctggaagtttgaaattacttcaaaataaaacgtattttaaaaaaacaaaaagtaagaaggttgggtcagaatgtgcatggccatgaatgccaagtaaagatgtgtcacttttattctaataacaacagggagccaccaaaagtttttaaggcaaaacatgatgtaatcaaaggccggcaagatgggacggtctagagttgagcttagtgtcagacaaaagtgaccactaaccagtggaaaagagggacttcgaggtaacttcccagactccagctgatacatgcggagatagacttcagcctgaggtgtggcatcactaacaaagcgaacgactttcagggcatgaaggacatccaagtactgctccttacgatacatcatcaccttggcatgggactcgtggtgtggaggcaagattcctagagagaacaggaaaaacgaaaaaaggacaaaatactgagccatcactccaaatccctcatctatgaaagaggatgccgtgagaagcgacccacacaattaggctagaattcacgcagacattcaagtaccatgtagaatctcttttagaaattctcactataaaacaatcttaaatgtgaaatattatcaatgtttgagtgctgatgcatcactgatatgagagagaaatgaaacaacactggcaaagcccttgaataagtatgccgcatacattcaagattagcaaccacatcaatcctaacaatggtttaacttaatttatggcagcctcaggctgcctttagctcctagaggtctcaccctagtctttgtacttggcccctacatctcagaaccaccaacagcccattgaattcttctcttccccaacagttaaaacttgctcactaagtatcctatcctccaggtcacaaaagtccttaatcttcattggtgaggtcaccttacaggacatttctatgacatattaagctccttaacccatttaaacatggtgtcatatcttttttacaaacaaatggctctgaggaaacacagtggaaagaccactagacagaccagccatcctgggttctagcctcggactggataatactaggactctgaaatgtgtctttctgggcacttgttttccccacctgccagaggcaggaaatgggataagcatttcaccaaatgcttctccacagaatgctaaccccaagagaaaaaaaaatgccctcatcaaacagatttgggaaatggtgacaatgaattttcatggcactaagttttgccataaagaaaaacattttaggccaggtatggtggctaacgcctataatcccagcactttgagaggccaaggcaggcagatcacttgagcccagaagttcaagaccagcctgggcaactgggtgaaggtatttgggaaaccctgtctctacaaaaaattagccaggtccagtggcacatgcctgtagtcccagctacccgggaggctgaagtgggaggctgaggtgggaggatcacctgagcctaggaagtcaaggccatagtgagctgtgatcgtaccaccgcacgccagcctagaaaacagagtaagaccctgtctcaaagaaaaaaaaagaaaaaacaaaacaaaaaaaaacattttatttactcaagcctcattaaacttaatgaggctctacagaagtacagactctggagcaaagttcctgggtttaaattccagctctacaattaactggctgggtggtgacctttagcaattactttatctcctatgtcttagcttccccatctgaaaaatgggaataacaatatctaatatcatacagttgttgagatgaataaacaaatcaacacacacaaagcattcagaagagtactcagcaaacactaagctgtataagtgttagctagtacatttgactatgaatccctctttggtgcaaaatgccacaggtttagtattctaaagaacaccccagaaaacaaaaacaatagtagctaacatgataccagttaatgttagaaaaaaaacttgcttaaatgttcttttccctgaaagaaatctttactcatgctatgagactgtgtgccaggcttccagaaaagccaagggaacacactaaagtgtctcctacatctcggctaatacagcttaaacagctgtgaccaaaccctcatcaccctgctagaggcagcacattaacccttaaacctgttttctaagagctagtcctaaaatgtctctttttgatatttaactaaaatagtatcaggaagtaggcatttgaagtaaagatccctaagtaatcaaaactctgtgctgggaagagtcaggctgtgtcctacacaggcgacagctctaaacttccagtgccttgtcctcaaaaaataactatgacatgataaagaaaggtgggccgagcgcggtgtctcatgcctgtaatcccagcactttgggaggccgaggcaggtggactgcctgagctcaggagtttgcgaccagcctgggcaacacagtgaaaccccatctctactaaaatacaaaaaattagccgggcgtgggggtgcgcgcctgtagtcccagctactcgggagactgaggcaggagaatcgcctgaacccgggaggcagaggttgcagtgctgagatcgcgccactgcactccagcctgggtgacagagcaaaactctgtctcaaaataaaaaaattaaaaaaaaagaaagaatggttaagaagagtagaagtgaggaataagccagataggctgtagcactcaagaagtgagggaaagcacaactgcacaactcccattaatccactgcagttattaatagacacacagcacctcccataaatcgacactgttgacattaccacttaaaatgtaccccagaaggcacggagaacagtaacatttaaagaaaagtgctctgggaaaaactaaaatagttgtcaccgcttctccagattgtaactgcacgttgacctaccagacataaaagtgcacagagactgccaggatgaacaagaaacaagtcattctgcaggccttcctagtaccgcttatattccctcgctgcctccatattacataaccagacagggctgcaggcttctcaagccctgaaaagatactacattttggaaagaaaatgaggtccacaatctatcttaccttcaaatgagttccacaaacgtaagctcaaatcctagctctgccacttacaggctataatgccttaggcaagttacttagcctcagagagtcttttccccatctgcaaaattaggataccaatacctgcctcacagggattctaggattactctgtataatctatgtaaactactcagcctactgacaggcatacagggatgcccaataaggagcaatcatagtttatattcttcagggaatttagtactcgccactatcttacagtgaacaaactgtaagtttttttttgtttgttttttgtttttttttttggagacggagtctcgctctgtcgcccaggctggagtgcagtggtgccatctcgtctcactgcaacctctgcctcccgggttcaagcgattctccttcctcagccttccaggtagctgggactacaggcgcatgccaccatgcccagctgattttttgtatttttagtagagagggggtttcacccttgttggccaggatggtctcaatctcctgactgcgtgatctgcccgccttggcctcccaaagtgctgggattccaggtgtgagccaccgcgcccagccaaaaatactttttttaagaaagaaaaggaggatggtaatggataggaattatatgctccagcaggctcagcaatgataggggaaagaaaatcttgggctcaaaagggatgctgccagttactcatggcacttaattcacattttcttccatagaaactaagtaagatcagttttccttctcactcagccactcgcaccactggaatttagtcattcacacttctagggagtagtaagtctccaattcctctttgacagattaggaagttatacctctatagctgagaatcacaaaatcttacaaatttagagctaaaaactaggagtaatttagctcaaaagcttcagtttatagatgcaaaaaatgagtcccagaggggtcgccttcctccaggttacccagctgatagcaaagcctaaaccaattctcatttctcctactccaatgctcttcccagatcttgtctcaggaacataaactattttctcttctatagtatcattaatagaacagaaaataatgagtggtaattgaacctcctggggaagatccaatattcagtaaaaggcctaaacaaattctcctttttctgactgataagatagcaaatgatcccttcattcaatattttttaagataaatcttccaactcctgggtctcatacctagaagcaccttccataccaatgcacggtacatggacgggagagggaacctctgactaaaagtacaaagtttctcagtatctagaggaagaagaaaacaattgttagaagcttttcatgctgatcacagtatgtcaaggcacatttcattttttaaaactcaaagaatagttaagacatttcttcaggggaagtctaccatatggtcagtaagtttaggagaggcaatactagtctgatttctagcccaagacttctgccaactaagttatttaaaaacaatttgcggccaggcacggtggctcatgcctgtaatcccagaactttgggaggctgaggcaggcaaatcactagaggtcaggagtttgggaccagcctggccaacatggcaaaacaccatctctactaaaaatacaaaaattggctgggtatggtggcacacacctgtgatcccagctagtcaagaggctgagacagaaggatcgcctgaacccaggaggcagaggttgcagtgagccaagatcgtgccactgcactgcagcctgggcaagagtgagactctgtgttaaaaataataataaaaataaaaacaatttgcattttacagcattggagatgcattttgcatatattactacattccctataacagtggtagttattaatcacagggtttatttaattcacactgcaagcctgttaggtagttcttgttctaaaaatgcagaaactgaagttcaaagcagttaaatgacttgatcaaactaacatagctattaagtggtacagtctgccttcaaatccctacattttccaataaattacagtgacttccctgaccctcaattcctctacttatcaaaggagaataccagacatactaaagcaaagaccgcacaattgaagatcaaagataaggtgagaaatgtttcagaaactttaaaagtactctatgcaaataaagtattatctttaactacggttcagtttattttactttagtcaacaacagaccttattcagactggctcaaactaaaatgtcaatatacaatgcactcttagtatttccataaaagaaaatcatgggctgggcatggtgactcctgcctgtaatcccagcactttgggaggccgaggtgggtggatcacttgaggtcaggaatttgagaccagcctggccaacatggtgaaatcctgtctctactaaaaatacaaaaaatagccaggcatggtggcacatgcctgtaattccagctacctgggaggctgaggcaggagaatcacttgaacccaggaagtgtaggttgctgtgagccaagatcacaccactgcactacagcctgggcaacagagtcagacttggtctcaaaaaaaaaaaaaaagaaaatcatgaccagagttatcgcaaatttacccagaagcaaatttacctagataatacatgaaaacatatgggttcaataaaagaaaaaaatactactgactttcttaagaaacctttcaaaaacttctgacgctcagtgaaatataaatttgaaaaatcttttctcaaaatacaccattctgcttcaccacatcactaaaaaatacagcaagtaaccaatgcttctggatgtcttttaagaaaatatttacttcagaacatgtggagtgattgagaaccaatgagattaatttttaaaagtactcacccagacggtcatcttttaggagaatttctaatgatttcttttcttcaactccacgaaaccccactttctcataatatactgaacgaaagtttctctgagagtcctcagtcatatttcattcttggaggagacacagaaagacagaaagggagagaaagacgaaggggaaaagtgagtctagaaacaaagagtcaagaattagaataattttcaatgatgttctccaccttttcaatatgatgtacccttgcataggacccaatattaaatttttcctttaactcagttctgcaactatctcacctatgcatcttggctaaaaaccaagatataagttaaaagttctctgagctgataaaatagatggcacaaggtttatgcactaggtttcccactatacctatgagtgcctagcacaatagaacattctgtagctattataaatgcgcaaagaaaaaaaataagtgaaatggaagccaggcaagatacgtcaagcaaattatactcaaacagtatacactatgatttcattttttgttttttacaaatttcatgtattttaaaacttaacactctattccaaaatgttagcaatggttatctttagatagtaggattctagatgattttaatttcctttcttttgcttagctacttttttttaaatgggcattttgtaaaatgaaaaattaagttatataaaagtaaaaagccacgagttcctcacttatctttcttttaaacacaattctattaagtgtagctatcgaaattcaaaacccacaacaaataaatcgcattaaattataactagaagagggtaaagaatgtagccaattgacagtgatcccaaagtcagagttgaagacggaaaaacgatttaaaatctaccgcaagaactcaaaaagttcagtggtctcaagttccttcacagtaaccttcataatactggcggtaattcatccaaaaaaagaccaagttagatttggcgtttcaagaacagaaaagatctgatgcatttcccaaaaagcactgcactgcctcacccaaatgcttccagcgtctgtgcacaaaagagtaaatctttaggtttaaaaaccctgcgacgtccccagtgagcaggggagggcttccttccttattgaaaagatatcctctgaaccgattcagtcacaggaaagattaggattcgtttagaaaatgaaatgctaaagggctctgagctttcgggagcagatgtcttaaaaataaaaaagtcagcagcataaaacgcgtaatgagtgtggggatttatttttttaaagcatccaaacagctgcatgacgatttggtcggtccctgttgtctaaggacacccattcttagattgcactacaatgacaaaggcgtcctctaggaggaaatgctgcaaataatatctcctgcccatgcgcgtccacctgatgggaaaagtaaaaacaccctggtccaagaccccaggtcccattctctctatgatggatgcttcacctctagtagtgcaaacacacccgggttgagactaagtggtccgggagaagcagaggaagccgtgccctgtgcgctgaccgaccgccgggcaggcgggcaccgttggggcccagggccaggagggacgagtcctgcgggaaggagggaggcggcggggtacctgggacacccgcgcgcgcccagacggcccgggagacaaaactcagcgccgctgccgctgccgctgccgccgccgccggacgtgacatcaactccaggtcgccgggcgggcgccgggcgggcgcatgcgcagagggcgcgggcaggaagctccaccctcactccaggaagctctggcttcgtttgtgaaacccgacgggatgaagggctaggctcgcctccagagtagtgtagtttctcccgccgtgggcacccggccccttgctaccccgcaaaatctcgcgaccatttactctggccatccgaaggcgcgtgcctgggttgcactcccgtgtccggccctcgaggttcttgcctagggaagacccgagccctagggccgtacttaagctgcctgcgtgcaggacccgggttttgcttttgctaatttcctccccaccccaggtatgtgggaatagatgaagaccatccgaatgagaagaaaaaaggcaggcagaggagtgcaagtctgatttagagcaggcaggctccctgggttggttattgtaggtaactgactggttttctgggcaggttgctgcaggttgtggattggaggtctatttttatattagatttggccattgtcttagtatattcagcctctcaggtaaaacactataacataggagaaaaatgaacgtgttttttttttaaaaaaagatgtgctaaatgcaagctcctaatttgttattagtaggtctaacagaacagagttactctttaaagtagctactaacacttacaaatgctttctatttctgtgcttgcctccctggtcctcgggctggctgagcagcagtgcccaagtaggtttttaaaccgccagggtttgagagaaatccccaatgatgggtatcgtccctttgaaagttcaaatctctaccaaataagccacacggatgccaagctttgaaggaaacttaggactatcaacagtgcagaagtccagttatagtgcagacaaatgtgtgtataatggctagacagaacttaaaaatgaagaaacgtgtggtggttgaactcaaacactgatgcccctccccactcccttaccaccaccatctttagttcctcagtactggggtactaaaccttccttgggtagtgttcacatgagtaagcagagttcttcaagttaccttacacaagttccatttacttcatctaaaccttgggccggtcactaacttttataattgccttttcttgtctttaaaatcatcaccagggctgggcacttactgtgtgcaggcgctgttctatggactcaggatacatcagctaccgaagcaaagatccctaaccttgtgaaactgacattctggtgggaggacagatccaataaaaactaaaataaataagtcaatgatgtagtgtgttaaaaagtgatcggtgctggctgggcgccgtggctcatgcctatgatcccaacactttgggaagccgaggcaggcggatcacctgaggtcaggagttcgagaccagcctggccaacatggtgaaaccctgtctctagtaaaaatacaaaattagctgggtgtgatggcacacacctgtaa

SEQ ID NO: 601 - DNA, 138535 bp, Homo sapiens
  source 1..138535: mol_type = genomic DNA
ggttcaggctcctccctgtgcatcctttagaagtaaacacagactaaaacctgccattatgcagtatattgctgctgtgatgaaaagcactatgatgtgcttgaacgaataaggacaagattgcaacagaattctcagcatattaatagagacaggctttcagagggacttgctactcatttactgtcactttcttaatgacaatggaaaatgctggctcctcttctatatccagggctacacatttaaacaaaacactcttatttcccgctcaatgctatctctgattttggcaaagtacaggtgggtgagagtattagattttgcagttatttcttgaggcatatttaagacatcaaagataaaaacacatggagtcacgtgtaataatcttagagtccaataaatgactagctacttgattaaaccaaatggcattatagcatgttaataaggattaaacagacgcattttcaccgtcattacttagatggaatgagtatttttttttgttaacttttattttaggttcaggggtacatatgaaggtttgttatataggtaaactagtgtcatgggggtttgttgtacagattattttgtcacccaggtacgaagcctattaaccaatagttatttctttctgttcctctccctccacccaccctccaccctcaaggaggccccagtgtgtgttgttcccttctctgggtccatgtgctctcatcgcttagctcccacttacaagtgagaacatgcagcatttggttttctgctcctgcattagtttgctaaggataatggcctccagctccatccatgttcccataaaatacatgatcttgttttttatagctgcatagtattccgtggtgtatatgtaccacattttctttattcaatttgccattatgggcatttagattgattccatgtctttgctattgtgaacactgctgtaatgaacattcacatgcatgtgtctttatagcagaatgatttatattcctctgggtatattcccagtaatggcattgctgggttgaatagtagttgtttttagctctttcagaaattgccacattgctttttacaatggttgaactaaggtacactcccaccaacggtatatttgtgttgtttactttacaacctcgtcaacatctgttcttttttgactttttaatgactggtgtgagatggtatctcattgtggttttgaagacagacatgcaaccaacaagcatattttaaaaagctgaatatcactgatcattatggataagcattttaagttagataactgataacaattatattccttattttaaatatagtcattgatatactacaaattgtatttctctctctatgtttgcctataaaatttatttacttaatcaaaatggttgcctgatataatttcccctgcaaaagttgtcaaaagaataatgttattgccttaggcaggaactcaagcacaaagataaaaagctgtatctgagtatttgctgtattttatttgttcacatttagcctatttgaggttaacactacttcatttgacagtttaaaaatcatcctgtaaatagaataaaaaacaacagcagcaatagctaaaaaaaggacacaatgtataataaaataaaggaatgtgttgaaagaaatattccaaagaagcaaaggaaatgagaccatgattatgaattcaacaatcagaagaaaaaatcgtccaacatctgtaaaaagcaaaatcataacagtaataaaaaagaagcaagaattcaaagtgcaggtgcgctagctttcatttccacatccattcaggaaatagagcatactattcttttatataaagtgacaagttctgtttttaaaacattcagttacattatcttgcagattttttttcagtttacattatctctacattgatttgatggaaagatggtcatatgcgatatgtggtataaatttcttcaatctatggagaatacggaaatggtaaagttgactgttttacttatgtttttgcagtaagaagctaaacatccagtatcagaagcatcagtacttttactctttcaaaaacaaaagcaaagcaaaagcaaaaacctgtcatgagccctctgtctttgctgctactttcagattctctgtgacaaaagactgttacttttcactgaattctaatgagttgacgtaaataatcagaacaatttcttaaatgcaaaattggtctggtatctgtctaaattggtcaatacaagtgttattctggaatcatgtaaaaatcacttactttcataactgtttagaaccccaaatgttttccctttgaaggggaacatctgtggaatatgattttgaatagaggacttctatgaaatatatttcaaatcttaaaaatatttttaatacttcctaaagtggtataggatttaccctcgctgactatgccttccatttaagaacagtcttgcatttgtggcttttcattttccttacagctctaattttatttaaaaagcctgaatacacaaatgactgctgccttacttagcattaaacagtactattttttaaaccatgtatacagctcaacagcaagattaataagttataatacacacatatcactgacagattcatctttttgttttttagaattcacgaaataaactgtattctggtaaatcccctccccgcaacaagagtgtaatgtacctacattgaggtgtttaaatatttctccaacagttttcattgaattacattatgaaaacactaggcttcaagccaggtactaataaatatttaatttaaaagaaagaaagaaaaaactcaacacagaagaacataaaaaatccctcccctccctctcctcccactcccccgggaaggcgcccgtgtcagccggacatggccgagatttcatagtcactggccgaggtgaggggcttgcccatcatccggatgttttttgcactggtaatcctggccatcatgcacacgggcttgtcaaagtacttgaccagggcaggctcagttaagagggaggccaggaactgctcgaaggtgatggcccagtcccggtccaggctggtgctccggggcagtgccgccgtgccctggccgctccgcaccaggaccgtgtcctctccgatgtcctcgcagtgcagcttgtcctcctcgtgggagccggcactcagcaccgagtatgaggacatggagctgtcgtccttggtgtcgtcgtcagagatcagcatggaggagcaggccccgttgtcccggggcgaggagtcctccagcttgatgtcctccatttgtcctccaagggagtgttcctcgctgtcgggggccaggctggccggcaggggctcaacagactccaccacgtaaggctggcctggccctttcttggggaagagcacgcctgggatgccctggtggcaggacggcccactgcctccgctcccgccctcctttgcaggctgggccacgaacaacttgccgacctccccaatctccagcaggaggctggtcactgctgccgtggcgtggtacagctcctgctcattggggtcttcgctgaacatgttatacattgtcttacacagttcaatgaactgcccctgaaaagcgatttggaaaaacacaatgtgaaatcttgggggagcagaaaggcagcactgaagtggactgtaaagccatttaaatgagaacgcctaaagatccctggaaagtcctccgcctaggctggatggacatgtttaaagtctcctattgatgtttctatttttaatttttatttctttttgagacagggtctctctttgtcgcccaggctggagtgcagtggtgcaatcacggttcactgcagcctcaacatcctgggctcacatgaacctcccacctcagccccccaggcacacaccactatactctgctaatctttgcgttttttgtagagatggggtttcgccattttacccaggctggtcttgtactcctgggctaagtgatcctcctgccttggcctcccaaagtgctggaattacaggtgtgagccaccacacccagcttattttcccaattttttaatttgaaaattttccaacatctatgaaagttggaatgaaaaagtaaacatccatgtacagctcacctcgagtcaagaaggactatgtcatacatttggctcagtaacttttttcttgttctcttttccctttttgaaacatcttaaggaaatccgagactcatctattttcacgtctacacactttagcatgcacctcaatttttccaaggttagctccaatccctcctcccacgacacatgccccatctccctggacagaagtaatgctttagtgctttcagtctccacccagatgacttctgttcttcaattacaaaacttagcattttcagcctataattatttatattgtttttttcttcctcatttcaccaggtttttaaggaaaatgtgcagacacctttatagctaagcacggtgatctgaaaacagcaatgtgtttgtctttcgagtatctgagggtatttttaatgattgcaataagatgcatttactctcaaaatggaatatgttgtggttcacatttcctctgaggaagtcgttttttcacaatggagcatatttttgatgcataaatacatgcacaaaataggtccaaatggatactaagtaaaggccccagttattatttttgatgggtattgagtctacatttatcgatgacttttcagtcatagaaaaaagagtgtccaggtttgaagcgaatgatttgaactttaagcacttacctgatttaatttgggtaaatcctttgcattctttgacttagatttattttctggagtccacagtctcaaataattacgattttcttgggaatttgctctcttccctacaacccaaatgtcaagaaataagtgcttacaggccaaaaaacaagtgtacaaccagcaagaaggtaaacatatagaagagaatatccttacctttgtctggctttaggctcaccgtaacaaagccatcatctgcaccctgtttgcttctgctatccaatccaacaactaccaagaaatggttcagaagaaaaaagtagaatgttatataatatgaccatggaattagcatttgtagtggaaaatagaagactctctaagtagggttgcctgatttagcaaacaaacaaacaaaaaaaaactcctcaaaacaaaacaaaacattcagttaaatttcaatttcagataaacaacaatttttgggggggataagtataaccctgacattagaggggacatacttatactaagaaaattattttgtatctgagattcaaattttactacatgtcccataattttatctgacaacactatctccaggtaaaggacctccgcagaattctttctcacagctggggttcagtgtacaataaaaaattaatggagggtcaagcagcgtggctcatgcctgtaatcccagcactttggaaggccaaggtgggcagatcacctgaggtcaggggttcaagaccatcctggtcaacatggtgaaaccctgtttctactaaaaatagaaaaattagccggatgtggtggcacatgcctgtaatcccagctactcgggagactgaggcaggagaattgcttaaacccaggaggcagaggttgcagtgggctgagatggtgccattgcactccagcctgggcaactagagcaaaactccatctcaaaaaaaaaaaaattaatgggataatgccacatagcctttagtacttaaaaaatggtagtgcttgccccaatgaatgttgatttctctcctgtcttttctacattatcatttaactttgcatatatgagacagattttttttgccagaccctgcaaaagatccagaactcactctttcaaggaaattaaaatctatgttggcagaagagagaaaattttttttttgctaaaatgttacatgctataaaactacttcagatttataatttggtacttcaaaaatatgacttttaaggaacccacttataactgttttgtcttcttaaaacgagacattacagggcacatagggacttcaaaatagagaggtgtacaatgccctcagtttcccatgcagtttgttggctgttagggtgcattccagcacttcttcaaccacccaaagctggctggtcagacagagatgtggcctttactgtattacgtgtcaaattaatctcagtagcttttaagacacagtgaggaaagtgtactatgtgttgttgggaaattcctcccctcttaatgttgaaaatgatgtaggcaacaagtggatttttaaaaaatatttaatgtatggtaagtccatgcaatggatactatatagccatttaaaaaccacattttcaaagaaattttaatgacaaagtaatattctcactggatttcaagtaaaaaaagcaggatacaaaactgtataggtagtttgatcccagttctatatacatatatctgtggtgtgtatgtgtacaatttgaataaaaaactgaaatatttcaaggtgaattattagttatctttatatggtaagattctaagacagttttggcttacttattttacccgtacctgaaacatttccatgcaaagcaatagcatctttggcactggaaaaccttcttcaaaaagcatatttcaatgatattacatgctattggcatgtgaccatttctgaagcatttctaaaacaagagaatccctttctgagatgtatgtctactaagaaatgtgtggagaacattttgtagccagaatgtgactgctaatggtattaggttggtgaaaagtaattgtggtttttgccattacttccaatatataatattaagaatatgtaggatgcactaagacactatgcaaaatgtcttattacattctcttattaggtcctaattacacccaatatgatagctatcatctccattctccacacaaggaaactgaggctcacataggaacctgcctgcactcacctagacaacactatacatagctagtgttctgtccaaagctcctaccctcaacttgtattgccagtcataagactgagcctggctcactctctctacagaaatcactttggtgcttacagtctaaaagtaaggtctcttggtgcaggtctctgttgtgcttatttggggatggcaaaacttaagaggcaaaagaacccaggagaaacctacatttacttttggacttaggtgagttgataaagttgacctaatgatgaattagaaggtaacttactgcagtagcaagccaaaagacaatgctagattaatgtaagacaaaacagtatatgaattaatatataaatttggagacatatatgagttgaatcacatctttgtagacctatcatccacagagagcaggagccagcatatgtcttttgtaaaggaccagacaatgaatattttaacctttgtaggtcatactgtctctgttttagccactcaattctgcagcacgaaaacagccataagcaatacatatataaatgagcttggctgtcttccaacaaaactatttataggcactgaagtttctatttcatatacttttcatgtggcaaaaatattttacttttgatttttaaaaaccatttaaaaatgtaaaaaaccattcttagttcacaggctgtaaaaaataggtggtgggctggatttggcccacgggctatagtttgccaacttctgctatagagcaaacacagatataagagaatgctttctgacagaaatgctagttccaattctggatggctgcctaacaggatattattaatgaggctgatcctggcagaaagagggcagcaaagtatacagctctataggacacaagtttcctaacctactgggaaacaatgtacatgtttccttcagtgggctgaggtacctactgcccaatagttgcctaatctcaaaaactggaaaggaaagtaaccaattaaggcaaccatatttacatacttctttgattgactagctttggaggcaagtctttttccaataatggagggctcggtagaaaacaaatatagtatctttggtgagaaaagtcacttaccatgtgtacattctggggtaatatcttcaaagaagtactgagttgcttcaaaagcagaatctggttcatcttgatcagaggatggctctagggaggggaggaaacatagttctcatattggtagggccatgatccagtgaaagtatgcttaattattaaataaaatgacataagtggggatgaaaagctaaagttacaaaggtgggatggggccttgagtgcctactgtctctaaaccttagtggaggaggtcactaactccatctaactccaccttcccttttaacaaccccacaccaaagtgttccttcatattttctgtgttatgaagaattttccaagttgtatggaataatgctatattaacaaaattttaggaaactgtacgctataaagagaattcccaaatctagttttatcctacctctattgttcgtgccaatctcatctcatttttaaaagtatttgctagatagatcccagctggtaccaaccttgtttaaaattgaaaaaacctcaccattttccccacttgttcctgtcaatgttcctacgctccttttctctctcacaatccttgtatcccaggtgttaccaagtgctatttattctttcttttgcagatgcctgcctgctcttttctgttaccacaactcactcttcacacaggtaaatgactatacaatcaagtgcatgctgattcaagaacttatggaaattgtcattgttcagttagttcttagtgactcatgaatgatggtgtatatcaaaaagaggacgatcaggttacacctaaaacagagacttcaagccaggtcatggttacagacacaagtactgctccatgtagctcactcaccaggcaagacgtgcattttgtacaggagtttgagcttctctgtgaggtccccatggcatgcagcacctagaagtcacataagtaccaatgtgaaatgcatcacatgtgctaataaactccaggcctagtgttcctctaaaaagtctacttcatacacattccaaccaagacattgtgtggtgaaaggcctggccaggacctgtttgggttaacagctcaggaaccaggatggttggtttcaaatcctctgcatgtactacatactgttgggagagttaaaccctctgtacctcggtttcccctctgtaaggtgagatgataatagaagattctaccagtgatcttgatgtcaggactccacgaaatgtcagaactaaaagtgttaaaacatataaagcacctagaatagtgcctggcacctaataaaatagctttattaatgagaaaggtcatgtgattggggcacaacatcttaaataactattagagttcagaaataatttcaagatgtgttttgatatcacttcaaattactcattctagaaatcctttttaattgtttttgagctcctaagtatttccttaatttatctgaacctattggtcattatatcaccatagcttcaatcggaagaatcctgttgcttttcccctcaaagtccatatttattgctagaaccagaaaatcctttgtaaatatatattctgagagcacctaaagataaatgagatttggaaaaagaagaaaaataggaatcatagaatctgggttggaagggaccttacgggttatcttgtctgaccttccacttaatgtaggatctcctctcacacaccccagtgagacaggactccagcatctgctgaaacattctcaaagatggggaactcaatacaaccagaggcatttcattccaagctgtattctttaaatactgaaagttcttctgtaatttttagtctaatgacccttaaaacctgtagtctcaactttatgaagtccgtgaacccctcaaaatgcaaaattttatttatgttcatatgttactttggggaaagaaaatgtccatagtctttatcagatctcaaagagtccatgactcaaaaatggtttagaactactcctctttctcttatcccactctttaaagcaaaacagaatgggtgtctcaactcttccacacaacaatccttcagattttaagaacagctgtcctgtcttcctcaagcttatctttttgggccaactttatcttctcagattagatctttccaattttttcaattttctcatatgatgtgatttgtttatccttccctattattatccacatctaccttatatgttaatttctcaatcaatatccctctggaatgagttcagaagcctcttgaccactccaggaaataggggaactgttcctgactcttccattagtatagcctaagtgtgaattcaactgttcacactctcacagtggagtttcttaatgatcacatggttaactaaactcccggatgtttgcatgattaataaaactaatcatgaaaataatgacggacattaaccacccactctgtgttaagccctgtgccaattacttcatatgtataatcccacttatatctcataacaattctataaaatgggcacaattattactcctattttacagataagaaaaattgggcttattgaggttaagtaatttgttcaaggtcataagtgacaggtccaggatttgcacctggatttgtctgactctagattccatgctggaaaccactattatactacatgcagacatcctaggtagttctttaacaattatttctttaaaagtagaacttatatttatccttatcaattttttttcaccaatcattttgtaacagtgaaacagcaaaagaaccaacataactaattcaagttttgtttaagggacctttacctgcatgtaggctaggataattttagagcactaagataatatgcaaaaacagcaatcatgtagttttaaaaattaactctgatattgaaggagaagtatgcaaaaaaccgttttgttaaagatccatggtagcattataacctgactgaagacaaagaagttcccaaccttctcggacccctgctggtgcccagatatctgcattgtctgtcacctcttgatcccaactgcttctcattcccctgcccttaacacaaaaagagcctaaaatctgtactgacataagatggtagtttaggatgttagtctgccattttcgtgatttgctggctctcagaataaacctggttttcttcccacccaagaaactcttgtctcttgagtttgtttttcgagtggtgagcagccaaacctgggttcagttataatttctgcctatcataatttttaaaaacctacttttgtcacctaacatacccttggctatctcttctaccttcatgtggccccacccattcagtaagtgtactctgccttcatggttcaaggtgtccgctgagtccagtaggggagaatgagtaataatcatagtgacaatcataaccaacatttttttgagccagacacacttctagaactttacttgaattgtttcatttagttttgatggttaactctatcgtgcaaataaggatgcaactgcaaagagtccaaatactgggtccaagggtactagtgaatgctctctcagttgaaatgaacttattgcccatcacacttttgggtgcagtgttcagccagttacacaatcaccaatttccatatactttcaccttttccattggtaatgaattatttatccaatgaccggctgcatcacaactcattatgctatgtttataaactctaagtttcagccgcactgttggagaaagagatacagctaatttatggcttctgacagaaacccctcatttctttgtttgtttgagatggagtcttgctctgttgcccaggctggagtgcagtggcacgatctcggctcactgcaacctctgcctcccgggttcaagcgattctcctgcctcagcctcccaagtagctgggactacaggcgcccaccagtacgcccggctaattttttgtatttttagtagagacgggtttcaccgtgttagccaggatggtcttgatctcctgaccccatgatctgcctgcctcagcctgaaacccctaatttctaattccacaaagaccatctatctgtttagtaatttctagagggatctctctggggattgatataaaattactgatacatgtttttcagaattcattttttagtttttctttttttttttttgagatggagtcttactctgtcgtccaggctggagtgctgtggcacgatgtctgctcactgcaatctctgcctcctgggttcaagtgattctcatatctcagcctcctgagtagctgggattatagggacctgccaccacgcctggctaatttttgtatttttagtagagacagggtcttaccacgttggccaggatggtcttgaactcccgacctcaagtgatccacccacctcggcctcccaaagtgctgggatgacagccatgagccacggggcctggcccattctttagtttctttaaacacagacagaatttctcatttctgcttgactttcccatctccataactataactgaccaatgtaactgacaacagctctgcaaccacatctgagagttctcccactaatctggggtatagtttactttgcccaggaactcaactgcattttgaagtctaaatattcttttccagtgttttctctatgctggacttcaagactctttttccttcttgaagattttcaaaagcattctccttactggagttgactgaatttaagtaaattaaatatttttgtttatttctgtcactttctacatgtagaacccgtctcttttttctcctctttatttttgcccaaaggttttttttttttaaatatctcttttgatggatacctatatgacaagcagtaattaccctggaagtaaagaagattagcatagcgtcaaaggggtctttagtgttatctgatttgtgccactttttaaaaaagcagactgtacttatatatcacttgtgtaactaaaaattaatactgcctccttcttcctaaaaaatgcccttttgttatcctcagtacagagtagtgagaaaaggataagctttcaggacagatagccattgttcgaatcctgggtctagcatgtattagctgtgcctctcatttcagttcaataacagatatttattggtttgctaaaaactaatgttccaacaagttactttaacttttctgagcttctatttctttagctaaatatggagataatagtagcaagcaggtaggtaacgaagcataagagtaacagcacaaactgtgcctcttgagtacgtggaatcaaacacaaactttatacttgcatgcccttagacaaattaaatgcatgtgaattgtgcacataaaaagcattagggcaatgccaggcatgcagtaaatgctgtataaatgtcagttatcactatcattattacacctaagagctgttgtttagattaatatagtaaaagttctaaagtatcacaacagtatctgcactctaaataaatgcgagttctcccatgtcccctcttttaagcgtatagatgagtactttatacaatttttgttttaacctcaacggaccttacctacatatatcccttccctttttaaaaaaccatcagcttcctctggcctttatgtcttctagatataactctcacagattaaagacgttctttagaaatgctggctctatgcctgacattttctctttccttgggtacttctttttaaagcatatggcccaaggtcatagagtagcacaattagaattttaaaaaaattgttcttacctcattctggcataatgcctgctatactctcaaccttacgtcaagtgggccaggctccactaccatgaagcttttgtgcccagttataaaaagaacaagagtccaaaaaggcagtcatatgcagggcagtgagcaaaccagacagggagctggtaggtagctgccctcatgctgtggtgaggtgtggggtgaggctgggcctgctcctgctggaaggttcctcctcccagcaaaagggagagaaaagacttccatttaggccgcagggctgctgtgatgctcctttattaaaaacatttcataatgttttatgaaagtatgaaattacatataaaatttactatgaaatagatgttttatgcaattatatataatatattcaataaaatattctatttttttttgtcaaatagtagtaatccaccaacccaaacatttgtctcttgtaaaactatctcgtctgtggtttcagtgtttatgttggcatttcattgtcttgtgaattctctaataatgtacttttaactagtgttgagggctgtctgatgtagaggcaacgatttatccatatactatgttcatgaaaaacacattttataatcagtttgcaaacctccccttgtgcttctgtagccctgagggcagcatgggcaacactaggcacaactccagcatcccatcccaactcatgcaatagtaccacgtccttacttagcccagagacaaactcccggaagttaatcaaagagtctccattttcatctaataactggaacaagcgggaggccagaacgtcagagtgagttccacatgcccaaggaaagagaagagcaaacattcccttgaactgctcgaagtcaatgcgatactgttccaggtagggcaggctggggtcatgccggtccagcgcgttgctgctcccgccccagtagcagctggtgagatgttctgcctgaaaaagaatggatgatcactggggaccctcttttgcagcaaataccagaaagaaaacgcccatcctccagtttggaaagggctttaggtgaatctgtgtgcatcccctggggcagggctgtggcctcagggcccccttggtctcttagttctacatacacctccacttgaccagcccttcactgcctccacaccaaccacttctgcagtttacatctggaaggtctgcttcaattactgggtgtaggtgaagaaagaaagggaactctcccccaccacattctcttcccccttacctacacactcacatacattttagaactaactcccataaagagaaagaaattttttagcttaaatagaatgctacttgaaaaagataggaatttaggtaatgtgaccgccttgttttctaggtgacaatggtaaaatccagactttatgtggctcatatgaggttaaccaaccagttaaagcagaatcatgatgagattttgtgtttcttaactcccgctttaatgtcccatgtatcatacataaccccctgcttccctgctcaccaaaatcacataaataagatcacagtcacacagtattcaacctacaagtgtgtggtcatccaatttcacacatctgtgaatagctctagaaaaattatcagcgtaggaaccactccggcgagcagaatagagatccagacccagcaaagggcttcctgttgctggccttggaaaaaaggcagcctctttattcatgaggtcatggtgactctggtagaaatatccactccttttaggaagaccacacaaaaaagcatgcgctagaaagttctgaaagaacaccctcaaccccacacaggcatttatagttaactctgggtggcaggtgggggagaaaggaggagcataaaaaggaggacttcgtttttactttttccatattgtattgtctgaatatttcactataagcacgaataaatatggtaatagaaaaaaaaaacacctttggccaggtgcagtggctcattcctatattcccagcactttgggaggccaggcgagaggatcgcctgagcccaggaattagagaacagcctgggcaacatactgagaccctgtctctatgaaaaaaaagtttaaaaagtagctgggcatggtggcacatgcctgtagtcccagctacttgggaggctgaggtgggaggatagtttgagcccaggaggtcaagtctgcagtgacccgggatggtgccactgcactgtagcctgggtgacagagtgagaccctgtcttaaaaaaataaaactaaaaaagaagaaagaaaaattacttttgaaaatccttctcttttccctagggtttctgaaaaagaggagagtcaattgtgagtatgttatatttctattttgctctcccttagaaaaggagcaaagaagatcaatgtcttttcacaattgtttattgggaattgtagtgaaaaagctaaaaagaggagtgggagtagggaagagaggaggaaggagaggtggtgagcagaaccagtcaggttttttgcaaggcgaccttgagagaataaaggaaactgtgtcaaagttccgtgggctttgggactgcattcctgggactgcattcctggctgcagggtggaggcgggtgtgtcagtggcagggaggcagaagctgaggtcagagtggcctgctgggttgagctgtactctgaacgagcatgagtggagcccagcagccctctgtgggcagcatggtgttggggatatattccgggagggaaccccttaacctgagctacatcggttgacaaaggttacccaaagcatttcctcctaagcaccccaagttgctctgaacctggcctgaacatgggtgcaggcactttcatggtgctcacaaccattaggataaaacatgcccttcagatcatctcccttgttccttgctgagagcccacagaccatcatttggggactatgggcccagagattgaaacagaagggctaatttggaaagagttcaagagaaaccagggcaaagggcccctgaaccacattttccatgaaatctgccttaaggtgcattctttaaccttttctcctcaagttctatccaaaagtctgtgcagtaagctccttgggaggaggactacatcattcctttgtatctccagaaaaatacccagaaatcgacttccttaaaaaaaaaatttaagagacagggtctcactctgttgcccaggctggagtgcagtggtgtgatcctggctcactgcagtctcgacctcctgggctcaaacgatcctcctacgtcagcctctgggctacaaatatatgctaccatgcctggctaatgtaaaaaatatatattttttagtgatgggtcttgctatgttgcccaggctggtctagaactcctgggctccagcactccaccctcccacctcagcttcccaagtacctgggattacagatgtgagctactgcacctgtctctagaaattggctttttaaagtactaagaagtctggcagggtaactaacacatagtgatgacttaataaatgtttgagaagatgaatgagagccaattgaagtgttgcaatgattccatgaagtgtccataactgaagttttatattggattctttagtagaagagactctgtcccacctgacaccaaccgagtctcaggttcttctgggtcctcaatacagctgaggaacctgtgttttcaacacacccttagggcagggttttgagtataagaaaactgctttcctcagcatattctcagggttcaaatgacacggctgttatctgaaggtacacagaccagagagcgcagcagtgcccaggttaagatgtggtttcagctgggcgtagtggctcatgcctgtaatcccagcactttgggaggccaaggcaggcagatcacaaggtcaggagttcgagaccagcatggccaatatggtgaaaccccacctctactaaaaatacaaaaatcagccaggcatggtggcaggcacctgtactcccagctactcgggagcctgaggcaggagaatcgcttgaacctgggaggcagaggctacagtgagccgagatcgtgtcactgcactccagcctgggtgacagaacgagactccgtctcaaagaaggaaaaaaaaaaaaagatgtgatttcaatgactaccagatccaggacttctgtacagccagccctggtcctccttcttttgctttccccgagtcagcctcctctgtccgctgtcacagtcctttctcttacctgtccatgctcttgctgcctccagctgctacttccacttcgtttagctccccccagaatcctggccctgcccccatgccctgagaacgtttcttctggtcctcagcatcccttaaaaacctgatctgaattgcatcattgttttctcctgccttacggatctccaacttacactatgtggaacaattagctacaggtgcttaacatgtacgaataaaatattcatgagctggcacaccacagagactgcaccctcaagtgccggatgcaggctggcaggggtgccactgtccactctgttgataatgctgatgctgcaccaagcgcaccaccaaccagcctggacacccggagtgcctccatctttctgggcttcggtttcctcgtcagaaaaatgcagggactgtgttatattgagaactaatcactaatttatctattaattcaacacacatgtttggaacacctacaaaggcagagactctagtattagtactagtgcactttaccaggcactagtgacaccaacataaataaaacagtggtgccctccagtggtgaacaggcagtgggcgacatcagcaagggcagtcctaagcaaccacattttctgactgtaagacgtagaataccagtgttctagtttttatgttcgtttctatttcctcctgtactatctttgcaattctcaaaacagccaaatttagttctgatggtaattagaaattgtgatgaaattggcacctgcataaaaggcatattttaaactttttttcctgttgattatcacattttaacctctgatgctgatgatacctatgacaaaaatatttttttccaaacgaaaaaattgtactttgctttatttatgaccataatactttcttattaagaatcaagattggggccaggtgtggtggctcacacctgtaatcccagcactttgggaggtcgaggtggaggtcaggagttcaagaccagcctggccaacatggtgaaaccccatctctactaaaaaaaaagaaaaaaaaaaagaaaaaagaaaaatataaaagttagccgggtgtggtggtgtgcgcctgtaatcccagctgtacctgggcaacagagtgagagcaagactccgtctcaaaaaagaataaaaataaaaaaataaagattggtaggggctgaattaggaaaggaaaatcacagaaatttaaccaattatgcttttccttgggcacttaaacaactttattctaactacataagggtgtttttatagcttaacataggcaatcacaatttgcaataattcaagcagaacttaaacttgatcaccattgtttttaataagtattatgaagcaataacctatttttttaggttcaagtaaacaactagaatattatatggagtgcaaggtaactaaaacatcaacttaaattggttataagaatgtttattttcatattaagtactacagttttgtactctcagctctagcttcctatttatattatcccttaatttaacagaaaaatcaagaactaactgaattattaaggtgaactcctttactcctttgaatgggcatgaatttaccttgcaactcaccttgaaaagagcataaagttcttccagctcatcaatggtaaaggaagtttctgtcacaatggttcgtacctataaaaatattaagcaaaatgaatttcacaaactcaaaaagtgccatgctgggaaaatccctaatttttccctttcaaattgttttcagttctgtcaggcaggaatccacagccagcaggagtgtgaagaaggaagatgacagaggttgcctgctacttcttaaaggacttaccacgttgcgtttcgtagtatcctccagcgtctggatcactttcagtctctgtttgaatctcatctgttcaatcaaatctgcccggatagttccgaatttctgtaaaggagcaatattggtgtctctgaaaaaatctcttacagcacacaatgtcctgtctgcagaatgcctgcaacacactcttgacacatcaaagaaatgacttctcatatgatgggcatcctacagtacacctttagctactgttttaaagccaccgagcaatcagaaataaatatctggaaattctcaggcagctcagcagctgaattaaatttcagagtcaaatgtattttccttaagtcatcaagtttgtcaagaagggctaaataaggctacttgtgtatgaacaaatgcttcaaagaaagaatcttctcaactagcagaaaggtctaaggctaacaattagactagaagattggaagaaacctccaaccctgtgtgagtctccctgctcctgaccagtaggttcaagagcatttgtccatctggcccagaaatgcatgctatgtgtctcctgatggcagacactgtgagctagccatctcttcaagctccttcgtaccccctaaatgtttgttgtcaaaagccaaaccagtctttctatctgaaggcagagaaagaatttgtaagattttatatatcttagggatgcaaaagaaagacaaagaaaccctggttaaagtatgaagcttaacccatggaagcagtgactgcaatagttaaatatatttggaaaccaaaaaagtatctgagacaggtctcaatcagtttagaggtttattttgccaaggttgaggaaatgcctgggaaagagatgcaagtcacaggaggctatgtggcttgcactttttccagggaaggtttttaggacttcaatatttaaaggggaaaaggggcaacagggggaagaaaggggaaagggaaaaaaagagggagggtatcacatgttgtgtgaaaaggtggggaagagggaacagtcaactctgcatttgtctggcgctcagtaaatctgcactttacataagataaacgtagaggaagatgacaaatatgaccttatcttagggtggtggggtgggggggggagtaggtgggggtgatttctagtcttctgtggtcttgtacctgtgaagagctgttaatttacattgtcagggtgagggaggcccccttgggagacatgaggccgtctatcttgcagctatctgtctaggaacaaaaggaaaggcagctttttgcaagactcaatttccaagcgtaacttttccctttggcaaactgagtttggggtcctgagattttgttttcctttcgcatatttaaaggataaagaaaaagctgacaaacagcatcgagtgttggtaaagatatagtgcaaccaaaactcttatatactgctggttggagtatcagttgctacaaccgttctgaaaatctgtctggcagtatctactgactgaacattctcatattccactactaagtatataacccccccaagaagcatatacatatatgctatatatatatagatttattttactttaccgaaagacatatgctagaatattaatagtgacactattaaccaaaagtcagtaaccactcaaatgctcatgcacagaatggataaagaaatggcaatatcatcacataatcaactattttgcagcaataaaaagaacaatatatttaaatcttacaatcataatactaagcaaaaaaaaaaaaaacaaaaaaaaacagaagcaaaagagcatattccgtgagattccatttgtatcaagttcaaaagaaatcaaagatcatctacgcttttagaagtctggagatttattaaccatggttggatggacagtgatatgaaaggggcacaaggggcacttccaggttgctagcacgttctatcttttgatctgagtaaacagttacatgagtgtattaaaacagaggctttaaaaagagtgcctttgtgagcctttgacctctttatcaatacctactccccaggaatttgcaaccatttttatcacctccactttttgttttattgttgttgttaaaaatgaactcagtatgtttaataaagtttggtattatcaaaatcgcagtacaaacatcaagtcacacgcccacatgacagaattccatttataaaatgtttctcgggaagcccccactgggcccgtgcccaaagagagcctgaccacagcctggggtctctgggtgggcagaaaaggtgagtatgggggtggggaggaactcggggtagggggaggagggcggagaggaaggaaagtggagaaaaatgcagactcagaagcagtccatataacagctcaaaaagagctagccggcgatattatcacaacgatacagtacaaatcaaagcaaaaataaaaataatttggccgatacagcaggctacactgccaagaacccagatggcggccttcctgcggccatccgcacgggcctcctcaccccccatctctcccgtgcgcccactcgcttccttctcgctcactcgcaggcactctctcgctaggaaacacagaaagtattttgtgtttggagatagtaaccttagtcaaatgaatcttccgaagagtcgctgaaggaggaatgcaccttagcctctcgaagcagcaaacaaaaccactgcttcctgctggtggctggcttaggtttcagagtccgggagggggcggaggagggggtgtgtgccaggccctcttggtcagctaggggccgccagctgccttgctgtcctttgccaccatgccacacaggagggaaggcatcagtttggagctagccggaggggccttgggcgggccactctccttcaggaattcttcgtcttcctctgagtctgtattgtaagagtagctgctcacttcggaggcaaacgcggaatgggccgacttgggctggcctctggccttgaaccccacccctatcttcctggctttggcggcccttttgtgtttaccttctctggaagatttcagagacaggccggaggcccttggccagcaccttcctgtccttgcccagcaggctgtcataaggagttaagtacttgctgcagcccctgccagtttttgatttccccccagcactgtctgaaaacttgaagggtgacttcaacttgtcctgcttggtgagggagagggcctttgtcgagcttgcttgccaactgctcctggtcgctgtccatcttcttcttcttaatcttcagctgacttatgaacttagacgaagcctcgtgttcatcccaagtctggttcctctccctggctttccctgttccaataagggcattgtgttcctccttgggccctttgtgtctcttccttattcctgctcccagctcatagtcatctgatgtcggcagagatttgctgctcagctttccgctactgttgcagttcttccccctcttgcgggcgggcgacagggctctcgggggcgtgggtctgtttccacggcctgcgtgccaagcttccatgggactcctcgtgcctgtcctcggagtcccggcgccgctgcagcttcaccagctcatgctgcttctccttgtactggtgctggacctcggcccgccacattctgaagtccagttccaggacgtccatgtcctccacggaggacttcatggggtacatccgctcctccttcttgcgcatccagctgtacttattgtgggcttcagctcccgtgggagccgcaggttcttgagcgggtcccaccacgggcccatccagcacctccctcagcatgtggctgccggctgccagcaggctctccagtgagggccgagccaccagggcccgctccgcacctcccaccttcttgctcctcctctccagctccagctctgcgatctcgctcagcagggtgatgccgtgcagaaagctctgctccaagacaaggctctcggcagcttcctgcttctccaaggcctggactccagtagcacctggggagggcagaggcctggcctggggcagctccatggccacctccatgccagccagtgggtcttccaggccgggcaggaactgctcagagcttgcctcttccaggtagcaggtgctgccgggcacaggcacggcctcccggggctccagtctcgggcactctccctccccggcgggcacgtcacagtctgacatttctaggctgggctggggctcgctcagggccgcctgggccaggccttcctccggcgctgcctctgccgcaggaaccgccacaggcacctccactggctcctccttggcctccactagcgtctcgggtgtcagctgcacccccaggtccaatgcggccgtgcagggttctgtccggcccggggaatccacgcatgcttcaggcccctccgcaaagtctgggcactcagagggctcggtgcagccctgcccggtggcactcagcgcctgggcctccaacgggccacctctgcatccgcctgcagggctcggggtagccatggtttccatggcgggcagtggcagcggcaactccagaggcggcagctctgcggggcgctcgtccacatcctccacctccaccttcgcctcctgttcagccagcggctcttcctccgggtcctcccgcagcggctctgggatcttggagggggacaggaggatgagcttgtcttcgggcgagagtgtcaggcgcttggtcccatcagctgggagcagcacatcaggggccaggccatccgcatcggcggccactgtgggctgccccaggaaagggtagggcctcccgtagtgtggtggcagggcttggaacggatacctgggcggcatatctgagaacaaggcctggaaagtgctgggggcttccttatccaactccaagtccttcttctcgaccacgttgtcgggggtctcttccttgcgggtgatacccggggtggacagcagggagtggggaggcaggctggtggggtgggagctaggggtagcagggtaggtgtaggcaggcgccttggacacgtcctccagcggctggatgaccttggccttcagggcggccatgggggacgcgcggggcgatggcggcgggctcaccgccttgccatagatgctcgcagggccggcagccaggcggggggctttcgcagcagcatcccagggcaagcggtggccaggccagccttgcccccggcccccaggccccagttgctccacttctcctccatctctgcctggtactcctctgcgccttcagccgctccagctgggtgcttctttgcagttccagggcctgggccgcccgctgctgcaggtacaggaactcctgcagctgcaggaagtgctgcagcgaaaagagctgcaactgctgggcctggtgcagggggctgcagcctggagagtacagggcggggcaaaggggcagcacggtggcccgctccatcagctccgcaaagtgaggcaggtgatctctgggaatgaccaacagctggcccgactgggagtccctgacaaactggtagggcgacagcagggagcccccaggctgggtgggaacgcaggggccatgccctagtgcagagatggaggtcccaagccccaggggtgtccggcaagccacatggacatgctgcccgagcgggacaaccaggggtgcgtggccagatgggttgcggggtccacagaccagcaaccggagcctgccagcactgggccccaggtcaccaggaggttggggttcaggcctttaggagcacagctggtagggtgcacgtgggccaggtcagccagctcattactctctctgagcagcttctcctgatctcagtccagccaggcccccagcagccattactcctggtgtctggcccggtgtccacacagtcctcatctgcttggctgtgctctttcacattactcagtgacagagggtgctcctggtctgccagcccaggccccagccagccactgctgccactatccttctgcaatgcccacaggcgggtgtcgcacttctgcttcaccctggacaccagagcccgcgcatccaaatgccttggcactctccggcctctctgggtcgcgcttcagctgcgggcccctgcccactgctatcatctccacttttaactacccctaagccactatcctctcttgcgagagcctctatatacatctccgcacttcctccaggcatgcatcattatcttcccccagtagtaagaatggttctaaaaccagagtcagacaacactcttcctttgtttaaaattccagtgatttttcatcctctcttgggataaaattccaaggcctctaagcccttcatgctctttccacctttcacaatgccctctctgaccagccaccaccaacctcttcttactcattagttctagtggcctcttcatgttccccaagtgcatcatgcaggctccctgccagccacggcctgagcaccggctgctggctgccccctctgtgcttctctcagacagcactgtattcggtcctccatggcatctgtgtctctgctaattgtcatctcaccagaacaataaacgctcagagaaacagtatgtccccacccttcactgtgccatgttccttcttacttgaatttagcaccactttgcatttgtttttgtttgttggtttgtttttgcttagtaaatctatcaccacttactctatggcagagactgtgtgaccaggacatgagccgaggacagtgctgattcacatgtaagtgctcaacaaatatttgctgaacttagggggtcctcatgatcattccaggaagtaagtgctcttcctatccccatttcagagacaaagaaatcgtagtttagccaaaatcattaacttgcccaagtctacacagctggtaagcagcaaagctaagttcaaacccaggtcgtctgatttgagaactcgtgctcttagctccatcccggggaaactccctggcaccttacctttctgacttgctgcacagcacagtaggcacccaataactggctagggatgccagattcaatgaataaaagcataggaaatacaggatgcccagttaaatttgaatttcaggaaaacaatgaatacttttttactataagtatatcccaatcaatattaattaatcctgtatttttttctgacatccctataaatagcaccactctatagatcagtctgtgtagtggactctaaactatcctatttcctaagttggagtttacagcaaaaaagactatgcctttctagtaccttttactttctgttttggaaggactaatccagggaattgaaaggaatgacccaggcattcctttcagataatcagagcaaaagagtacactgacatctctgaatcttcccagtccatgttccaccagcaatgtggtgagtgggtctcaaccttacaaaagcaggatttatggaagaaacttcttatctccaaggaagtgccttccaaaggtggaatcagattcttctcaacaatgaagatgcaatatttatttgcactgaaaagctggaattcaagagttagtaggggctgccattaatgatgaaaagcaatcatatttaattcactatggggttttatctttggctaggaaagaaaaactttcaaggaaggtaagtattttgatccaaacagaaaagcagtgagcatccattgcaaattacatgcctactgatgaagaactggatttattacttcaaactgggccataggatgcctgtgatcaataaaaaacactagctgtgagacagaaggaaagacagttttattgtacctacaattgttagggacattaacatgccatctcatttgcaccttacaataactttagtgagtctagactgctacctctgttttgcgaatgggcaaaccaaggcttggagaggttaattaagtcccccagagttccacagtggctgagctgcaagtggtctgaggctcagataaatagctctgtaactccaccaactaccattctatcataggcagtaagttcttccttgtctctgggttgaaaagaacataaattttggagctagacaaaatttgattcaaattattgttctttgactaattacctatgtgagtgggcaactcagttgaatcttctgaccctgtttcttcctctataaaatgagaccccaaagctgtccttgtaaaactgtgttggagataaagttccaataatagtaactaatattaaacattggctttgtaatcttttgcagggtgccaagcaaaagagctatttcctcacaagcctgacattcaaagagccccgtgtgtcttagatctaattaatatcaactagaaatggattctgctatttgttaggcagggccccttcctcagccaggactctgcaacttgccagagacagaacacagtggcccttccctctggagcaaatggtcccaacctaaatgtaaaccgtggactccaagttcctgcttggttatttctggaggatttgtaaaggaatgtgaacaattagaatgacatgggggtctctccctcccccgactttggggggggtctctccctcccccgactttgggaggggctctgccagaattaaatgctaaaaataggacaaacaaaacttggctcagtaaatgctgcagccaacacttcccattacccaaaacaaagacacaggtgtggatataataccttctctcaggcaccacatattccagttccttgagaagtgctagttcactaatatcacaataatacttgttccagcaaacagaatttgtgctggaggtgagggagcctataattattttaattttctaaaatttcccttccttaaacaataaacacaattatccatctttgtttatatctcttatccaactcaactattttaaaaattttgttttgatgtaatccaactcaattcttatctgaatgtttctgtggcctgtttctaatttttcagtttaatttctaacatctttatgagcagaaaggcagttttgttgttgttttttttttttttttttgagacagggtcttactctagtgtccaagacggagtgcagtggcatgatcacggctcactgcagcctcaacctcctaggctcagatgatcctcccacctcagcctcccaagtagctgggactacaggcatgtgccactacgcctggctaattgttgtattttttgtagagatggagtctccctatgttgcccagacatgtctcaaactcctgagcttaagtggtctgcccgccttggcctcccaaagtactgagattatagatgtgagccatggcacctggccagaaaggcaattttcaaagcagacggtacttctttttgttgctttgcccctgtgggtactgataccaaccaacaaataggtgtgtggcccttcatttcataccaccttcccccatcctgcctgcagatgttccctttctctcccccagacttagaacaaggaacaagtagctcagataaagcaatgaggtagagatgagtctgtctcaagtttatgttctctggctcctcccaccccaccatcattcctgagcggaacaagagttcccctgcccaggctgggcagtgtttctgtgatttactttatccttcaaagcttaccctgtgttaccgggaagacaaggatggatgaagaacagatacagatttttaaaagagactgaccacaaggtcaagctcaatcaagttcaatcagcccttcctttctaaatcctccaaagagaacttgaaatatttaaatgctacagcttaaaaaacacccagcaaagcaacaacaaagctcaatgtaggccagagggccatggaatgatgtgaatgagtctgcccaccacaggggaatttactgaaataaaaagaaggcattggttctaatatgcaaagtctatggcttatttctattttaaaataaaactaggtcatcaaattatgctcaaaatgcctctttggtgtttctgaatttgtggggttattttcccagtatgcagaatggggttcactactgttagcagaaggctgagcaccagtgacacctgagacattccttgatcagaaaaaactccaaatacttaagatagtaaatgaagctttgccttggatgactgggtgagagagggaagaaattgatggaatgtgaggctttaggtatagaaaagcctaacattacaggaggcagagcccaagagacgagagagggattctcacacacagggagcttcgaaggagcagccccacacactcccccttgacttctatgggggtggcgtctgtctgcacctgtgtacttatgtgttaggtggggagtagatgttcaggagggcagaagaagagggtgaggggggcagaggaggcaggagatgataagaagaaacaaggatatgaattcagggaagaaaactctggtggagtcccatgttcgttgaatgggtggccctttctagggtactctgatctctaaagagtctcacgccatgactatattcccatcagggaacaccctcataactctgccagaagtgggcccatattttatatttgaatacagtatttatattttacgtaaaaatatatcatttaatattttatgcttctttaggtgccatgtcttttgagatcttttgtctaccagaaagggctagagaaacagttgtcacataaatatggaaattacaaaaaacatttagtttcaatactccatgtaaactattagctgttgtgtgaacatgctgctgattaaattacaaaaaataactctaagcacagtgcccagtatcactatatttttacctagaatttattttgaaagttgctgtaaagcagaaatcatgaacaggcagccagtaggctagaaagtccatgatgaatattgtttggcccagggagtattataaaaaacagtaatcttcaaataaaacaaagagttccaacttctcttgaaaaattaaaagttctggcagcaatggttccttgcctcaggtggtaaagagactgtcaactctagcaggctccagctgtctagttccagaagcccaccctttcctaccaccttcactccctaccccattgttaagtgccttgatgagcgacgccacagtcatgtgaatttgtaattctgctctagagtattttcttttactttttctttttttgagatggagtttctctcttgttgcccaacctggagtgcaatggcgagatcttggctcactgcaatctccgcctcccaggttcaatcgattctcttgcctcagcctcccgagtagctgggattacaggcgcccatcaccatgcctggctgatttttttgtctttttagtagagacggggttttgccacgttggccaggttggcttccaactcctgacctcaggtgatccacccgccttggcctcccaaagtgctgggattacaggagtgagccaccatgcctggcctctattttctttatatacacaccaataatgtaaagttcagcctctataaaggagacatgcttttgacacctggacattgtagaaaaggcacagtttcatagccacatgtagcaagtgggacacatagcaagtcccagatttcacataaattttataaaaactgatggccctcatcttcttcatcagcaatatagggaaaataattcctacctctttggaatggtgtaagacttttatgcacacataggtaaaacaattagtatggtagcttttattattcccagcattgttgataaaagaaagaggaagatgaagaggatagaaaaaacacttttcaaaatcagcaaaacctggctaggcacagtggctcatgcctataatcccagcactttgggaggccaaggcgggcagatcacttgagctcatcagatgagcctggccaacatggtgaaaccccgtctccacaaaaaagacaaaaattagccaggtgtagtggtgcacacctgcagtaccagctactcaggaggctgagctggaaggatggcttgagcctgggaggtagaggttggagtgagccgagatggcaccactgcactccagcctaggtgatagggcaagaccttgtctcaataacaacaaaacaatctcaaaacttgctaatgttataactgagattccattaacaacgggtgagaactaacttataggtccacattttcttttgaggtataaacaaacttttaaaaattaaacttaaaattcaaagctatggattagcaaaaaatgccatgccgaaactcaccttatctgttagagacacataatgaagaatttatctgttagagatacattcttttacaggtgaaataatacactgtctggactttgctttaagttacttcaggaaaaaaagaaaaaaagtggggaggagtaataaaacaaagatcagaaaaatgttgataattgttgggactggatgatgggttaaaggaaatgtattatgttatccttttggctcatactgggcttgaaaatatctagtgctgataatgtatccccagggctgagcatgatacctggcataagaaaggtgcttatacaatcttaaataaagatttccttggttgggcacggtggcttaagcctgtaatcttaggactttgggaggctgaggtggatggatcacttaaggccaggagttcgagatcaacctagccaacttggtgaaaccccatctctaccaaaaataccaaaagattagccagccttggtggtgcacgcctgtagtttcagctacttgggaggctgagacatgagaatcacatgaaccccggaggtggaggttgcagtgagccaagatcaagccactatactccagcctgggtgacagagggagaccctgtctcaaataaaaaaaaaaaaaaaaagattttgttaatacatgaatagacaaatgctgtttcttgcatctcctgggtctttcccatatacaaccacactatcttttttgcttgtctattccttcagctctccccctcctctaatttgttgcacaggaagcagagataatgtacttcaagaagaatgctcttcagtctccagtggctgttagatgccttccaagtcaattagtgatttcaagactccctactaaccagctccactggaccagttgacctcatgaccatcggtacatccataattccatctctcttctaatccaaataaagtcccttggtcctggctttaatgcaagggagctcttccttggatactggctgccactttctagctgtgcagcttggaacaactagctcaacctctcttaacttacattttcaccttaaaatgcattaacatttacatggcagagctgtctacaaggcacccagcaccttgccccacacatggcaggctctcgatgagtaatagctattatagtaatcattaataagccagagacacattactctaagctttcataaatgcctatccatcttcacagattgtgccttctgttttattagccacatcctttccctgcttaacacttttcagactaaacacactgggctgggtcatctcgaacatgaagcagctctgtgatagctgtgtacccactttaaggcctattaacatcctcttgtgccttccaggaggggcatctcagtctatgaatcaaactttaagattgggactttgtcttctacttctatattactctgctcaaagtgcagggcttcacacaagggtctacacagaagaaaactggagtctcacaccacttacacaattcctttcaacagaggcttaggggaacttataatgagtgagattttccccaggaggtatttatgaagcgaagttatcaatatcagactaatttctagcaacctagggagcccttaactaaatttcaaaagatgaatgtgctttcagtatttctttcctatgtttcaattgtcacggctaattatcctgaagaacagaaagaaatgcattgtgtatcttagaacactcaggtgtcatgcctgagcccaaaccagattcttacccacatcagtgattagccccattctgcatccagcgcagtgaatctcaaccctcaccggacatttggaatcgccagggaaacttcttaaaatatatgtactcttgggcttcatgcctacattcagatttaattggtctgggatggagcctaggagtttatgtttttaaaagcttagcttaaaaaaaaaattaagtgatgtaatgcacagacaggattgaaaaccaccaatttaatggttaggagggaaaaaaacaatcagcaagagttcgtggtgttctctttaagttgatctacaaggcattagagagccactggaaacataagcagagtagtgacacttaagcagagaagagaaaacaaaaacctagttatcacgcactgaaagacctggtaatataggcactgatataaattaaaaggattgtctttccaggcagaggaagggaactgcggctttgtcctgtgataggatgtctggcagcctgagggccaccattagggatcagcccaagaagacgtaaatggaaatcagctgttggccttgtctcaatttctttgctttcgctttaaaaatgggcaaaatgctgacttcagcatgaagctagcttatctgctgttgagaaaaaagctgagttgccacatactaagctttaatactgttaggaataacgctcaaaaccctaaggaaattgaacacttgaacaaaagattcttagcaaagcaattttacttctgcacagaggggtgcctccttggccagttgccatgagagcacacctgaacaaagggcatgagagcctttattcctgacaccaagtcctgcccctgtaccctttccccattgtctggggtcgggttgtacaatctaatcccggttggctaaacatttgatttttttagatagggtgggtaagtaaaagaaagtagagagaaaggggaagggggtgtctgtaatgagctagaaagttagtcctctttccaaataaggaaaggaatgtgagctggtactgataatgcttggtactgaggcatgcctaggcatctaacaaaagaaaaaagaaaaaaggagaaaaagaagaaaggggtgggggggggtactacgaattaaagaataaaagattgatcagattatttgaagagaaaccccattatatcccacaaaaccttggtccagaattcttttaacaataaaggtctgaggattcctttagaaaagcaacccacagatagaaaagctcttgcttacatcatacagtactattccaaagtcctggggcgatgacttttttaaatgcatatggaaatagttttggagacagtaaggtgaaacattcattctttatctccaatagtggaaacataaattgagacatccttcatggaaattagacagtgtgtgccaatagcttgatcattcttttttttttaatctaatttttttaatccaaacttttaatgtaaattcatttctaggattctaagacaataatcagagatgtgatatttgggtacaagtttatcttagaatgctatataatactgaaaatttggaagaaatcgaagtaaatgtctaacaaaagggaactaggtaaataaattttgttacctcattaaagcagaatacaatttagtaaaatcatgccttcatataatatttaatatattagggaatgctcatggtatacatagaaaatgacagagcaagtatttagaaggacttttttttaaagtgtatgttgtaagtataaaaacatacttaagggaaatgtaaaacgcttataggatacagtttatttttttcttcctatttccctacaatttctaaaatgaacatgtattgcttttatgattctaaaacaaagtattttgctttcaatatatatggagtttcaatgaagattttaaaaaataattaccagtctttctcttattatgagttaaggacacacatttctgaaaagatttctatatccatagcaattttttttaaaagcactaaattttttactttaagagagactttctgatctcactccattcctcactatttgtctcttatccactttgttgctagctggaatatgacaatcaccaatcaaaatcacaaaacacctgtagagagcatagtgcgctcagcagaatactcaggctttctcagtgatcatttctataaaagtttagagaatcaaggatcaggaaatgaagaaaccatcaagtgttatgagcacttggggccccacaaaccaccaggtgttaagggggaaagtggcactgtggttccttcaccccaaaaagcgtattagttctgttgtgagatagagcggcagatcaggctgattccagggtcatcatggacaagaaagcatcctcccccatccaagccaagcaattttagaggaatcctaggactctggtctactctgggctatacaggctatactaagtgtctcagactatctacttcaaagaagccctaagtacttagcatgggaacagaaagcaaattgatttgtgaaggtcagcctccccatccctactctcaacagcccctacttaatctacaaagagttcaatctgagctgctactagatcaggcttcaggatgtgaatggtaaagcactggagagccacagcttgtcttgccatgtgctactatggtattagacccattaagacatccaggctccattcaatgtccatctctggaggccaaagctgtcagctagcacagaactacttacttctggccagtagttctcactgtagaaggaatgtagaagtagttctcaatgtagaaggaagcaggtaagcctatagtctcaatgtttttattccctctaaaactcatgttgaaaattaatccccatcacaacagtgttggaaagtggggtctaataggaggtatttagtgtggagtcctaattagggaaaaggagtcgggctggcaagacccagggaaagcaaaataaataaatatataaataaataatcaaaacagataagctataagtctgccctttttcatgatccagaacacataggtctcctgtgcaaataactcataatcttcctgcgcccagctatcaccagaccctgggctgacagaaaaatgcaagttagctcactacaacctcagcgttaccagtactgcacaaagccctctccagcacacagcacaagaaccatcctataaaatccccagcaaggctttgtctctttgcagttaactcctctcttgctaacttgcccattgcatccttgcaatgtactttcatgctttccttaataaatctgcttttctttacttacaactgtcttggtaaattcttcctactaccctcctgataccagcctcagatagttgccaatcacctgcaacatttaggtcatgaagactctgccttcacaaatggattaatggcactataaaaaggtcttatgagcatgggttctctctcttctgccagtgaagacatggtatttctcccctccggaggacactgcatgcaaggtgccatcttggaagcagaaaggccaggacctaacctgccaatgccttgatttggggcgtcccaaagtctagaactgagaaataaatatctgttctttgcccagtctgtggtattctgttatagcagcacaaaacaggcagcagtggaagtgtcgaatgcatggttaagccctgctcagccaggagacaagacctacctcgtaggaagttctgatgagtctaaagatgtctacctcagggtaaggttccacatcatcgctgagcaaggagtggaggtgaggaatgggaggcagtgtgctgtctttattggtcacactgtctaaatacctggaagaagaatgcatcagaagtcacaggagaagaaactggaatcctcccattataattctccaatcattttctgcaagttctacattttaaaacaaaggactagagtttctttaaagatggaaagagagaaagaaattctgttaatttctaaagaaaaagcatatgaaaataaatcctcagccacaggaagaagcgggcattatgatcaccatcaaatcagttaagactcatgaaatgaagagaaagcatgaggaagaaaaccggagatggttttcaaagttaggcttagtacaataccttcccaaaacggtcatggcctccccatcatccttgcagttcaacagtttgtccacatttgcatccagcacagctagggccaactggaatatcactttaattccttcatagaagaaacagtcaacaaccacaactgcactctcaaaaggcatcacactgagaaatagtgtgaggaaccaagacagggagatggtggaaatcacgcccaggtcttgcatgcagtcgtacagctgtgggacgtagtctcgtgctagctcctcaaagacaccttggtccaccagtgcacctgtggcagcgatgtatacaaaaaggcgcagcttagccaactacacagtgtaactaaagaatccattcaaacaacttgactgctagcacaggactctgttcctttctgctgactgttctgctgtgactgttactagaccaaggtgtcaacacagctcagtcaccagattagttctggctgcatcttctctttctgggctcttcctgtcctgttttcccttccaaaaaagaacaatcacatgacaattataagggttgttgagaaagccagtttataaggttttcgtgacatacaattagttattttgttggcaacataatgtttggtttggtatgagatgtacatccaagtacagtcatgcctcacttaacaatggagacatgagaaatgggttgtcatgtaaatctgtcatgtgaacatctttgagagtactcacacaaacctagacagtagagccttactacacacctaggctatatggtatagcctattgctcctaggctccaaacctgtatagcatgttactgtactaaatactgtaggcaactataacataatggtaaacagttgtgtatcaaaacatagaaatgatacagtaaatatacagtattataatctaatgggacatctgttgtatatgcagtccttcctcagccagaacatcaacacatgactacagttccaaatgtacatttaagcagcttagctggcaaactcttattaattaaaaaaaataataataatcccagcactttgggaggctgaggcaggcggatcacctgaggtcaggagtttgagaccagcctggctaacatggtgaaaccctatctctactgaaaatacaaaaattagccaggcatggtggtgggagtctgtatagtcccagctactcaaagactgaggcaggagaatcacttgaacctgggaggcggaggttgtagtgagccaaattcacgccactgtactccaacctgggcgacagagcgagatggtcttaaaaaaaaaaaaaaatcacacttctggatgcatggtgcccacagattaatcattttttaaaacaattactttttaaaaaaacttaaaagcattcctgttgtacacattcatgatcaacgtaaggacatttttgacaatattttcaataatcaaattcatgtgcaaatgtttagaaatatagaaagaacacaagtgagaagcataaacaatatactgtacaacccaagcaatgaaaagcttgtcctgctaaaatgaatcactgatatttgagagaattacaaggagtaacagcaataatttaaatcctcaaaacaggtgtttgctttgcaataaaaccagtcctgaaaaataccttagaaacctagctttcaataaacctctatattctattttttccaccccagatagcctttttttggcaacacctctgtatttcgtaggttcccatcctctttattaattttttttatcaaatctctttgtgttaatggtgcacatacctggtgtagctctcacatgtcagagtgacacacacacatgaaatattttctaaaataatttctggagcaggcgtatgtgtatagtcccttaaactccacggggctcctttgtatacaacctatatttattcaacctctctcatttccattttgaaaaactggagtagtctgaaactcttttggcttatggtgaccagaaatagtgttctggctggcacctctctaaaagcatcttcttgacgagacataggttgaaatgttaaatgcatctccacttacccacaactctggtgttgtagtaatctgggagcatgcgctcacacaaagccacaagcagccagaaagcttcctcctctttggcataaagcagcagcactgaagtgacaatattcatggcctaaaaaagtgaaagaggatgtcatcaaatacagttgaaaatataagcaattctgttagcatattaaaattactcagttattctcacaagggctggcaaaccttttctgtgaaaagcgagataaatatgtttaggctttggaggctttacacatagtctctgtcatatattcttctgagttttgttttatgaccctgtaaaaacataaaaacctgagtccttgaaccagtaagtgtgcagggtcttccttaacaccaatattcaccagacagagccccgaactcatgctggcaaacccctattccaaaaatttgcccaaaggctatttcacaaagcttttaacctgctaaaatctctcagtgttcttaatccttaattcagtgaggtaaacatttcctttgtaactttccgtaatggtttctataatcaggtacacatggctccaggctctcctgagagaacaacgaaacctttcagacttggagtcctcacccaacatttccatacggagagagatggtagtgataactgagagtgatttaaattctaaagtaactgtagtttattaaaagatattatcagatacctcataaccactctagactcaactactttaatagtcttcttaattaaaaagaggaagatcaaaaggtaaatatgaactttatcatattagaggccaactacctcctgtacttcttttgatctcccagaaaccggtaactgttcatcaggcttctacaattcaatttcaaaaaaggtattttggtttaataggctctttcttgtaagtcttactcattatgttcccaagtgacatcatcatggaaattccacttgagaattaacctgctgatcctagtacatgatgatggtccctgccagttccttagtcatttagcggagataggtttttttaggggtctaccttgtaacaggctctggactaggtattggaggatgggggacagagtggtgatatcttgcaggtcctaaatgctagtgttagataaaacaaagatgaaaaggttaactagtctatgtggggggttatttaaattggaagttataaagaggtaaaataatgcagtagagggagactaacgtgtgcatgtacgtgcacttgtgtgttgaagtaggagttcagcctcttttagcttttgctggatggtcagggaaggcctctacaatgatatagcctttgattctttcttttttttttaatttgagacggagtcttgctctgtcgcccaggctggagtgcagtggtatgatctcagctcattgcaagctccacctcccgggttcaggccattctcctgcctcagcctcccgagtagctgggactacaggcacctgccaccacgcctggctaattttttgtatttttagtagagacggtgtttcaccgtgttagccaggatggtctcgatctcctgacctcgtgatcctccggccttggcttaccaaagtgttgggattacgggcgtgagccaccgcacctggccgatatagcctttgattctaaggtcacgttattttggagcttcccaaattttggcatctataccagtacaagagatgacttttgttggtatgtaggcaacttttcttaatactaagttaagcacttattttaatgtgtattaagacataaccctagcatataaaagctctattcaaggacattattacttaagaggatgcaaagtagcaacactgtggcgaaccacagtgacaggcctggtgctgaggatgccctctcttactccagggtgggatgaaggttgaggcagacagtgatcagaaggatcttctccaggtcacctagctagacagtggtgaatccaggaaggtctcctccattcagtgcagtggttctcaacccaggatgattctgcctctcagacatctggcaatatctagagacatttttggttgttacaactggggattttctaccagcatctagtggtaggggccagggatgttactaaacattctacaaagcatagaacagcccatacaacaaagagttaacagtccagagtgtcaacagtgccaaggttgagaggccctggtaaagtgatagttctgttaaccataaaccttccttcccactatttgctgccaaatgaatagaaattttattttatttttttagcaaaaaccacctgtgacatttacctggcaataccctatgttgggatttcgaaaagcataagctgttaagactctccttagtgcagcaatgcccatttcattctgaaaagctgggtgttctggaagggagcggtgtaaatccctctcaatctcctccgtggcgagattatacttccccatggacttctccactaggtcttcatagtacccaggatgtgtggccttctcattgatggcacctgagatatatccaacagatacagtatcaaaaacgtgagagctctgccttttggtttgcaactacagcttatgattgaactgctttactttcctacctctcaaaggaaacttgcaagagaaggtgaaatcacagatgtggtatgttgcaatcgtggctagactggtgaatttgcctgtggcctccttccctctttcagctccatagtaggctggctacttaaaaactttcctaaggtagaggttcccaagctacaaaaccatgctctgaggaactcccacagacagtcctgaagggctgcttaggagcacaggtggggaggtcatcataacaagccaggctgaggcttcaccttctcatcactctcttcaaccccagcagctttgcttttattttattgtggtttcattaagatttcacttgaaataggaggttctgtctctcaaaataagtctgaaaactgcctgctaacgtgttagctctgaagggtttaatagccatattgagggagatacttggagtttttcaaattgcagagtggtaagagtattcctaacagtggtgagtcatcattgttgacagaagttcctcaggtgttggggatggggatggagggttatactgagaatcatccatttgagatacttacagtttaggattcttcaagacagaaaaaccctatatgcaagtatctacctctcaatctaaattttaattacattcctgttgggaagactgaatattcacatgcagaagaatgaaaatgaactctttttttataccatgtaccaaaattaatgcaaaatggattaaattaaatttcaattcctgaaaccataaaactagtagaagaaaatatagaaagaaaatgcttcttgacactgatatggcaattattttctggatgtgacaccaatagcacgggcagcaaaagcaaaaatcagacaagtgggatagcatcaaactaaaaagctctgcacagcaaaggaagcaatcaaaaagcaacttaatggaagaaaatatctgcaaaccatatgtctgataaggggtcaatatacaaaatatataatgaactcacagaactcaatagcctaaaccaaacaacctgattttaaaatgggcaaaggaaatgaatagacagttctcaaaagaaggtatacaaatcaccaacaggtgtatttaaaggtgctcaacatcactaatcatcagggaaatgcaaatcaaaactacaatgaaataccacctcatacctgtcagaatggctatgataaaaaagacaaaagataacaagtgtcagcaaggatgtggagaaaagggaacccttgtacactgttggtgggaatgtaaattgctacagccattacagaaaacagtatagagattccttaaactaaaaatagagccaccttatgatccagtaatcccactctaagcatatatccaaaagaagtgaaatcagtatcctgaagaaatatctgcatcctatgtttattgcagcattttcacaatagccaagatatagaaacaatctaaatacccattaagagatgaatggataaagaaaatggggcatatatacaaaatgggatactatattcagcctataagaggggaagtcctatcatttttgataacatggttgaacccagaagacattatgctaagtgaaataagccaggcacagaaagacaagtaatacatgttctcagttgtatgtggaatctaatatagtcaaactcatagaaacagagtctagaatggtgattaccaggagctaaggaaggggaaaaatggagagatgttggtcaaagggtatagagcttcagttataagaaatgaaaatgttctgaagatctaatgtaatactgtattgtatacttgaaatttgctaagagggtagatcttaagtgttctctcaccaaactctccccaccaaaaaaaaaaaaaaaacaagaaaaaaagacaaaaagaaaaaatcatgggaacaatgtgaggtaatagatatggtaaactagctcaattatagtaatcatttcacaatgtatatgaaatcatcaaattaatacaccttaaatatatatactttttatttgtcaattatacctcaacaacgcatgaatgagttcatgaaggctgcaggatacaaaaaagaataaaatatttcggaataaatataacaaaacacatgtaagagttgcacactgcaagctacaaaatattgctaaaagaaattgacaaagacttaaataaaagacatcctgtgtttatgggttggaagacttaatgttgttaagatagaaaaactcccaaactgatctacagattcaacacaatacctatcaaaatcccatctgtcctttttgcaaaaattggctagctggtcctaaaattcatatgcaacttcaagagactcaaaaaaggacaagaaaattggaggactcacacttcccaattttaaaacttactgcaaagctacagtaagcaagacagtgtagtactggcataaagatagacatacagatcaatggactagatttaagagtccagaaataaatcctaacatttaaggtctattaatttttaacaagggtgctaagacaattcactgggggaaagaatagtattttcaacaaatggtgctgggacaactagatatccatacggaaaagaatgaattagacagtcacctgcatctcacaccacataaaaaattaactcaaggccgggtgcagtggctcacgcctgtaatctcaacactttgacaggccaaggtgggtgtatcacgaggtcaggagtttgagaccagcctgatgaacatggtgaaaccccgtgtctactgaaaatacaaaaattagccaggcgtggtggtgcacacctgtaatcccagctactcaggaggctgaggcagaagaatcgcttgaacccaggaggtggaggtttcagtgagccaagattatgccattgcactccagcctgggtgacagggtgagactcagtctccagaaaaaaaaaaaaaaaaaaattaactcaaaatgacctaactataagagctaaaactacaaactcttagaagaaagcatagtagtgtaaatcttcatgtcatgagagcagagtgacaaaggaaaaaatagacaaattgtatttcattaaaattaaatttttttgtgcttcgaaggataccatcaaagacagtgaaaagacaatgcacagaatgggagcatttttaggaaaaatctgataatgaacttgtatctcaaatatgtttaaaaacttttacaactcaataactaaaagataacccaattaagagcaggcaaaggatctgagtacatatttctacaaagaagatatagaagtggtcagtaagtgcatgaaaaaatgttcaacatcattatccttcaggagaatgcaaatcaaaataatgtttaacctttaaaaggttaaacatagagttaccatacgaaccagaaattccacttcattcatacattcaagagaaatagaagcaggtgtccataaaaaaacctgtatttaaaaaaattttaaacttttgaattttctaaattttaaatctatattttattttctgagagagggtcttgctgagtcacccaagctgaggtgcagaggtctgatcacagctcattgcagcctcaacctcccagactcaagcaatcctcccatctcagattcttgagtagctgggactacatgtgcgtgccaccacacccagctagttaaaaaaaaaatttttttttgtagagatggggtctcactatgttgcctgggttggtgtcaaactcctgggctcaagtgatcctccctccttggcctcccaaagtgctgggattacaagcatgagccactgtgcccagcccacacaaaaacatgtagatgaacattcatagcagcattattcataggaaccaaaaagtagaaacaacctaaatgtttatcaactgaaaaacgaatgaacagagtatagtatgtccatacaatgatataatatttggccataaaaaggaatgaaatgctgatacatgctatgatatggtggaaccttgaacacagtatgctatgtgaaagaagccagtcacaaaaacctacatattgtatgcttccatttatacaaaatgtctagcaacagaaagtagtctggtggttgcctggggctgggagggggcttgaggggaatggaactaccagtctgtatttccaaacagtttatatttattttccttttttttgagacagaatcttgctctttcgcccaggccggagtgcagtggcgctatctcggctcactgcaagctccgcctcccgggttcacgccattctcctgcctcagcctcccgagtagctgggactacaggcgcccgccaccgcgcccatctaattttttgtattttttttagtagagacagggtttcaccttgttagccaggatggtctcgatctcctgacctcgtgatccgcccacctcggcctcccaaagtgctgggattacaggcgtgagccaccgcgcccagcctatatctattttccaaatggataaaaggtatggggtgttttggggggatgaaaaatgttctataattgtgatcattgcacaattctgtgaatatactaaaaaaaaaaaaccactgaattgtacaccttaactagtaagttgtgaattatatctcaataaagatatcacaaaaaatatataaatgatatatatattgacagggtaaacactcaacatttcataattcagaaaagtggagccccaagacccctggactggccaaggccttgtctctgatggtcactgagagagctggcctcaccactcacgctggccctggaaaagccaacccagctgacagggacataacgctggcttttgctctgttgatgtgggagacgtactgtgatttcttgtcatctgacctgcatttcatttcagcgggtacagagttcaggtcatgatgccgtcaccctaagggtcacaggaagcaggtgagacccaagttgggctctggcctggagctgtgctctcttcatgataggctggccttcaggcgaaccccattcctggatgtggaaatacgggctcagttatcaccccaacagagggccgtgtggagaccaccctgcggtctcacatggtccatctgccgttaaaggaaacactgggtctaactctcaacattatctctgagatagggctgtgtactattgttgtatacactagtttcctggtactcgttttgagtttcattttcacttaaaatgcagctataaataacttctaatttgaacaaggaggatgaaaatggaaatctgtttactctgtcagtgatctgaatctggttgtcaaggtgactagttcactaaacacagggaagacaagaaaagactggatggtaatgatcttcttgggtttgaattataattagagatgagttgactcaaatttaggtttctaaatgaggagctatggctggtccacttagggaaaatgaggccaggcacagtggctcatgactatcatcccagcacctgggaggctgaggtaggaggattgattgagcctacaagtttgagaccaccctgggcaacacagcaagacacctatctctacaaaaagaaagaaggaaagaaaaatgaaaaataagacatgtattaaataaatatagaacaaactagttttacatgaaatagacaaaaccaattatttttcaggattatacgtccctatttctgagacatttatacatctcattatgggcattacatctacttttacaaagagctataggtttttttaaaggctttcctgtgagtcgtaattattaattttagtatcactttttaagaataaaagcttttaataatagcatttgtgtcagaccatcttaggttcaaataaaaatattcacataagcctatttagaatgataatatttcaggcttcaatccagatagagcaactaatttacatgtgaaagtaaagttggtgaaactaaggagtgctctgatgtctgagatattagagatccctgggatacactcagtgctttcggatgggaggaagcagtgtgagcttagcctgaaggatctctggtttctgtagcagggctcaaagatctgatgtgacagaatgatggacaggcacaagagccaggtctgtggaccagtaaagatggatgcctcttcaccactggtccatggaagtgtccccttctgtccttcctggcatctctggcttgaagtacaaggtatgatctgagtaagcttttatttccagtgcagactctggcctcatctttatggttccaatgatgaccaaagacttcaggaggtggcaaaaatcaaacacctgggcctttttattcctcttatttctttcctcccaattccccacccgatgactgctctgaggaagtgtcacacttaaacattctcaatgaagttgacgtagctgggcaaggaaaaaagaactactgaagtcacaaagtattctgttcttttacttcaggttctcttttattcctaaatagcctgactgaagaaatggaagtatttataaagactcgaaggatggtggattcaacatttggtccgcttcctatgggtcctatagttttacaaagggaacaataattgaggaacttcaatactctggtgaggaaacatgatgtagctttcaactgggggatgcatatttgaaagaacccctgaggcatgactgaaggcacagggaggccctggtgtggagtcccacagactttgacgccagcattcccagcccagcggccgtacctgacagcagcagccagagctccccacgcatgctctccgggatgcccttcaacaccagctcccgcgttttctctgtgcggtacatgcagatcccttgcccatactcagcaaagtgaatcttccaggcttgctctttcagaaactctttggcctgaaagggataatgaaacattatgacatccaaagtaccctgaggatggtaagagaagagtgatggaaggtcagaacatgttccctgctgaacggagtgacaattccagaaagaagtcatgagaaaaaggaactcagattttctggagttcttctctagttttatacatctatcatggcctacagctctgccatgaagcttttgggcccagagtcagaatcctacttacctgagattgtatttatggttttatgtctgcacccccaagtgaaagtaagttaatgatgtttaaatatgggctgagaaatcgggtatttatttgttggtttaacttaagcaagagttaaaaacaaaacaagaccaaaagaagtcacctgtaccctctataactcatctccttccatgaagccactgtgaaagttataacatatttagacaaaaatctgcttaacttataggaaaatctccatttacataggcatgtgtgaatttacttacagtaaaaaatattgttaatggcattgttcaaatctacaaagtttcagggaaaagtgagaggcacccaccaatttcgggttgaactcctcgggagaccgccgccgatacatggtcatcagggtctgtgtggctgtggggacgctgttgccatttaggttaaactggcgctctccatcagcatcagagctcgtgcttctctgggggctggaggagacgaggctgctgggtcgagagtacacctgtcaatacagagaggaacaagacattgggaggacacgggcaatagaacctacttcttcagtgtcttctgtatggttatcaaaagctacatcatttttttcccatggtgtttcttgctatgtgaagaaacacgagaaaagcagcaagccatcattttggcagggattagacaggtggctgggtcccaggccgcagcacttcaatgctcacaataggtttctgaatcttcatgttttatatgtatatttgcaacaaagtgcttggccatttgtttctctgatttgcatgtatgcaaagcatgtcatggttgaatcagcagctatggcagcctcatcaccccattgagtttctggcgcctcaaaaatgtccacataagcttggagcaggtgaacagagacagagatgttatgtgtgagcttaccaccttcgaaacatgttttatctgccataacttcctctaaccattcagatagtcacctatcttttcaggcctccagtgttcctgaatgttggtccagggaagaattccacagggacccaatatgtattctatcataataaaaatcatcataatgatttgtatttcaggtttgagactttatttagtgacctctgtaccattctcaacaatgtcactatatggacctgagtcacttgctatgtaactagaacagattacttaagaatttcttcaactataaaataaaagtgttattccaggtgatctataaggttccttctaaatctatgaccccaaatacaaagtccttgagatttaaatgagatattgctgagatattgctttgggcgtcagacgcaaagcttgaagatcaaacaaaatgggcaaggaactgaacacacttgggcacaggaacaggataaaccaaaaatactttcaggtgtctcccacagacctcatcatctgaactgttgtaacttcctgcaaactccttgtcagaatatattttggaagtagtctgttgcaggaaatctgagatcctctgcactagaaagtctctatctttcaagttggcaaataggaaggtcatcctgtttcgggtgctgatggataagggactggggagcacactggagctgtctgccttttccacaattgtcacctgaaaagaagtgggaaacaaagagcattattttccaagaattacccaatagcagcctatatgcagcactaaaggaggaaggcggcactttcattattctataggaaccacctatattttattgaagcaaaactgagactctttgactctgttccagtaaaataaaacagctcaaaacaatcaaactggagcttatactagaaactggaaccgtcttgctggtttttccaaatcagtggttcaaaatgggacttttttcctctcaggagacatctggcaacatctggaggcattttgggttgtcacaggtagagggatactactggcatctggtagcagagtcccgggatgctgctaaacatcctacgacacacaggacagcccctgccatcccactccaccacaacgaaagcctgtcccaaaatgtcaatagctccaaggttgagaaaccttgctataaaggaattatttgattttcattaaaatttcatggagctataagagagagggctcctcgctgcttcatcagccataagagacagaaaacaacccatgatactggttccttttaccaagcttaatgttggaatggttttcaaaacaccaccaatccttcaaatgtttcatttagactccagggcttttcatccttcaccttctaccactgcaaagttttaaaggttctattctgaacagacatgtaaagaatgtaaacagcttaattgcaacattatctgaactaccagactgtgtgtgtgtgtgtgtgtgtgtgtgtgtgtgtgtgtgtgtgccgaagcctaccacattggggaaatttagctctaaactgaagacatatacgggtgatttataataggattttcatcaactagaaactaggataaacgcattaaaacttttctctttagcacattagaaaacaaatctcaaggcaagcactagaaaaatggtttatttgcagcagctctgacaatatacttaaagctaagatcttttttcccttcttcatttctactgcaagcagtctagacaggttaaactttaagttgttcattagcattttcatgtgaaatatatttccttcaaagcacaacttagaaatgttttccctactcaagactaagtaacctattgaagttgtctaaaaactcttgcatatctaaaaaaataggtctgcctggggtccatcaagggaaaaagtgtagcatctgactgctgttttcagaatatatgtgttagagtatatatgattcttttaatatctatattaaatatatgtgttaatatatgacatataatatacattatatattaaacatacattatagaatattaaaaatatatatttatatatattaaaggaatcttctgagacacctgaagttgtacataaggattttctttctaatgcaataaatgctatataacagagggaaatacctccttttcctgaaaagaattttcccataacacttaaggcatgtattaaagaatacttattttttaaaatccacaaaagccccttttctcacataaaatttttactggctcttttggtcatgaggtgtctgggataaatggaaaatgccaaggagatgaaaggttacattatgtgtctaaaacgcagttagctatgtggatcttgataaagtcaaagtgaaaaattccttcgtctagctggagcatgtatgcagaaacaagaaagctcccacataaaacatataaatgctcagacggcttataaaatgtttctcactgataaatgagttctagcagaactctatcacataagctccccgccaccaggaaaggagaacaattacattagagtctgctacaatataatgagacatattttcatgaccaatttgagttataaaagagactgcaacttaatcaagtcttggtgtttaatatgaaacactggaaagtaatttatgaatgaaaaaaaaggctaggcacgtggctcacgcctgtaatcccagcactttgggaggcctaagtggtcagatcacttgagctcaggagttcaagaccagcctggccaacatgatgaaaccccatctctactaaaaatacaaaaattagctgtgggtggtggcgcatgcctgtaattctagctactcaggtggctgaggcaggacaatcacttgatcccaggaggtggaagaggaggctgcagtgaaccaagactgtgccactgcactccagcttggatgactgtgtgagagaccccatatcaaaaaaaaaaaaaaaattccttctcttgctggcttaataatttcttcaaaatctatagcaacatgatcctggataaatgcttaacatctgttgactgggtctaccttaagtcaatatgtagaatgtgtgttaaaaacctccagtcaatatttcagcttatttatttaaaaaaattaagtgaaacaacaattcttggtctatacaatcttaaaagtgggcattccgtgtaggatgtaatgttcccagggatgtcaagcagcctgactcggttctgaaaggtacccagctcacgtggagggcaccctccactcagaccccacatggatggtgggggtgcccccattgctcttctgacattatcattacctaaaggtaataaaaattacattaagtcttttgcttcttccattagttggggtggggctctaccattaatacatcacagagtcatcagttcaaagaaaaggcactgccgtctcactgagcgcttctttaaagctgcgccttccaaccacaacaagcttgatttctaaatgctacctctgcagactgcctctcttctgatttaccctgaaatatagtcatatttattattatctctgctctactagagaaaactagcaagcagaatagaggttgagaatattaatcaccattctctcaattcctccaagatctcaacagtgtactctaaatcgcactaaaatgtaaacagagctagttggctctaacacccgggagggggaagccagaaggaccagcaggacagcagatgtcttgatagcggcttccagaccctctctgctcctcatttccctctggataaactgagagtgatgattcattcaggtcataaatagcacatttatggtattctgaatcacagaattggtttccctagctggtacaggtaatgctgctttactacatttgagtagcacatgatgaagaaaattacattcagaattgggtgaagaaaattatgtttagtaacatcctatagcaaaaactactaagaaggtaaatttggtgaaaaaacttacaaaatacatttcacagtcaaatgtaaaactgttacattattcctgtcagaatttacccacaacatatcttggcctcaaaatgtgttataactccaattagttgaccctacgacaaggagagctagatttgtcagttgcctaacatttttcattctttttgattcacagttcgacttctgtttgctatttataacttaaagaaaattatacatatatttgagagaaaactagatgcaacggaaaggtccaaccataggtaaccgaatgaataaattatgtatatactttacggaataaactgcaggatttaaaatttaattgtgatatgaatgtgatggtgtatgcctgtaatctcagctactcatgggactaaggcaggaggctcatttgagcctaggagctcatgtctagtctgtgcaatagaccaaggcccctatctcttaaaaaaaaattacattgtagaagaatatatatatatatatttttttttaattttttattttttagagataaggtcttgctctgtcacccaagctggagtgcagtggttcgatcatagctcactgtgatctcaaactcctgggttcaagtgatcctcccacttcagcctcccaagtagctaggactacaggagcacatcaccatccccagctaatttttttaaatttttaatttttaatagagatggggccttgctatgttgcctaggctggtctttgaactcctggcctcaagcagtcctcctgccccggcttcccaaatttctgggattacaggtgtgagccatcacatctggcctatagaagaatatttaatgatttgaaggacactttaagatatactcaatgttaaaggaaataactaaaaataaaaattccctataaagtgttttacatctaaattatataaatgacacatacacagcaatgcagagaaaaaactagaaagctgtacaatagaatgttaacagtggtcctctctgaacagtggaactagggcggacttttctctttatttgtctgtattttacaaattctgggataaagatatattactcttaaaacaagaaaataagaagaaactatgcctaattaaaaaaaaagaaaaagataaagaaggcagagagaaacccgaatcctttgctaaagggatgttagcaaggggacaatcctgatcaaatacccaaagcctctggccaccttagcttccagaaaggaccagggtaggttggaagaggtcaggttagaaactgcagggctgctggcccctgcactgccctttctctgacatcctaacctggggtctttgtcaactccaagcctcacagcaaagcttccagacaagtaccagagtaagctatcatcctggagttaggatggaacccacctccaccccagaacaataataatgtttcttagactttactgtgcataagaattggcctgtaaatgtattaaaacagagatctaaaacttgcagagatacagattcagaagatctgggatggactcaggaatctaccattgtaagcagcagcatgatggttctaacacaggaaatcagccgagcagagcccaacaaacacgtggctttctgactcacaacctagactgtctcctttagaccagggtgccctcagaccttgagccaggtacaataaacatgtttcctagtttctgtatttgatgctttggcatcttgggggccttgctgaccctggagggattacccttcccagggctagccaatttctagaaaattgctttcaaagcaaatcaaccaatctggagcccacacctcaaccacttcctttattgaatgctcacactcaagactactatttccttgccctttttaacccatggacaactagggacaacccctatgccccacagcccaccaaaattgttccaattatccaagcctaagcctatttactcggcgtagcccatttcttcccttgaaatcacataaaggatcttgcccacattttctttccctcctgcctcctctgaccatggtgcttccacgtgtggcccagcacatcgcgtggcatgcccttgcctttcaggatctgtgcataaaacaagctatttcaatagcactcatcccctgattgctggcctcgttaagcttgaattgtaataaaacctacatttaggccgggcacagtggctcatgtctgtaatcccagcactttgggaggccaaggtgggtggatcacctgaggccaggagttcgagaccagtctgcccaacatggtgaaactccatctctactaaaaatacaaaaattagctgggcatggtggcaggcgcctgtaattccagctactcaggaggctgaggcaggagaatcgcttgaacctggagggtggaggttgcagtaagctgagatcatgccactgcactccagcgtgggtgacagagcgagactgtctctaataaaataaaataaaaacaaaacctacattaaaaaacccccatgcagcttctggaagaagagatctcacaggtcccagagtcacagcagtgacaacaaatgaaagaatgcaggtgccaccaaagacgcatgaacattcacctgtgttcaaaagccaattgttggtaaaaaaattattcctggttcacccagaaaagtattacaaatgaaacttaaaatatcaatttttatcagatacttacctcacggagcgggataatgaggctacataagttctcctccttgctggtaaaacagatgtaatttgtggacacaaacatctgccccaaaatgtgcattttgttaaatggagtccagagagtgcagtctgtgtggccatctaatttttcatctttgggcagccggaaaagtgcacggtatctctcactctttgccctggcatcaagatcactggaaagcaataattacaattcacataagaaaaatgtttccataccttctaaattatgcagcagcggaagttcccccagcccattttccacctcctcaatcttgctagactcatcccccgcttctcagctttctttatattgaagttaaccccaacctaatgacccaaaagcgtaataaaattatcttattatatttcagtcccttgcatagtcacttataatccatgtctgtaaatgttaaagaatcatagcaaaaataagcctgaacaggaaactcttcctctttctaaagaaatgcaatacactctaaagaggtcactgcatttactcttatccaagccactttagggggggccttatcttttaagacctaatgagaatgcaaaccagccatataaatccactgggcctcagtgtccaccccaaatcgacaacaaagctgcaggaaaagacacaggaacaactcaccttgggcaactatggcttctgaccttagctgggtcttctgttaactactatcttttctctaatgagttctttgttcttgctcatcatgtcagttgtttaaacctctcccctcaagcttctacctgacatcagcctcgtgatggtctagtctctgacttcatagagcaaaggtccatgatgcagaagccccctccaattccttcccttctgtctccaaagtcacctccatcctcacctactcttacttcctctccattccaaaggaaaaggtatatcaggacacacaagcatcctttccatgctttctctacaaaatatcacttcttaaatgatcaactttcttataactatctctatgtcccttcctgtctccacacctaccctcaccaaaatgctcttcccatctgcctccttcatttgatactatgttcaaatctttttcattctaaaaaaaaaagcaatcctcccctcctttaccactgaatttcttgaaaatgaagtctgtatttgcctagttccctttccttgtcttttattttttatttgatccgctgcagtagcagcatctatcttacactgctcttttgaacatgtctcaaatcaccaaggacatcttaattacaaagacctctggttagatttcaactaccaaatgcacatcaatgatttccaattttgtatatcttactggactgatctctacttagatgagctacaggcacctcaattcaacataatcaaagctgagctatcgtatcccttggacatgctcttccttctctcattccctgtgttgatgaagggtaattccaggcacatggggcatcaactttccatcaccctctctctagctctgctctcacattcagactttgaggcttctctgcagcctctcctcatcccatgccctgccacctactagccatgtgacaaagttacttctctctgtgttttcccttgtgtttcccccatcgtcatcttccctctgcttgaaatatccaggcatggatatgtacctgcacaggtaacttctatcacctcttcagagcccagctcaaagcagcctccactgagaggcctttcttacccactcttccccatctgggctgaggctatcactccccatgtgtgcacccacagcactgtgttcacaggaccagaagagtgcctgctgccttgtgttggagcaggtcatgtctgtctcactttctgaactggtagcacctcagctagtcttttttagttttgtatctatacacagaagagtgttcagaacccttgaagatcgtcagagaaggttacactgaataaatgaatgagtgagtttctcatttctaaagtctggaagatacaaggtctctatcacccaccgttttagagcagacacttttttaggagatttccttttgagtttgggcagggatcgatcttgttcaaatccctcattgtctaagagttgcctcatggctatgttggcaagctgctccattaacttgaaggtctcgttgatgttgaggaatacagagaagaaatgctcactggaccgtgtgctcactttgatcacatcaggcagaagcagggtggcattcttctcaagctgagtgatgtctacccaccggatgaccagtttcgctgagcacaaggaacaagcctgggtcaacatctgattcctgaaaacgctttcaagatattgcagtctcacaaccccactcccccatcccactgaactcctttgagtttataataccatatttgttttgcttgttcattttaagaggtaaatctgggccatgtgaattctgaggtcagaattatagatttaatccatgtctactgaattaattacacctttagtgaatctttattacttagtgaccattttgaactgaaaaataattaaattcacttcagtagtaaaaaaaaattagtattgacttagttataactatagatttatttctgatattttgatgtggtttatgagttcagggcaaacctcagtagactttccaaagtttcctgctgaaattttagatgacttaccttcccttcccataagaaaagaataaaagcaaaggtggttaatgctgaggtacatccaaccctgacgggggaccttccccttccaatagctgcaagagtaatagttgacgagtttctcttcctctggcatcccaaacagcctatgaaatttcacaatggcttctttaaacttctccgtgtcatcatcttcctttacatcattgattttgttgtattctgcaatgatgccctaataaggaataaaacacaaagcacacaactggtattaatatgactagagatgtacatattccagaagaaaaaatttctaaggctagaattaaaaaaaaaaattgaggaatgcccttcaatggcaacccccaaattctaagccaattattgagtagtatttgtgtactaaaatattttcacataatatagattttattatatttttattggtgctaattttattttgttaagtttactaggaatgaagcctatagttttactttacaaatgaagagatacaaagattttgctagtcctagtgtttttactaagcttattatggtagaattgtctcaaaagtcaacttctgcctttctccaagattaataaaaattcatcatgaatgagccagtgaggaaagaaagaccaaacacatgtcaccaactgacactcagctccacactcactgtctcagggccatgaataacactggggagcctacagggaaaaacgagtaatcatctgagcagaaaaggggtagatatgagagcaaaaattatattagatgcaggatttttggacagttagacaggaaatgaaacatctgcatagcaagtgaccaggttaatctaccattcaatcattataataacttgagaagccatttcactgttacccagttcctctgtaattccctgaaaattggcttctacatatatctcgatggaaaatgctcccttgaattccacctttgactttgtaatcctcaaatccctcccgcctcatcttcattttctctgatctcaaggtagaactgaaaatgcatgacctttagagcatgcaagtcttagattcgtgctcccaccgcatcactgtatctgtgtagccttggccaacttctcagattctcattgacatgactgagctctctgtagcccaaggatagaaaattgcaactgcctcctcatacctagaattcctgctttttgggctcttaaagcttctagtgcatccttgatgctccctaaaaatttgtcttcctaaaatggatttgaccacaaaattcttaccaaaatacttagtggtttctaaccaccaccagtataaagtccaaaaatctagatcatgtacactttgtttgttttaatgttttaatttttatttttattgcagactggctgctccttgtgaagcagggtaacccacaggcagtgtgcccagagtagcctagacccatgtacatttttggatccaaccaatgccgcaactttttctcactggactacatcctacccaaatgtcccgttagtaactgtgctccagccagcctgaggcacccttggggcctgaacatgtcatttctgcactttcccacctttttgcctatggccctcccattctacatgcctgaaatctggaatcagactgttctgtttcgtgaatcctaccaagtctcaaagtctcttgtgagccttttctcaactatcattcttttccccccacatgaagtaatgttgattctctctgcattatgtattgaaatcatttcctgagtcttatttccactgcagacctttcaccctgttgccggtagttgtgatgctgctgagtggatggcaggagaaagggcttcagtcttctataatctctgtcactgtcctattctagttaaaagtaagcatgtagacaataatcataacagcaaatggtgggcttacgatgcaagcacagccccaagacaagtctttatcctattcttctaacaaaagcatcccaaagtccctctacacagtccaggaattactatataatagcttctcaaatggcatcctgacaacactctccacactccaatttacttcacatggccactttctgaaacagagatctgactacagtattcccaccttataatcttccacaggctctcagtgaaagagaaaagaaatctgcactgaatcttaacccataaaatctgctctcaatcttcccaagtcaacctttccaggtccagcataaataccaccttccctgtgaaaccagcccaattccaaatgggttctaagcattctcacgtctatgttgtcttaatttacatgctggcagaaaatagcatgtttatatgtccttctaccactaaatatgaattccaaagataaaaagaatgtctcgaacattttaatcaccaatatctagcacctaaaagatgttcaatattactaaatgaatccatgttgttgtttttccaaattaaaagatatcttaaggggccatatcttagtctttattgtataatccagagttgcagatttctaaatctacaattgttttggagttagcaatgcctgagaaattaggtaccaagttgctaacttctgttcctctgtcatactggagggcattatggatagcaatagaagtagcaatgtgcttccctggaaaaatatctaacataaggatattttcctctatttaccactgatatcactctaccaagagaacaaagacattaagctcgatgaaggccaggagggagctcaattttggacccaggctattctagggacaagcaggcgttggtagtgttactttaagaacttcagacaactgaaggcagcatgagggcatgggacccgtgggtgggaaggagaagtcaattcagaagggaaaagggatgaaaaatgcctttcgcagttggcaaatacacctgtggcctatgtgacatttcaaagttgtcagtgcctttagagaaggatcaaaaaatatctatgaatgaaagattaaataaatgaatgagtaaataaaaataactgaatgagaacctgctaacagaaagcagcagctgggcctccagggaatcaccaaaggctaacaacttagagaagcctggagaccctcaagtgggctaacatgctattctcctgggtcactgtagtagcgctcttacctaaagtcaaaatgaggagaatgtgagaatgagtgacatataacaaaccataagcagaagtatgctatctaaagatctattaaataccacatttctagagtgctcactgaatttatttatttatttattttcgagatggagttttgctcttgttgcccaggctggagtgcaatagctcgatcttagctcactgcaacctccatctcctgggttcaagtgattctcctgcctcagcttcccgagtagctgggattacaggcatgcaccaccacgcctggctaatttttttgtatttttgatttctgcatgttggtcaggctggtctcgaactcctgacctcaggtgatctgcctgcctcagcctcccaaagtgctgggattacaggtgtgagccaccgcacctggcctgctcattgaaattttaaagagaaaatgcttttatatatgagagtaaatacagtcaagaaccatcactcagaaacactctagggtctaatatactagtatcaagagacaaggctttgccagctcatttcaacagtaaggctaatagtctccataaggctaaaataccaactttctcaacactaaaaaaggaaataatccagaatgtagaaccctttcttagttggctataattttttagccaggtagactagattatggaatacagggatagaatagctccttcccaggttctacaggtttttctacaggtttcgcataatataaaataggtcattccagttctaggcaacagcttctcatgactttggaaaatcctattatatcagatgttcaatataaatttaaatatgcaaaagaatattaacaggtaatttacaaaaaggagaaatttaacttagcaaacatgaaaaaatattcaaccccataataaccaaagacaaaactaaaacattaaggctttaacttctacctattatatttgaaaaataatttcaacaaccaaaatgctgaaagcaagcaatgctgtaatcacacagagattctaactgacaatatctactaaggtctattaaaaatacttaaactacttaacccattcatccaaattttgtaatctatcccaaagggggaaaaacacagcctgtgggtaaagttacactgtttgaacaaaagtattaactggatttttatttgtacctgccatccactagtctagaagctaaggtgacttctagaaagacagaaatggtaaagtcaattatggaataataactaaaaattatataacaatattgtagatactggtcaagaaaaaaagacgagaacaaaattatatgtacatgagacttctattatgacaatatgcatattagaagtggggaggccgggcatggtgtcttaggcctgtacttccagcactttgggaagctgaggtgggtggattgcttgagcctaggagttcaagaccagtctgggcaatgtagtgagtctctgtccctaattaaaaaaaaaaaaaaagttaagaaaagggaggtctggtaagaaatacacaaaatgctacataaggtgtttggattatggttgcatctgtagttaactattacatttatgatttataaaagttaattaggtctcaaaacaaataactttgttggttcccttgattattggacaatatgtgaatgcttaaaccattcatctgcacatgaatgacattctttcacacataactgcattaatagcaaatccctcctcataattggtttcaggggaattaaatctgacatttttggtgtaatacaaacaaaaaggaaaatggctgtttgacataattggtctttgtttgttttacttatttctcctggctattgtcacttctaagctttagcttcttcctacagccctttttttcttttttgagacagagtgtcactctgttgcccaggctggagtgcagtggtgcaatcatggctcattgcagtcttgacctcctgaggcaggagaattgcttgaacccaggaggcagagtttgcagtgagcagagatcacaccactgcactctagcctgggcaacaagagtgaaactctgtctcaataaataaataaataaaggagactatgacaaggacaaaggaggcaatttgtaggggctccctctaaatctgggatagtgtgagcaccaaaataattaagtccagtaatgaaacacaaacaactggaaaatacagaatccatgattccatgttaataatcgataaataataaataaatggagggaagactcttgcttatagtagaataatagttgccaaatggtaaatgtgggagaggcctggaattggacaagcattattttataaaatcaccatcttgtaaactgtcacagtaaagactggttcagatgaaaaatcatcaatggatcaatcctaaatcaagacagaaattttgacaaggagtgatacatttgtgtggcctgaaaatgttttcttacagaaaactgtttattatttgcaaaggcaaaattagtaactctacaatggagaaattggatataacaccttgggctcataatgccaatgaggggcaaatgagtgtcatgtgcctcaagaaataatatcttgagaaggacacaggatcacctatgcagtattccatccaggaatgcaacaactgaatcgattcataatatctgacgaaatgcaaaatgaaatcattctagtaaaaaaccagaattgtatactttaaaaacctcaatgtcatagaagacaaggaaaggctatggaaatgttccacgctgaaggagactaaagacatgaaaactaaatgcaatgtcttcctagataattacctgtactggagtgggggtggggaaggctataaagggcattaagtcggccagttaatgaaattaattagaatatgtgtcaaatattctggtattaatgttaaatttacatataatgttaaatattgcaggtgataaatgtagtgttgttatttaatagaatatcccgcatgttctcattcacatgtgggagcttaaaaacttggtcacatggagacagagtagaatgatagattccagaggttcagaaagttgtgaaggtgggacagggaacaaagagaggctggtgaatggtacaaacttacagttagaagaaataagttctaatgttccatagtgactaggtgactatagttaacaacaatatattgtctatttcaaagtagctagaagagaggacttgaaatgttaccaacacatagaaataataaatactccatatgatgactaccccacataccttgacttgatcattccacattctgtgatgtaaaaaacactcacatgtaccccagaaatatgtaaaatatcatgttatcaataaaagaaaaaaaaggaatagccctattcttagaaaatacacactgaagtattcaggagaggaggcaaacacacatatgagaaagcaaatgcagtaaaatgttaacaggtgaatttgggcaaagggtatacaggtatgttttactcaattcttatttttacaacatttctgtaaatttgaaattatttccaattaaaatgtttttcttttatcccactacctgtatttttcctctcacaaatgtggtgatatcattctcattttcaaagatggagagtgtctgcaagagattttgctcaagccattcccagtgttcagtgatttctttcctggaaccacctgtacaaatgaaaataataattcatgtcagatttcatgccaaagatattttaaaaaccaggctcactttttcattatagtctataccatcaaaggagactatcggaccaagagctttgcctttaaatgctttctctcctccagaggagacacacacacaagacatttaaggatgtggaaacgcaagagtaatattataatcaagttgtgttataatcaagtttgattaggtgagtgcagaggctttgaggacactgtttcagatcagaaggcagcaatatttctcaaattcacttttctggactagagtttagcacatccctcccctttcctcccttctagaatttgcactttacagggtaacatagatcttatgatactaggttacagttgttaagttgcaacaatatgagagctttggtatgccactggagaactgatgtaaccacctcctataatgggcaaaaaattactctcactcacttcaattatgaatgagatgtgaaaatggactatcactagggaatagcagcctggctctcattagcacagttgccttgaaatgtaatgggatgaggtcatccttgcagcctcaaccaagtcaacacattttggtcaataataagaagcatttaagataactcttccagcaacctccaaacttaaacaatcagctttatagtatatgtaatcactactctgtttttgctcacagctgcagggtgtaataggtatgccatcagggtgggggtataaagatactggactaaattcccctaatgattgttaatgatcttatagaaaaatggctttttataatttgtccgtatatcatatatatgtgtgccatatatatatatgtgtgtgtgtgtgtgtgtgtcatatatatatatatatatatatatatatatatatatatatatatatatatataaacatatagtatgcactgctcattccagaactaaagaaggagtttgtgattccattgattcacccttcaggattctccttcgatttccaagttatattttaattgatttctttaaagtgtcttttctctctgttctttgtcatcagtaagatctcagaatctctgattcttgacaaagaatgaaagacaggagacacaaatgtatctgcaattatactcagaactgtggcagaactaaaatcgctgagagaatgagagaaagaaattcaggagagagagagaatgagaaatttcagatacactgaggaaaggcaaaacaaaacccacatgtactttcttttactttgagactaaacatcaaacttgcctacaagggatgcttatgtgaaggatgaaaagcaggtatcagctgagtgcagtggctcacgactgtaatcctggcactttgggaggctaagatgggagcatcactagagcccaggagttcaagaccaggctgggtaacatggggagacccagtttctacaaataataataagaaaaattagtcagacatggtggcatgtgcctgtagtccagctacttgggaggaggaggtgagaggtccacatgagcctaggaggtcaaggttgcagtgagccatgatcacaccactgcactccagctttgacaatgacacagtgagaccctgtctaaaagaaagaaaaaaaaaagcaggtatcttagtggagaagagtccagtgaaaacactgaagcatacattgctcctcttcctgggtattttccacacttgctctttcatggccataagctaccacgtgtaaaagcagtgggataactgtcctacaatgtcatggcaagaccttgaaattgggacagctgggtacctcctccttctctgccaccagtcacctgggtgactttagacaagtgcttaatctctgtctcaaattctgtaaaattgagatcagttaaaaacacaaaactggctgggggcagtagcacactcctctaatcccagtgctttcggaggcagaggtgaggggatcacttgaggccaggagtttgagaccagcctgggcaacatagtgataccctcatctctacaaaaaaattaaaaaattagctgggagtggtagcacacacccatagttcctagctatgtcagaggctgatgtgggaggatagctcgaacccaagagtttgaggccgcagtgagccatgatggtgccactgcacttcagcctgggcaacagagtgagaccctgtggagagagagagactccaacacaacaacaacaacaacctttacccatctcagagaaatactatgaaaatcacaagggctaatgtctgtcgacacattgtggacagcaaaaatactgttcaaatgcaaattacaatgcctatttgaaatatttagggaatgagtcattttggagtttgaaagctttaaaatattttaaacttaaaaattttaaatactaactggaaaattttttcagacatacagagcccttccttgtctgtaaccaggtcaccaccatcaccagctgtgacatgcggcagacacagagagagccctgtgcagaataaatgccagccatgaatcctccacccgattgttccatctgtgcttgttggcactgtcagatggactgcacctcaggacagaggtactcctgggaaccacaggactgagttctgcagacccagaggcataattcatctctgttttgcctctcatctgtccctgcctacattgatcacagatatgccttgtagagtctgagcctcggctcagccaggataatctggctcttgactggtatctcaccatgctctgccctttaccaagttatcacaccaggtactttactttcagaatcccatggaatccaacactattccttggttgtcgtggatagaaaagcccatcagccataagacctatcagctttgcacaagctgctttcaaagcttcccttcctccttccttccccgcttcccttcccttcccccttttcccttcccttcccctcccattccttcccttccccccttcccttcccttcccttcccctttttcccttcccttccccctttccttcccttcccccttttcccttccattcccccttttcccttcccttctttttcctttcccttctcctttttcccttcccttcccccttttcttcccttcctcctacctcccctcctctcccttccctccccttccctctccccccctctccccttcccccctcccctttctccttcctcccctcccttcccttcccctccccttccttcccttccccctcccttcccttcccttcccttcctcccaccccttttttttttttgagacagagtcacgctctgttgcccacactacagtacagtggcatgatcttggctcactgcatcctcaaactcctgcggctcaggagatcctatcacctcagtctccccagtagctggcattactggtgtgtctcactacaccctgttaattgtttttatatttttagtaggtctcaaactcctggcctcaagcaatccgccagccttggcctcctgaagtgctggggttacagacttgagccacagtgcctggcctgtgtgctttatgcataaagaaaggataaaggtttctttatgcacacatttctatatgtacatccccaccacacacacactcccatagcagaaatggtatatgcccatatgaatgcactccttcaataaacatctaacttgtacctccagccttcactgacattatatagtccacaggctaattgtctttcccaccccatcttcaaatagtcatctgaataatcttgcattgaagttcaggtttactatcattgtttccccacctgttgcctcctctgctgcctcaggacctgctgtcccacactgcccactgtccatcatttccataatccccaccatccacctccaacattgttctcaccactggctcttttctctactgctcgctatgaggtaggtaatgcctacatgtctatcttcctttaccagcactagccccaaacctattgcttctgcttgtgctgtttttgttctgtcctctgtctcctgtccttccttcctcacttgtgtcacatgaaaaggctggccttttggagtcatcgccagccactcgctgctcccatgtataggagaggtgctgggaccataagtctcaggatcttcaagtctttcagcatgctcagtgctttggggctgcttcggtactgccaaaaggggttttggaagtttcttctggctacatccaagcctaagatacaaagagtttcagaagactggattctatgaccagtatagcaggaactctaaaagtaaaggtcctggtgtgacgacttggtaaagggcagagcatggtgagagcactactcgagtcagaagaactttgtgtattattatatgaacccattatcatcatatgctattttagaaaagaaaaaagacaaacactatcagtaaacagcagctttaggaattgaactatggattcctatctagacccaacagatactttctggggagaataatgtaaaagtatcttaaaatttatatttactgcacaaatgcaccatattctctgaacactttcctaaatgcacaaagaagcagtgaggacaggtgttccagctccaggttctggtcactaaaagtacgaggatactgaaaagtacgagccaggactgaattcaccatcaccatctgaagatgccaatccagtaaaaaatacttctggaagcaggtggccacttctgtccacttctcaccccagaaaaaagggtccaagttacctctcagagatatcagaacaaatgccactttttctggaccactccttaaaaacctgagactccaaaggaaacgtgtttgaatcccaaatgttccttataaatggctcttccatttctcaagcagattaagtacatgcgctgcagtaattcaagtcttagaacttattaaagtgagataatatgaagctcctttgtcatgaccctgacaaggaactgatctatttacccagcagcttgaacaaactgtgttaggacactcagaagagaaaggaagggcttggctgttgattttctggaaaggccccatttacagagatgcagcaggaaaaacaagctgacccgattgtgtaatcagctggaataacaaagaaccctgatgttgggtatgagaatccttcaggaaatgcaagttaaagcactctgctgtggctaaaaactagaacacttgataggcttaaggtttagacattgacttctaaaaaataagaacaattatcatttcaagcagttttttagggtaatggccagaggccctaaatatatacctgggcaaactttttaatgttgtctgcaatgatgaaaaatacgaaatcatcctagtctaattattcatctagtttgaaatctatcttaaagtcatgaagtctacttgaaataaatagaagatggacctccaaaatgattctatcacttctggcctctgaggattaagaacaaaggtttaaggctccactgatagatatttggcagatatttcttttgtgatgcatgattcataataaatttttttcttcctacctcctaggaataatacattttgtttctgggactgcagaacttgagaaaaacctgtattgcagaataactaaaatggtgaattctcattgatcataagtgtatgtatgcacatgtgtaggtacatttgtatgtgcatacaaaaataaaaaccactcatcacatagcagaaaacaaaacaaaaacccaataagcctccaaggattaaagagcaactgacctagtattttcagattcagaacaggctatgtggatcactgagttcacatgaattgcacttgaagctaattaaataaagggaaccaaatgaataaatcatctgtattatggccttatccaatataatcttagtcacaaagatgataattttgaagtttccataccaaatgaaggcaagagtattactccatatactggagcaacctttaatctgtccctgtatttaccaagccacccttgtactttctacatccagaaaaattacaaacttatattcagagagggcaaaagacaaaacccaaaaataacatggtgatttgaaacatttttagaaacaaatgaaaatatactttttcaaaatccacatctaactaaagttataattataatcaggttaagtaagatgataatgataatgccttctattatttgtgcttaccaagaataggcatcacacttaactactgaaatgtcaaacagaccgggcacggtggctcacacctgtaatcccagcactttgaggggccaaggcaggtggatcacttgagcctaggagttcgagaccagcctgggcaacatggcaataccctatctctacaaaaattacaaaaattagcagggtgtgatggtgtgtgcctgtagtcccagctactcgggaggctaaggtagggggtcacctaagaatggggagatcaaggctgcagtgagctgtgattgtgctactgcactccagcctggcttgctccactccagagtgagaccctgtttcaaaaaaaaaacaacaaaaaacaacaaaaaaactgtcaaacatatccagatttttctggctctgaagtctatatatatgtatttttaataatctttttcatttctttatttattttaatagagacagagtctcactatgttgcccagtctggtctcaaactcctgggctcaagtgatcttccccacctcagcttcccaaagtgctgggattacaggcacaagccactgcacacatccaaagtctgcactctaaattgctacactttgctgccttcttacatgttttacaagtgcagtgagtatgaataaaggttaaattatctgaaataagaagaagcctggttatgagtgaggcgatattacttaatgcctcagaccatgtcgagaaagtacacctggtttcaaacttctacaatgccacatactaactctggggccgtgggtaaattactttaacctctttgtccttcagatttcttgtctgtaatatgtaaggaacaacacttaacacactggtttgtgctagagattaagtcaggtaatacacgtcaagtccttagaacacagaaaacaccaaacagttacttttggaattatcataagcagcagaacacaaagacctcatcttgaaatgtgattcagaaaatatttctaacttctgatgtcaagaaaagaaactagctgtttaactattgcccaactaacatacatttagcacaaacctctcaggccctggaacacttatgtttgattgcaaagggtgcatattatatgcctaggccctcttgtgtaactctgataagattctgacataactctgcttataatctcttatgggtcataataatatgctcacagctttataatcactttgagaagagagtcctaggtaactcattcagccttggcaataagaatcagtagttaacatccttattttactggatagtgggaacataaatgtctatctttctggagggcaatcaggctagacatattaattacatgcatatcctttttttaacttgtttatttttgctattttaattatatgtatattctttgattcaagatatctacttccataaatttatcctaaggtgataattaagagaatgtgcaaagattttgttgggagaatattcactaagattgttcaaaatacagtaatagtaggggaaaaaaccctagatttccaataacatactgagtagataatttatgttacattcacataaaatatctacttattaaaattgataggccaggcgcagtggctcatgcctgtaatactagcacttcgggaggccgaggtgggtgaatcacttgaggtcaggagtttgagatctgcctgggcagcatgatgaaacctcatctctactaaaaatacaaaaattagccaggagtggtggcgtacacctgtagtcccagctatgcgggagggtgaggcaggagaatcacctgaagctgggagttagaggttgcagtaggccgagatcgtgccactgcactctatcctgggcaacagagtaagaccctgtctcaaaaaaaaaaaaaaaagaaaaaagaaaattgatggtatggaaatacattttattgacataaaaattattttcaatatattattttccatttttatttgcatttaaatacatatctgttatatatttatatatactgtaaatatatagtatacacatagtatatattatatacctatatatttgtatatataggtatataaagtatattggagattttttaaagtctgaaagtgatgatttgtgatgtggtattttgttttcttttttattcattttatgtatctatattttgtaatttttgcaataaacatgtattgcttgaagaaaaaaggagcaattatttttgtttgctttcttaactcactgtgtttctaaagatacgagaatagtccttgagttacacagaccaagaaataattataaaaatacctatcaactttcacattacgtctgcctcatgcagaaggcaactaaattacccaacattttctttatctacagtagagaataagagcagaaccaattagtaatctttaattaaactctgggtcttaccagccgctaactaaaagaatatttaattataaaagccagcatggtgccacttaagaagtcctgggatgggagtggggagacctgagaacttggtctgagcaccacataactagttataaccaggaatgtgaacttggacaattcaccttgcttctgcatcctactacaataagaggggcaggcaagacgatagctgctctatctttcatttctgaaacacaatgaccatctaggaccagatgacattctggaatggtaaagaaaagggaaactcaatcaatacacagccaaatcaaggcaccgttcggcactgttgtcagtgagctgtccgtcaaacacatcctctccacgctttcctttattagccctttttgaaggtcagatgcatccagagggaactgccagcagctccttctgtatctttgtttctaattctcctgagctgtcacagaactcctttctttagatcatatccttggaattacctgcattcctatgtgcccatattcccatggagatcatataaccaacccttcttactgttagaaccttctagtccttataatgggcagaaagccaaatggctttctacctgtgccaactgaaggccaaggaagacaatggactggactctctgctgcctctggaacaccatatccaaaacaagagctgctggtagcatatctgtacctatttttactccaatgtgagccccaggtgcaaaatagtcaattcactggtaaaccatgagagacagaattgtcagagtacagtaaatcagctcaacaaaactggctggataaaaggtagaatttactgtacaaactattaagcataatgcttaattgtaggctagaattgttgacataatggcatattagccaaaaagaataaaaaccacattttgggtactagtgaaatgaaatggtcgttgtttaggaaagttttttggctccctttcccaattaaagttctccatgtcaaggaaatgtaaacgatcaacttcttcagaccaacttggataaactaacagaagataaaaaagaggcgggccaggcgtgatggctcacgcctgtaatcccagcattttgggaggctgaggtgtgcagatcacctgagtcaggagttcgagaccagcctggccaacaaggtgaaaccccgtctctactaaaaaaacaaaaattacccaggcgtggtggcaggtgcctgtaatcccagctactcgggaggttgaggcaggagaatcacttcaacccagaaggcagaggttgcagtgagccgagattgtgccactgcactccagcctggagacagagcaagagtccgtctcaaaaaaaaaaaaaaaaaaaaaaaaaagataaaaagaggcatatgaaaataatgtctcatcaaataactcttggtacctccaccccgctttctatatgattcatattgccgagggccaggtgcttattacagtggcagtaagatggtccaaaacagtcctcctgcctgatttcatgtggctcaagtctaaggcaaatcatacagctaggacttaccactaacactactactgctctatgtggtctatgtcaagacattggtcgcagatgctccctttaattcaatttatgcttattaaagatttacaaaacacatgacaagatcaaggtttatagaaaaaggttttataatcccatggattctacaaggcagtgatttagacttacccaattatctgcagaagtttcttttatagcaatatttcataaaatcctagcaaattagaagtttttaatatattttcctatgccatactaactttgtagtttatgaaaaataacattaaatttacaaacaataagatacagatatattttaaaaatcttaagggagaagcttctgctcttaaaatcttatcatgaaaaggagccagtaacttggattttaaatggaaatcagtaagaaagaacaattaataggtggcctggtgtggtggctcacacttgtaaacctagcactttgggaagctgaggcaggcggatggcttgagcacaggagtttgagattagcctgggcaacatggcaaaaccctgtctctacaaaaaaataaataaataaattagcagggcacggtggtgtgtgcctgtagtcccagctacctgggaggtggaggtgggaggatcactcaagcctgggaggcagaggttgcagtgagccaagatcatgccactgaactccagcctaggcgacagagtaagacattgtctcaaaaaaaaatacaaaatgcaacaaaacacaacaacaacaaaaaaccactttcacaacgcctgtcacttccttctgtgcagtcttccataaggaaattctggagctatctctatgggtaatcaatatatacaaaaactaaaaccattctgggtttattataatgaaacaagtgtcactgggaaaagaaaactatacatctctttggacaataatttatgccatcagcattcacagcgtagtgttccttagccttggctcagcaaataattcaggaataactcagctttgtaacatacaattctatctcataggagtattcacaggaagatctgtttcatagcaataccatggcaaagccccagaatcagactgaggagtagtaacgtcaggcagtgacattataaatgtcaatgacaacaaaggtaatggctcaggggcagaggaaaagtcacaggagacacaaaccagttccttacatcaccagaaattgaggtgggaagaccgagcctggagggctgtaaggagagatctgagggctctgaagacctgctgcctgcaaaggatctcgcaggcagtttggcactcatggtgggattgctggaaagtgagcaagaaggctgcagcgtccttttcacaccgtcatgaggtggaggggtttggtggctctccctaacttttaacttctttctttttagttcttcatctgctgactatgaaacgattctagattgtttgccaactaaatgtgatgctttcccaatcaactacggcaggccagatggcactttcacttctacgggctccctctgtggtgggtaaacgtgcagagaagactggaacactgtcttccaggagcctaggttacactggtaagtctgtccaggtcagagtcccagcttcctcttccttaatcctttatcaccttcctctcactcaatccccattcttcacttctagatgggttttcccgcagctctaaaccttgaagccatgccttcgttcatgggctgtgtaaacaatggttatagtcaattgtcattcgctgggctgtttgcatctcagaatacatttaaaaagacataattatggcctggtacggtggctcatgcctgtaatcccagcattttggaggccgaggtgggcggatcatgagatcaggagttcgagaccagcctgaccaacatggtaaaaccccgtctctactaaaaatacaaaaactggcagggcgtgcctgtaatcccagctactcaggaggctgagtcaggagaatcgcttgagcctacgaggcagatgttgcagtgagctgagatcgtgccactgcactcgagcctgggcgacagagtgagactccatctcgggggtgggggggggaaagacataattacaatgttagaatttcaggtactactaaatccttgaaggagaattacccaggcaatggagcttgccagcagcctgaaatcacacccagataacctcctctaattctgcaggaggctagcctatattcctctctttagttggatgcccagaaattaaatggaactgtaaggcactggttcacactgggctgtaattgactatttacttgtatcctcactagactgtacgtttctcaagagcagagaccaaatataattgtctttatatttttagatcccagcacagcacttcctaccaagtaaagatcaattttaaaaatgaatgaagtcaactgaaaaagctcccaatggccaaagctggaacaatttgagcaaagaataaagtaatgttggattataacccagaagacaaaataaataggcatgagtctatagtgacataaataattaaataaataaatgagggagaaaagataaatttactgtgcaagagaattctccataaattatgtcaatagtctaccctaaaggagagaaaaatccctactccttaagtatggactgcacatagtgatttccctccaaagagaatactttgaaaaggggaagaacagagtaactttacagtggacaaacctaaaaaaacactatttcagggaggtgatcaaggaggcccgcagtcataaatcatgttgataaaatgtacacttggcatggtgaaacaaaatggccctttatctctgtgatcttcctcacaaaaatctactgcccctgtctaatcatgagaaaaatatcaaacaaattccaattgaggagcatgccaaaatatactggatcagtatctttcaaaactgtcaagatcatccaagcccaggaaaatctgagaaacttccacagcccagaggagcctaacgggatatgaccgactaactataatgttgtaccagatgggatactgaaacagaaaaagaaaatgagggaaatctgaacaaacaatggactttacttacaaataatgtatcaacactggttcattaattataacaaatgtaccatagtaagatgttaataatagaggaaactctgcatggggggtggtatagatgagagttctctgaacaatctgctcaactttcctgtaaatcaagtagaggcaaaaaaataaaagttaaaaaaagtgttcatatagagcccttacttttcttatggttattttaaaagccacacacaaacaaaaacttggccattttgggccaattgcagtggctcatgcttgcaatccctttactttgggaagccaaagcaggaggctcacctgagcccaggagttcaagactaggctgggcaacacagagagacaccatctctacaaaaaaagaaattatattaaaaaaaaaaataaaagtccaggcgcagtggttcatgcctgtaatcccagcactttgggaggttgaggggggcggatcacctgaggtcaggagttcaagaccagcctgaccaacatggtgaaacctcgtctctactaaaaatataaaaattagctgggcgtggtggcatgagcctgtaatcccagctacttgggaggctgaagcaggagaatcgcttgaacctgggaggtagaggttgcagtgagccaagatcgcaccactgcactctagcctgggcaacagagcaagactccgtcccaaaaaaaaaacaaaaaaaaacttgcccagtttggactagaagttcttatgagagatccaataaaagcaagattaaaaaaaattttttttgctgggtgcagtggctcacacctgtaatcctagcactttgggaggctgaggtgggcagattgctttgaggtcaggagttcgagaccagcctggccaacatggtgaaaccccatctctagtaaaaacacaaaaattagctggcatggtggcaggtgcctgtaatcccagctactggggaggctgaggcaggagaactgtttgaacttgggaggtggagattgtggtgagccgggatcacgccactgcactccagcctaggtgacagagtgagactccgtctgggaaaaaaaaaaaaattaagactagtcaagtgcagcagtgagaagtggggaaagagtagaaaaggagttccatctgcaactgactgtgatcaatggagatagctcatgaccttcggaccagccaaagcaagattgttgactactattttaagcacagcacagcattactgattatcatcaggagaaataaagaatccctactcagtaggaagtactgtgctaggatatatacttagtacatccaagtattccacacaactctcttcatttcccagcttcctctgcagtgaggttgggcccacgtgactagtctcggccaactaagtgtgagtgaaatggaaggtggagtgtgccacttctgggccaaggaagttaaacacagatgtgctccaccctcacactcttcccttgtatgctgaccttggaggccttgtgttccagagagtgtcactacacatggaggaggccacatgatcccaacacgactctatcagagtgagaaagaaactttcattgtgttaagccactgagactttgggttcatgtgttgaaatggctacggttaattaccctaaaataccagtgattgcattcagcaagtacacgttcctttccttctgataaaaagttgttaaccctaacgcttcttttaaaacttgtgtatttctggatgtggttgcttaccacaggcgatggtccagtagaccagggagtctggagtctggtacaagattcggtaaggagcgacccgggcgctggagtccaacacaacatcaagggtacccaccagcaggcctgagggtggaaagtggggagaaacaggtaagaattgccttagtactttcccacattcccaggggcagcatgaacatgccctttcatgagatcttccaacaaccccatctcccactgaaccacaccttgaaaaatttcattttaggatgatgctggctctacacaagttgcacaacttgacaaggtcacgagaagcagtcgtgtccatctgattcagtctgccaggctgccccacatgttattttcatctgccccactttccatttatgtttaaaaaattagtacaattcagctcagcaaacactaattaaattcctactatgtgcaaaacaaaccctgtgggcacaaaactgaagaagacagcatccccagggcatttatcatcaagtggagaagaaggtcaggcagtgctttggtactgtgtttagaagtgagctagggccgggaaacagagggatcttcccatttccacagcagagtcctctgccatttgtgacatcagtcacgataaccagggctaaccagagcctggtttatgctatgaaatgatgcaggaataaggttgaggatcagggtctgcatttttagcacaaagtttagttctttcagtcaagaaccccagtgatccacttatccagggtttaccaggcccatgtgaaaacttgttcacattgtccaagtccagacaagcctgaatgttcagcaaaagaatttagcaatttatttgtaaggaatacaaatgcccagtataccaatgctcacttaagaacaggctgtaccttctctttctaggaggaaaattgacaaggaaaaggaaattaagagcagaaggcagcttagtgagcaaaggtggaaggtgcctctaaggtgaagtctgcccagatgacccggctgaggcactccagccatgcggagaacgcacaaccctgtttctcactcagcaatctttttccaatgttcccagacaacttgtcaggtatggtggtgacagtacaaggattctgacagcttcaaactgggaacctgtcatcagtgcaaatttctcttttaaccaccttttaaccacactgaagcgggattggcaccaaacattttctacagtattttaaaataacacagattacacacatacgttctccaaggtataataaactagatcccttaattggaaagatgaatccaaaagattcccataatgtaaatgcccacagttactctaaagctacatggaacccagtatagagcagggcttggactcagaaggaccaatcaggagctcagaccagctgacaatattagcccaagacactttatttccaaaaatctcccttttctcaattgccaaatggagacactattactaccccaggattgtttttgaagactgaaggtaataagacttaggggtaataggctgtttggaatgagggattaggccacctgaaaaaaacctgctaagatacttttatcgaattttacctttatttagattgcatgtttatagaggatgactttgggatagaactaatggtatttgaagctgggagatggaggctaaaggccccagcctcccttgtttgcaactgttgatactgaaagcagcaaagctcagtgccatattgcaggcttttcctgaagttttgctgaatctgaggcacaaattctgaaaatgttgccaccagtacctcatgttattttgtaataatgtcttgaggtttggttctggccataccaaataagaccctgatatgcacaatgccactgaaattcacttcccactgctctggcatcctggtgtcacggaaggagccataatctagtcaactcatgttcggaagagctcagttctggctctgactctgttataaccatttctgtggagtgggacaggccatttaacttctcgttgctttgatttcctcagttgtaaagtggtcataactgcccttgccttcctgaaccagagttattaatcaagaagcctaagtgaggtagaccatgcagaagtcctacagttgtccttggtctttgtccaagggcaaaaaatccatttagattcactccaaaccacagtgaccattagctgacctcaacataccaggaaaaaaacaaacaaaaaacttttgctcaatagaaattaacttgttagctccggcctgtatgaaatacattaaaaatgaaattcttacagcctgcaaagtcttccaagggggtagagttccacattatatcacacacatatgcatttttgtttgctttactgtgacttggatttactacagagacctctaatttcttaaatgacttttcacttatctacagatggaagaataggacacataaatgcatcactcataattgagtgtttgtaatacctctcacatcttgaatcaaaataagaaataaaatgctgaaactactacaagtgtcatatatgttggttctaaggcatacaaactttagtctgggtttagagggttgcaatcaagaatcagcctgtgggctaggcgcggtggctaatacctgcaatcccagcactttgggaggctggggcgggtggatcacttgaggccaggagttcaagaccagcctggccaacatggtgaacacccttccccattaaaaatccaaaaaaaattagccaggcacaatggtgtgcacctgtaatcccagcttctagggaggctgaggcaggagaactgcttaaacctgggaggcgcaggttgcagtgagctgagatcatgccactacaccccagcctgggcaacagagcaagactctgtctcaaacaaacaaacaaacaaacaaaacaaaaaatcagaaaaaaaaaaaaaaaagaaaaggacaaaaaagaatcggcctgtgtggtttaataagcctctgagtatcatcaaagaccaagactcttccaagggcaagcataattgactgggcagggcagagcagcggacaggggcagtcctggttctagaatgcttcaattctgactctgccacttcctcctggagcctcagttttatcatccttaatggctcactgaacttttgtcctctgtaacacaaaagaaggaagacctctgaaaaggtctaacccaatccacatatctccaccaccacaatgttcccaactaaaatccaacctcaacataaactattctaattaacaaagcctctggtgtcaattagagataaagaaaacccagttgcttaaagcagagccccctggagtgagggtttctcattagatgcaagttcaccaaccctacctctgcattcacaactggcgccaccaacttccactaagacttggatgaaaactaacagatatacatgtacgtagcacaggtacatgctgaaatattttcaagtaaattacagaaagtataatatcaggatattcacattagatacatttaaatgagagaatttctgtgaaaattccctgaacatttaaggcactggatatccaaacagaaagtaatattgtgaattgaggtatgcagttggccagtcaaatcaagaaacagactctttccatattaacccagaagtgctgagtcctttcatgcctggataacactgatcactcaaaatgttgtgcttgtctgtctgctcttgtctcccccgacctcaaacagcagcaaactcctaatcttttaatgccgtctcattcctactctactcttcctcccagttctgcctctataatgcctattacatttgtttaagattacttgcacattttgccttgtcccattttttcctcttctctccagactgagagttccttgagggcagggtctaattgattattttggacccacaggccctgcactttggagtccagtaagcactaaacacatggttgatgataaatggacaagtgaggggtgtgtgcatgtgtgtgtgtgtgtgtgtgtgtgtgtgtgcgttttaaacctaaataataaattatcaccatgctatctaaactctgttggtacatgaagtcaagaccctgggaaaaaggaaatactcctcctttgtcctctattgatgtagaatactaggagatgggaaatctggtctagagaatccccccgccccactgcaaaagcagcaacaattacgattttcttagaagtctcattactcataccttggaaatggctgtcaaaatactgaaccttttcttcatttcccacacaaagcgctgttttagcagctgttctagtcagctatttctggtgttaaacaatcttgattgcctaagataacgaaatcaaattacagccctcaaaataactcttctctgcatctacctattacattagtacagtggcatcttataatgtaaaagtgctgttttcaaggagattcagaaaacacttggcaaaattgttccatatttgcttcccatttggttgtgggcactggaagatgtgtgatgcacagtcaccactgcacaactgcagcctagctgggagctggtacaggtggcaggtccacagtgctgcagagaaacccccgtcagccctctgcaggccgggctatgtcaggagtgtgctgccatgcagaaatgtgctcatggaaatgatcgatccatctactgatgatcagggctaaagttaaactggacaggatcctaaagatcacttggcctccccgactccattagtcctgacgctggtccaaaatgaagcagagatccaggaaatccatggcagagtggtcaggggagtgggctcagctttggctcacataccagccagtcccttaatctctctgtgcccctgcttcctgataaagaaataatagtatctaccctagaaagtgcttagtatgcactaagcactattgtgtaatgaatcattcaaaacaatagaaaagtacaggaaattacaaaatacatgtaccactactctgacttttttaacactttgccttacctgcttccgatctatttttttttttaacagaaagaaaaggtaacagccacagtgaggttccctttgcactcctttaatcccatttccctctctccattaaccattcttaaattgttttgtattcttcctatccaggtccttatacttttactgagccatgtttttcatataaaaaatttaaaactgatgagtattttacaaatttgtctgcaaggtacactgcagcttatttttttcaatcaatatgtttgtaaaatttatccagaatatacttgtaaatctgattcattcattttaaaatattgtgcaatattccactatataagtatattacaacttatctgttttcctagtaaaggacattggatctatccacactttttgctctattatgcaactgtaatcgtattctgtttgcataaatccttaagcacctaagcacatttctttagaatggaattgtcaggtcctagggtaagttcatttctaaaccttattagatattacaaaattgctctctaaagtgctcaagaaagtgtgagaatacctgtttctccataatatctccaatacttagtattaccaggtttttttttttattttcaccaatctctagagtgagaaatggtacctgtttgttagttaaatttgcattcctctgattactaattaattttcttgtttattggccattccaatttccttttttgtgagttatttgcctttcccattgtggtgacatttgctaagaggtcccattagacattcagagttcaccatctagaagcttccatttatatacatactggatttccattcatttcagcaaatattcactgatctccctaaagccagagatgcagtatccttggatttacttctttatatatcttctatacacatgcaagacttttggctcagtacttcctctccagtgcatcacttccatgcctggcttactatctgcgaagatggtaggtttctgtaggccacctgctgccacctgttcttctggctgctgctccttagatgtaagtgatacattctctagaagtcttaacacttacatgatactggtcagaaagtaattaaatggaaacattcagaagcagctgctgacatacctacaaactctctagccataccataacttttacacttctttaatgagccttgtttgtctgcttgttactttttaaagcctccaaggctttgtacaagtgtttctcatcctggcaaacttctatttccctcaatatccaggtcaaggtcacctaatgcatgtgtccctgttttctccggcacgctcccaaccaatgttctcaacactcaagccccccaaatctcctggcaattaactgttagcttttttgggttctgccaaccatcttgacttatattacactaaggtaattactacattgtttcctacttcaaaaaaaaaaagtatggtttcctcccaccagaccctgggcaatttaaggacaagcactgccttatttatcttgggagtctcaaagcctacaataatgttcagcacattatgctgaatatttataatgtggaccacaaaattctcaatttgatgaacattgggagaaaccagaattattttaagaactaattcatctttgtaccatagtttccaatattataagttctagcaaatctgccttaaataattaaaattgtctaagaatcttagaaaggagacaaagacttgagaaggcagctaaaaatcccatttcaaagactgtgaggtaataatgcaaaccaaactcatatctgaaactgcttaccttgggaaatcaatttctccaatttcagaagtaatttgttactttttaatcagtattgaaatttatctggaattaagttagatcaaaagcagaaatattcagggaaaagacaagtctctattctcctactttggcaattgtcaataaacaagaaaattcacagatttaattaaccaattgaaacccttgtgcccaacacacagactggtaaatacggtttgcacaccatactggccaggggaccaagggagggattaggaaaatggttctgtgtgcaggtgtgaagaatgctgaaatggccaggtgagggtcagctccataattataaatgcgccagagttcctagaggcaccatagccaatgtgaaggtacatgtgagctaatgttggccagccacattatgtatgaaaggggaatacaggtggtggctgttctatgggtaaggaggtgggggatgtgggaggtttgtcagggaaggtggctgggacaggagatgggtacaatgtattgttctgttccgtgacctcaaagagtattatattattctcaggcgcaggtattattggcaataggggaaagagattagaagggcatggatagacatgtaaccaatcccaatacttggatactaccttcagtgtcgaatggtgggagcaattttgttttcataagtatcatacattcttccactctccagcatctctagataaaaatggttctcaacaagcctactatggaatgttattgttttaaacggccatccacaactctttcctctcaatttcaatagctgcttctcataaccccattctagctgcccctgtatcatggctgccttcaaggatgacaccgttacctgtggggaaggaaccagccttatctctctctctctctctctctctctctctcacacacacacacacacacacacacacacacacacacacaccccaattcatcattgttcgtcaaaagatgaattaagaagtctaagaaatacactgttgactcaattaggagagtgcttctcaaacattgtggctaagaatcagttttgccaactgggggacggggctgaaaaaaatcagtttttctttgttttttagttttcaatctgttacagactgacacttttgtaaaaatatgatgcatatggaatactaaaaaaaaaaaagacataaaaaatacaagcttccaattttttgattaaatttaacagacaattgttctaggttcctaaatgcttaatctcaatatctgttcttagctggaggcagactggttaacagtttaaaatttggtactttaagtcagcagtccccaaccttttggcaccagggactggtttcatggaagacaatttttccatggaccagagttgggggtggggtggtctggggatggtttgaggatgaaactgttccacctcagatcatcaggcattagattgtcttaaggagcttgcaacctagatcccttgcatgtgcagttcgcaatagggttctcgtgcctgtaagaacctaatgctgcagttgatttgaaacgaggtggagctcaaatgctccctcacctgccactcacctcctgctgtgcagcccagttcctaacaggccacggactgacaggtacttgtctgcagcctgacagtcaggaacccctgctttaaacagtattaaattaggggaggagaggctctagggcagtcatgttcttgggactgtgtttcttagaatcatttatatagctttacagagcacacgcaattctataactctcatttgggaaaaaatgactgttttcacaatgcaaaccaatataaaactcaacaaactaacataaaactcaacatatgtgaatgaaggaggcatgagggttttgttgtatgtttatcccgaggggcactggttaaaaagtgctgggaatatgaactagtgtgttaggtgatccccgagagacccctgcctcatttcttacaaagaggggagtgagctaaagggagaagaatgacaaagctaagagaggtggagcgcccactctgtagaattttaagcagtattctggatcacagggtctttgatatacatgttcatataagtactcacaaagtaaatgctcaacaagagagagagaagccgtgactttcatattttccacctcaaaagataaaacacaggctgggttatgactaaacaaacagagcagaaaactaaaatctgaagagcattttatctgtatccaattagtatgtgctgctcaaatctcctaagcaccctcaaaaggccatgtcttccaggagctgttccatttcccctgcaagcccatctcttaaagtcacaagcacctgctcctgcataaagtgagaacagttggaatggatttttccttctcctgggtgggggggtggtctgaggaaggaatgattcaaatactttattactgcaataccttgctctacaccctaatcaggaccaactacataatctgtggggcccagtgcaaaaagaatattcaggaccccttgttaaaaaattcttcagaatttcaaggcagcagcagtagaatattaagccaagcccagcgcttttctaagtgtaggttcctgtgtacaagcatacctaggaagctggccttgaaaccccagcagtgtgttggctcattctttccccacgaacaagcttgctgctttcagactttgtgcaggactcaaatctgctctgatacggaccagtgaggacaatgtgattgaagttattaaaaaattacgccaagccttgtgtgatctaattcctcaaagaagcccctcaaaaggcgggggcttaatttaatttcccctcaagtcccgtaataggaaagtggatgctattgtcttagatttacagctgcttctgtgtgcaacaggaagttatattgattctaatcttggctgtagaggcgggtctgaaaacctaaaactcaaaggtcaaggtcagccaaggtcaaccttgagaggtaggaaggaggggcctttttggtgtggtaggaagagttcatcgctatgaagcccacctctgtttctaagagattagctatatcaatcccctcctggatacctgggggcaatacccctcagatcccttctctcaggaaggccacatttgcagaagccactcactgtcctgagatgtcaacccttcttctaattcatgtatcctcttacgtaattcaactgccaataattgagagcatcgataagctgaagaacaacttggcaacgaaataatatgaaatagaaataattctgaattcaaaattacatttaggtaatgacctacaatgtctaaataaattatagtacattgatataatatgtagacatttaaaatcataccttcaagtaattatttcatgacatggtgaaatgcacctagcatatgaaaaacagcacaaaactaattactattctgtatgatcccaatttgtctaaaaaagtataatataacctatattacaaattacaatacatgtattaattttaaagaatacaaaactaaatatgaatattaacattagtaggtgagatgacaattctgctattttatggtcttctgtgttttcaaaaatatctcaaatgtacattcaatacatttatgatgagaaaacaaaaaatatataattacctccaaccttttattttgggctttttttactcaaagagagctcatgccatcaagcaaacagacagttaccatggttatactaacgctgctacttcacaacagataaccacaggttagaaatcttgttgctaggttgcaacatgctagctaagagtccatatctaaatgagaggctccctcaaaaacacacttccttggagagggacctggcgtttacattttagaaatttttttttgaagttcattttttccctctggtatacggagttcatcaatgctacaaactggtacgtattcatacacactgaatcacattccttactccagttgcaggcacttgatgtttaataactagtttatctcaagtcaggaagtttacagtgtcaaaatgaatcaaattgattttaccatttttatcaagtattctctgaatatgctctttaaaaaaaaagaatatatatatatgccaggtgcggtggctcaggcctgtaatcccagcactttgggaggcccaggcgggcaaatcacgaggtcaagagttcgagaccagcctagccaacatggtgaaagcccatctctactaaaaatacaaaaaattagctaggcgtagtggcgggcgcctgttgtcccagctactcaggaggctgaggcaggagaattgcttgaacccgggaggcggaggttgcagtgaagccgagatcacgccattgtactccagcccgggcaagagagtgagactccatctcaaaaaaatagatagatagatagatagatagatagatagatagataaatgggatcctgctctgttgcccatgctggaatgcagtggcatgattgtttccggaacaaactgagggtcgggctgctatttctcatggcctaataacgagatgcaaatgaactggggaggaagaaagtttttatttctgcaaccggttacagggagaaggcctggaaattatcaccagaccaactcaaaattacagttttccagagcttatataccttctaagctatatgtctacatgtaagtgtgcattcatctaaagacataggtgattaacttcttttaatctataactaaggtctgagtcttgaggttaatttttaaatttttttatagaaatgggggtctcattacgttgcccaggctggtctacaactcctgggctcaagggatcctcccactttggcctcccaaagcactgggattacaggtgtgagccgcctcatgggccttccactgagtattcattaaatctctaagtacccatggtgttgccttcagctacatataagcaagacaaagaaaaaagcccaggagaccagccactctgtgcttatattaacaaaggaaatgccaggaaagatgcatattaaacttaataatggttacctcttgggaatgagattgatatggcagaaatcagaaacattttttattatttgaaatatatttttaggccaggtacagtggactgtaatcccaggactttgggaggccaaggtgggaagaccacttgagcccaggagtctgagacagcctgggcaataattaagactttgtctctacaaaaaaaatattaaaaattaagcaaggtgtagtggtgcatgcctgtagttccagctacttgggagactgaggcaggaggatcacttgagcccaggaggtagagggtgcagtgagttaagaccacaccctgcacttcagcctgggagacagagtgagaccctatctctgaaaaagaattaaaaaaaaaaaactatattttttaaagtaatttctatactattggaactatacactataaaacattgtacttttataatttgtacaatgtacatgtattataatcaaataatgaaccactaggttggtgcaaaagtaattgcagtttttaatactataggatcaatgaaacattaaagatcctactataagagtttgtaaatgatgaagccacttaaccaatcagctcctgctgctttctgtaaaggtcactggcaaaaatcagaatcggtaacccttggcataatattagcctggggggctgaagaggtgaatgcaagatgatacagaataaggcaaccttgtgcagcctttcaccagggactttgattagtgcaaacacacaaggctaaaacgtggcctaggatgaaaagatgagccacttcccttgttggcaaaaaagagtcaagctctgtaaaatatttaaagaggtttattctgagccaaatatgagtgttcaaggcctgaggcagtctcaagaggtcctgagaacatgtacccatggtggctgggttgcagcttggttttatatgttttacagggacataagacatcaatcaacacatgtaaggtgtatatcaacttggtctggacaggaggaaccactcaaagtgggggcttctgggtctttggtggattcaaggattttcttaatggcgattgaaagttatgatctaaagacttctaatcgttagaaagaagtggttgggttaagataaggggttatggagaccaaaattcttattatttagatgatgtctcataggtggccactctgagaggcaacagacagcaaatgttttctcttcagacctttacaaggtgctaagctctgagctaatctcttcaggatcagaaaaagacctgaaaagggaagactttctacaaaatgtacatttcctccataagagatagctttccaggaccattttaaaacatgctaaagaaatacattttggggtaaaataattttttcagagtctgctctctgtcatgtgatgctatactagagtcaggttggaattaggcaccttactgctacaaagagtctgttttggagcaggcatagtggctcatgcctgtaatcccagaattttgggaggctgaagcaggaagattgtttgagcccaggagaccagctcgggcaacacagtgagatcctgtctctacaaaaaaatttaaaaattagccaggtgtggcgttgtgcacctatagccctagctactcgggaggctaaggtgggaggattttttgaggccaggagagatcgaggctgcagtaagcagtagccccaccactgcactccaacctgggtgacagagtgagaccctgtctcaaaacaaacaaacgaacaaacaaacaaagcaagtctgttttgtcagtcttaagatctctgttttaatattaatactggtcagttgtgcctgaattccaaaggaaggagagtataatgaggcatgtctgacccccctttctcatcacggcctgaactagtttttcaggtttactttggaatccccttggctgacagaaggggtccaatcaatcagttgggggagcttagaattttcagtttataccctccagttatcttgcttctggtctttcagactggctgcagtttgcatacatcctggtaacaaagcccagcaagttgaattcatagtaccttgaatgactcctgttccttataacccaaagtgaccaacaaaaaccctaactaacccctttggctccatctggataggctctttgagtaaatgttcccttccacactatagcaagttatataagaaggtgcaaaggcattaacagcaataatgttttccagtcttgcatccaaatattctaacacagataaaaatagtggctacagactgtaattaaaacaatcatgctatttgcaagggagagatacagtagcagcctggcttgattcctgggagtttcgtggaacctcatcactttgagggcaagcaactccacctgcattccatttctatcttagcctttatccacctggataagactgagggacctcacagacaaatttcattttgtgatggataacgtgggagcaatcttcagctaaagtctagataaagccttaaagagaaaattgagctcggaagacctgaaaataaagaaaacaccctggcaccaacaagggagagaaacaaaacaaagaagctcaccaaagatggtttgactgtgcaaaaccatgggtacggtaaccagtaacacccttattttatcaagatgtctattgtaacaggatgtgttttcaataaatgtaaatgacctgtaaatgtagataagtcccttacagaatatattaggcccaactgaaattttctaagtagtttagtcatggcctgaagatagcttgaaacctgttttgaaaaacattgataataggttggacacagtgggtcatgcccataatcccaacattttgggaagctaaggaaggaggattgcttgagcccaggagttggagaccagcaagggcaacacagtgagactcctatgtctacaaaaagttttttaaaaatcagctgggtgtagtggagcttgcctagagtcccagctacttgggaggctgaggtgagagaatccctcgaacctggagatggaagttgcagagagccatgatcgtgcccctgtactccagcctgggtgacaaagcaagaccctgtctcaaaaaagaaaaaaaaatatcaataatggatgagaagaaatcatcattggcaataacaaaagtagtgtactagagttgggggcccttctttgcaaagtaattacaaagtcatttccaggaaaccattctcttttcatgctataaacttgtcacaacagaggggtaggataccaacagtatcactgactccttacatcctcagttagaaactgatgagcaaaaacacaaggtgggagaaattatttttatattattgattagtgaatggggaaatttaaagtaatgaagaacttacgtttttttcacccttaattatattgtctacacctagttccttaaagcaaaaatcacacacacacccacaccctctacaacccactatgctgatttaaaacatgctcatttaaactgagtttagagtaatgggggctgtaaaaaaaaaaaaaacacaaacaacaacaacaacaaaaaaagcaactccaggtttggtctcaacctatctctgcatttaataaaacaataatacaatgaaagacttgggttatatcaaaataaatattttgaaactttttaaaagacagtcacctgcaagaatttattttatgccagtgtttctcaaagaatatcctctttgaataaacaaaggtttcactttcttcctcacgttctgttacatcaccctaaataaaagtcataatcctttagagaatcaacatatgttacctgaaccaggagatgcagacaggagcttttgcccaactttcctgtcttgttttggagccggagttgggagaggggtcaggaaagagagagggagaggggaaaagcccaagttgttgtttttaaaattttccagttataaaaacaacaacatttaagctgcttcttctaaccgtagaggccttcctgttcaataactatgacataaatgattcaataatggcaatgattctttgttaatggctaattcaccatgcataatccttttagacatgactcagctttcctgttgggacaatatttcatttatgactatcaaattaatttatctgaagcatatactgggtacaataaaccttcactttcagctgaaaatgggcaagggcagcactaggcatctcatctcagaacttgctggcttcaaaacttttcctttgctggtggaaggccggggcctctatgaaatctagaacacagatcagggaaacagattctttctacagctcaggtgcagcgtgaagattatgtgattgggacaagtatgtgtttcatgttctcagggttcccactgggtagaacacagtgcagtcatgaaagacagactggaaagccatggtatccccaggagccccccaacttatttctttaagtctacaggtcacaacttcccagtggtaccccaggaaatgatgacaagctagcaatatacttgttctcttggctcttaggataccttttgtgccctgcaaacactatcattttctaagtatgctatgatatgaaaataggtagaaagctctgtattagaacaaataaagcataaaagcattttagataatagtgctttactctacaatatttctatacatttaatttcaatgcatactgatgggattcaattgagtaattagtatatactaattcaattgagtaaatagtatatagtttccccatagtttgcttttaaaaagttaaatgaaatatgctttattttatttaaatgtgatatacctagttttttttctgttccttttttcagaaaaaaaaaaaaaaaaagtacattcagctatgcacattgggaggtgactcacaggacatttgcctgatctttatgctagttctttgaacatttttattaagacagaacaatcccctctttgcaaaagtgtgaggatctctggtcttcattactctctcctctgaatgaaccctgaggaaaacagagtcagagctaccctatataatcctccatgtaataattaccccacataaacccagggcctcatacctccttagctcttcccagacagtccaatgaataagcaacaacaatgactgaacattttcacaacgaacaagccacatgattaggaaattaccaacatggctattttcaaataatttccagaagatcaccagggaaacccctagaaaaactaagctcatttaacttaaatccgaaagagcacccagcagtctaaggaaaaacatttagatgtttgttctggcctatttctatgacagcaataagaatgtccctaatattcctacctagtgttgtgtaaagtaatcagagaaagtggattcagtcttggcctggtggctcacacccgtaatcccagcactttgggaggccaaggtggatggatcacttaaggtcaagagttcaagaccagcctggccaacatggcaaggctgtttttatttttgtaaaaacacaaaaaaaatttgtatttttagtctctactaaaaatacaaacattagctggctgtggtgggtgcctgtaattccagctgctcggaggctgaggcaggagaatcacttgaacccaggagacagaggtgacagtgagctgagatcatgccacagcactccagcctgggcgacagagcaggactccatctcaaaataaataaataaataaataaataaataaataaataaataaataaaagaaagtggattcaagtcttcatttccccactcacaagctgtgtggcttcagacaagtcacttagcttctctgagtcatagtttcctgccactacatcagggatatttcatcttccctgctagtctcccagggctgctgagaaacagatgacatactgtgtatgggagtgcttcaaaaactgtagagtctctcactcatgtaatctaactaggatttttctttaaataatgcttaattttggagcagggaaggagcgtcaagacataaacttgcatcttctttttctacagagaaggaagctgggcactggaaggaagtgcttgctaaagttatgttctgaatcccaggaagtagtcaccatgattattagtgtctagaagaggtaaaggaaaaatatggccttagtcctggaggcatgatgtgatttcatccttagcatcatgaaatagacactgagcacctgtggagaggaagctttgctgggcactagaaatataatctatcactgatgtctttgagaataggatctggctgcgaagaaagaagcagcacatacaaatagcaatcattagaatggtcatttgctcagtcagttcaagggtacatagctcaagggtaatacagaagatgttacacggtacttacccaaggctggcatactcatgcaggagactgttttgaactgcctcctggagttgggtttggtggaaggtagcttttcaaaaccacaggctttgcattaagaacctgggtggaatccctgttccactgcttcctagggtcatgaccttggggcaagctatataactgataaaaaccacaatttcttcacccacttaatgaagataatagtatcttcctgagaggttgtaatgaggattaaaggaaatattgcacatgaaccaattttgcacagcacctggcacttggtaggtgttcaataaatagtaccgattgcggtggctgaaggcagcccccaaggtgggaaggcacatgggatgtgtggggagcagtaagtccatcagctcaatagcaagggagtgcttgaaaggtttgggatagacatcagattgtggtgggcagcctcaagataaactgcttaaactttatcaataaaacaaaaagtttctgggctcaggagtcacatgtgttgttgtataaaaaccactctaacaacagtgtgtggtagttaggaaagagacaacaggagcagaagaccagttaggaaacttcttatgaggaagaggagatttattaagccccttcttttaggctaggaggtttcctaatacagaattatctctttaatctgcacaaaaccccagctaattattatctccatttcacagatgaggaaatggaggctgagacattaagtgagcaaagctgggatttgctcaactgtccaagccagtctattctgctgcttcccacacacaggaaatgcaggctgtggcccgtcagggccagtgaggataccagcatattacctgggtggtaatattggccatcccagagaagagggcaagttctctgctgttgctatttctgttaggggaaaggctccttaatgcaccctcttcctggaggagtaacctttgaagagctggtttctaaggtgacccgtaagcttctaacctcagtgacaagttccagcctcagcaggtttaatattttctgtttgttctctggaagggaacaacatgacccttgtaggtgagaccacagaccagctctttgtgtgtgcgcccagacaggagccacagtggcccaacaggcaagtgcagctcctttctctctttgctcctggaaagtgctctttcaccgaggtcagagccctcactcagctcagccagtctttgaagaaggttcccggacttgcaccgcacctaactggccgcagataagtggacctagaagggtggggaagactggagatcctgggggcccctctctgagggtgcagcggggtctggggaacatggtctccatttgcactataaatcttgtttatattctggttggctttgttacaaaaaggcagaagtgaaactaaaatgtactagatacgccacacatacactatttcaattaacccttgaaacaacaatcaaatatcatcagtaatagctaacagtggtgaccttacgccaggtaggctcctaatcactttatgtgcattttctaatttaatcctcacaatatcctaagacatacatgcaattattatccctatttgatgaatgaggacactggggcatgcagctaccaggtggcagctactaagtggcagctccagtcattgggccagggcggctggactccagagcctgtggagtgtcgatgcatcagcttctaggataagttcaagggagttgaggatgctaagagggaagtcacacaaatacaaagaggaataattggactttctctagcttccagaaaattcaaccttatttcaatccctacctacttcagattccacagcatccttcccattttcattatttttagctgataatctataacaatttcagtattctccgtaatccccatttgtgtaacttctggaatgttgatagattccaaacccccatcttcctgctggttttattaataacaggatcattttgacccagtgtctagaattgttctcctgtgactgaatgcccgtcttgataacttgcccaacacctcatatctcctgagcatgtagtccttctacctgctcacatctgctcatctcggcctagaccttaaccaactgccttctgctgagcccttaccagactccatgcctagcctcagtggatctacatacctagcccattctcccaggtctggcctgtcccatcaccaggccaggatttattcctcccctgtcctgggactcctataggagtctgttttttaatcaatggaagtagttaactgaagttcaattcatagtagcaggggagcctatggggggtgagaaaatgtttactcagaccaagcttcaaccataatagcttcaaatggcatggaaacaaggaaaggaacatgcctgagaaattccactaatcacttttaaatttcactcattcattttccattaatgaaagagggggaaaaaagctcagaaataaagagaagcagcaatgtaaactgcaaccaagtgtggttgttgaaatccttccccttaacctttccatctggtactgcagataggcaggtaactcaatgtcttaaagccagcaccataaatatttttattaaacttggggcagaggtctaaatatactccaaacagcaaattcatttatcattcaatcatttgttcatctgggaaacatttgctaagtgacttaccatgtgtctggcactgggctgggtcctggtaatgccatgttgatcttaaggaaccttgggatgagtggggagaagctaggctggcaaatcacataatgatagagaacactaaaattctgacctaatgataattcttaaaaatgatacccttgtaaactatctttttactcttcaattattattaaaacaaataaaacattattttctgctccaggctggtgttatttcttttttaaattttactaggaaaagactctcatcactactttgtctgaaatgtcactctcaccccctcctggacatgcctctgattctcccctgtcctttccttctcagaacatggatttcaccgggagttctcctccccattgagttatagcttattactcttcggggttctctctcacctctcaatccccctttttcttttctgtcccttccccactctttacttgattcaacctctttgtgagggggtaaatgtttaaccttttcttaggctatcaaatgacattgtataatggaaatcacaggacccactcattagagttcttccaaacaagaaaggccttactgtgtctgagtgattatggcatcttgaattacaaactctaataatgcttagtaattactgttacatgctatgtactctcagcttctcttctcaggaccctgggtaacctgcatgaatacaaaggatgtccatgttccacaacttagatcattatggcttcaacctgcgttaccaaactgccagtgtccttgaagggtttagtaagagaaggtgtcagccacagacctggcttcaggtctttacttcccagattttttttgttcttgagacatggtctcactctgtcgcccaggccagtacaatggcgtcatctgggctcactgaaacctccgcctcctgggttcaagtgattctcctgtctcagcctcccaagtagctgtgactacaggtgtgcaccaccatgcatggctaatttttgtatttttagtagagacagggtttcgccatagtggccaggctggtctcaaactcctgacctcaagtgatccgcctgcctcagcctcccaaagtgctggaatcacaggcgtgagccaccatgcccggcctacttcccagtctttaacatagattccttcaaattgggacaggctcttagaattactgaaatgagaaaaattttaacatataagccccacaaactgtcgtatatttatttttaattcatatttatttatctatgttatttttagaaacaaggtcttgctctgttgcccagactggagtgtgtggtgtgatcatagctcagactcctgggttcaaatgttccacctcagcctcctgagtagcttggactacaggcgtgaaccaccatgcctagctaatttatttttattttatagagacaaagtctgactattttgcctaggctggtctcaagctgcttgcttcaagcgatcctcccacctcagactcccaaagcgctgggattacaggtgtgagccagccaaaaatgtcaagttaaaagatcaaagccacttctcaactattgaggtggcattgctttctgaacgcatttgagatactaaatgtcataaaaataacaaatgatggcatatttgtgaatgggaccaaacaggcctgattaatgcaaggccatggcacagtgtcccggaccagctggtcatttctactctacctcttctttctcaccatccactcaaaagtaccaagaaaaagaaatgggatacaagctaaggacggagctggtctgttaatagttcaataggcaactggatatagctttgtccagcaccagctccctgaagctatgctacagacaagaatgatgtagaatgagccataaatttccagcctcacataactatgatctggcccaggtacacagcggccattttctcaatggcaacctaaccagcactgatgcatacaaaattttgaaagttttcttcaagattctctttgaattttagagtggtgaaggctttctaactgtgactcacaatcccaaagccatgaaaaacctgatatattcttctacataaaaattcaaacttctacatgtcaaaaacaccattaaattaagagaaattggaaaaaaaaaaaaaacttgcaactcagatcacacacaaaaggctcatgtacctaatatacaaagttcctaaattggtcaataagaaaaggagcaaccaccaaaaacaaagtgggcaaagagcaagtacaatttataggaaaaaaatctataaatggcttgtaaacatgaaaaaatgttcaacaacacttaaaagaaaatgcaaattagaagtacactgaaatatcattttcacttgtcagaatggcaaaaatccataatatgataacacattctgttttgcaagactgggaaaacagacattcctcacacatggtttgtgagcgtgcaacttggtaaaacccctaggaaggggaatttggcaatacctatcaaaattgcaaatgcatataccaatggccctacgatttcacttgttgaaattttttccacaaatatatttcacaattagccaaataacatatgtacacggctatttattgcaacagttttatagtatatgccgaaaaatagaataaacgtccattaacagaggagtaaataaaatgatggcattgccatataatggaatgtgcaatcataaaaaataaaaagcaaaagaaagatgacatgctatgttttgatacagaaagatataccattgtacggtagatgaacctgacagcaataacttaagcataccctgagaacgaccctgtatggtctatgcacctgattgtgtgttcagagttccaagttaaggaattcaagaggagccaacctggagattcattcctcatctatgaggaacatctgaacccctgtcaggtccagcggaacaagagctgtacaggggatgggggccctttgttttagtttaaatgaaggttgctgggtggaggttgttacggggagagtgctaagttaaaatgtgatataaagtgcatgctttttacaactggtggcagttctcctgtccagctcactgacactggaccactctggaaataagttccctctagtaaaaccccatatctcgtttgctggatgcggatctcatctttggcctcttgagcctggtgccttccctcctggagttaataggggttgggcacggcaattgttcactgaaaaaagcacggtatggaaaaacctttttgtacaaaggattcagggaagtgtgggataaaattacatattgtaatttgcttgtacatgcaaaaagaatctggagaacatgaaaaaataaatacaatggtgacctagagtcggtgataatagggctgagaaattttccactgtatgctgtttaatatctttggatctttgaaccatataaatatattgttactcaaaactttaaaaaattggccaggcacagtggctcatgcctataatcccagcactttgggaaaccaaggcaggtctcctgatcacctcaaactcctgatcacttcaggtcaggatttcaagaccagcctggccaatatggcaaaaccccgtctctactaaaaatacaaaaattacctgggcgtggtggtgcatgcctgtaatcccagctacttgggaagctgaggcaggagaatcaatcaaaccttggaggtggaggctgcagtgagccaagactgcaccactgaactccaccctgggcgacggaatgagactccgcctcagaaaaaaaaaaattttaaaaattttaaaaagtatatttgtgcctgtgtcaaatacattctttgttgagaacactaataaattattaacctcaagaattaggggatgcttgagggacagctgctcagggtcaacatgcgcaaacttttctcctcttacatcttttcctaaatgtgaattatggggcttgaaagtagagacattctcacaacacccctacccccaatactaccttgtcttgaaatggtgttacttaaatacacacaaacataaaaccaagtataaacttcttatgttcaaagctcatttataatataattataaaaccaagctatatttaaaaataaatatggtaaaattataaaaccaatgaaagtctgaaataaccacatttacttattgtgcaagatgagattgttttgttaaaactaaatcacgacttgatcagaaatgctgtacagagtaacatggcccaagttctcctgaattcagcataccacattatctttgttacacaaagcagttactctaccacaacttttctctattctttgcttagtgtgctgcaaaatcatttgcccttcttttgcccaaatgcatctgttacatagtcaagctgcctctgtcatttactcaatatctcataacaactgatatgcggtcaacccagtcataaatccaagtgccaactcaaacactaaagttgggtgtcagtggtgagtcataaggtggtcattctgataaccccaaataaacttgtatcaaggttatcttgttagcattcttaacatcataacaaaaatgaaaatatcaaatttaaaaattatagagagaacttagactctgagaggtatacagatccccagcagttcacagagcctagtgtgcaaaacacagccataatgagttaccatctaattatctgtaatttgtttgaaatgcagtgattgcccctattcactgccccagtggaagactctactgtggatctgattctcaagcccctgaggggtcagactcctgactacctggctctctcctggctcctgcatctactttcacctttgattctctctttgcatcactgcccacagcagtggggcaggccaggccccattctggtggccacgttcaggctctcaaagcccagcctggggcagagtcccaaaccacctatggcctaggatggaagcgtggacattttgtgatgctataatccccattcagcacaaataactattttccataaagggcacatatattacagtgtgcatttgaaagcctctcattaagtcttatcaaaaaccaagaaactaatttccatattaaaaatctattgttctgactcagaatgtgctattcagcagattcttgctgaatacagtctcttaagcaaagaaatttgtcatgtatttctgcatccttggtgcctacatgtgataagcacctaatatctgttccatgagtgaacaagtgaataaatgaatgaatgaatgagtgacgaattagccaggaagttaaaaaaaaaaaggggtgggaatggcataacacccatcaaagtactacctgctggtaaactccacctgagcagtcagttggcctctctttgctatctctagtttctctaattgcacggaaggagtattaccttttgctaattaaattctttctccagataaaattttctttaagaaatcatagtctaccagaaaaatagagtagagtttccatgcacatttcttttattttacttttttacttttaactctagctcctataggaggaaggacacatttatttttaaagtatttgcagaagtagtatagggagtcattctgatatttggcctgttgccatggctaaagctaaaacaagcaggttctactggcccaaagttaataaagaaagtaagatggtaaacactgttccaccaaatgcaatgcacacagttgttataaaggtcactggctacatactgcagacattcttttgataccatattctgcaccagtcaggaatgttggccataatccaatgaaaggggaaaataaacagaattctctcaaagtcaagtgtttctgggttatattaaaaaatttttaactttaaatggtaaaaaaaaaaaaaaagtaacagttttaacaaaactttcaattaatttaagttagccatcttagaaaagtagaaatctacttgttttttttgtttgtttgttttgttttttttgagacagtcttactctgtcacccaggctggagtgcagtgatgcaatctcggctcactgaaaccttcacctcctgggttcaagcgattcttgtgcctcagcctcgcgagtagctgggaagctgggattacaggtacgtgccaccacgctcggctttttttgtttttttgagaaggagactggctctgtcgcccaggctggagtgcagtggctcgatctcagctcacagcaacctctgcctctcgggttcaagcgatcccccttcctcagcctctcaagtagctgggactacaggtgtgcgccacccacacctggctaatttttgtatttttagtagagacggtgtttcaccatgttggccaggctggtctcaaactcctggcctcaagtgatccacctgactcagcctcccaacgtgctgggattacaggcatgagccactggaccaggtcgaaatctacttctctggatgaaaactgaggcacatggaaggtaaataaattttcagtgtcattctggggcccatgctagatcctcttggcaatgctttaacatctttctattcttcttactctttcctgtttttggattttccctctgtcatgcagtcctcatttgccacagccattaattggttaccctctctgaaggttgacatttcacgtttcccataacgacaggatgaaaccacctcattggatctcagaatgtgaagctctacgtaaaagtaaaattacacagacgtaatgtgtatactagataatttacttttcataagatatgagagatatgcatagtttgaacaaatcctcagtttcaatgagatttaactaatcccagaagattctgatgatatgaaaatgagattgcactcaaacacattctcgaactgcaatttatccatcacaacagcaaagggccccatggaggcaccagggagatgataatttcagttccatgtaacaggttgcacttcccttccttttgattttcaaaatagaataaaaaataatgacacaacagggtttttctcccttgccatattcctttgtaaaaatccccttttgggagggtaaggcagaaggagcatgagatcaagagattgagaccatcctggccaacatggtgaaactccgtctctactaaaaatacaaaaaaattggctgggcctggtggcatgcgcctgtagtcccagctactcagaaggctgaggcaggagaattgcttgaatcccggaggcagaggttgcaatgagccgagattgcaccactacactccagcctggtgacagagcaagattccatctcaaaaaaaaaaaaaaaaaaaaaaaaaaatccccttgagtggttatttcattgaatctgagcaaacaactattttttgtctttttttcccccagggggtacccagcactgagaaagcactgttttgaatgtattgtcaccacccacttttccaggtattttgttgtggcttctgcagggccaaaattctccattttagcaagagccagggtttatgccttcccccgtatagactcctggaaatcaggcagaaaaaagtcttcacccactttatgtgtctctttgtgtaacttcataaagcttcagcccttgagtcccactctgattccaggcactaaaaagctttttctaagagttgaatccttgatatgataagtaagcctgcatgggaccatcatgagtagctcttcctcatcaggccactgtaacattaatgtctatcctatagcctggtgtttgtcaacgggccactctgagaccaaagggaacctggtcaggaaaaagccctctgccttacattgttggtaccaggggatatcagatgttgtctaagactttcaaagataccctgacaaataatggatctgacggcactgtctaaatgagacatcaagaaacaggacatgggccgggcatggtgactcatgcctgtgataatcctagcactttgggaggccgaggcaggcagatcacctgaggtcaggagttcaagaccagcctggccaacatggcaaaaccccgtctgtactaaaaatacaaaaattagccaggtgtggtggtgggtgctacaatcccagctactcaaaaggatgagacaaggagaattgcttgaacctgggaagcagggttgtaatgagcctagatctcaccactgcactccagcctgggcaacagagcaagactccgtctcaaaaaaacaaaaataaaaacaaacaacaaaaaagaaatagaacatgaatttgcttgtacatggaatcacctgatgcacaacggtatggagctgaggcccacagggagcaagtatgaggcacgagtacttgcactctaaaatggagaatcctgcagatataccttcttactactggaactactactgtccattctgaagatgctttgagctggtattccgaagattcagagagtaattgcttgtcatcaatgaactcaagttaaatgatgctcgtcctttacccaaagacagtcagccacattcttactcagaccatgggaccatttgaacttgcttttgaggttctagaaatgcaagggggaaaggcaggtaggctgcagagggtttaagcaggtagactcaaggaagactgcctgtgtttacataccaccaactcaagcacttattgctgagtagcttctcactcagtgccatcctctgcagcacaatgatgatggtaagtgctacttattggctgttgtgttggtcaagaagagagcatgtgtaaggcactcagcacagtgccaggctctcagtaaacactcaattaatattacatattattaggatcactaattattatgtggagtctcactgcccaaatccagaaattgtctcctgactacccattaaagaaggaaaaagggctgggtgaggtggctcacacgtgtaatcccagctacttggtaagctgaagtggtaggactacttgaggccaggagttcgagaccagcgtggccaacatagtgaaaacctgtctctataaaaataaaataaaggtttctagaaccaccaaaatgattgattcacaaaagggtaaatggtttccaagctgttgcgtgtcttatagaatgaacacctggtctaaaatcctacacaatggcaccatagttttaaaacacatacacacacacacacacacacacacaccccaaacatttgcagggtacttcagtgcactcactacaaatctgatcgtcacaaaaactcctgaggagcagatacaattttttttactttatagctctatgaaaaaaacacgctggtggaatttggtctcaaagccaaattttcttattctaaaacctctcttctttccaccataccataaaagaaaatgtgccttaactggtatattggtgttccatctgagtgatgtgcacattgcataaagctatctggatgagagggatgggtggtgctgaaatctagccccagccctgcgtggaagcctgtgcctttctggtgacatagctcagaaaggatatctttttctaagtgcacaatgcccacataggccctactcaggtaacggctcagaagtcaggctcttaaccataagtctatgctcactagtctgctgtccctagaagtagtaccagttgaaaatgcaaattcaaaggagtattgataaacatacgaataacatataatatgcagtggttttaatttattaaatgggaatgagacttagaggtatgggagatattataccttaatcttctccagttgacctccaagacatcaagtctccatggacagttgcttgtctttgtcagagacctgtcacaggtcttatttagaaagaaaaccaaacactaatggatatctttgggcagttgcaaaatatttaaatctgcaaatacattctgccttaatagccagatactattgtaagatgtctcaaatataattacaagaagacttttgggaaattagaacacctttcccatttaggacattgttactgtttactcacccatgttctccaagtcctaaataaaacactgctcagttctttcttcctctcattaagtacttatttaattaactgaaatgaaatctggtgttggtcgggtaacatcagccacaccattacaagttaaaaccagtttcaacatagaactcaagtcttccacagctgtctgtaccaaggaacataacaccccatcaagccctaaaattccttcactgttaacaggaaaccagggttttttttggtggaaagggtgattatttgaatcagtaacactttggggcaaatttcaaggatgcttaatgaatatcaggaaatgaaaattcctattgatacaatccaacagataatatatatgtaaattataacaatatacatcatggtgacactgtacaatacaatcgccactataaaaatagcttctgactactgatttcagttacagcatgaactctccaatttccccagtcctcatcactgcagactgtctccttgacgttagagctgagtgtcagtttccatttatcaccttgtactcttaaaattaaaactacaagcattgttcatagaaatgtacctctatagccataagctgtatctccatccatggtggaaaaacaaaaaataaagagaactacatattttaaaatatttaggaaaaggtatctatctacacaataaagaatattcctaattgtttaaagttttgaaaatttgacttttacaatacagacaatatgcctctttccttactcccctttgaaaataattatgtgatttttttttaaatgccaagagttattaaatgtccagataccaatccctcctttgttcagctgatgtcaggaccagacttgcccaagaaaagaaaaagtctttcaagagaaatctgggagatgttttctacacccttcaggtttttccgggacaaaaatttgattctctgtaatgcctagacctccattttccctattaatttcaacaaacaccgctacaactttaaactaaacattatattcttattatgtgtgtttacatactcatttccatgaagtcataatcttattgactatacctgggcagtctggacaaatggcctccagatatctgttaagtaggttttctgcctgtttctactttgagtgtccttgaatgaagtcttcacagggtatatggaatctaaaggttcatgaaaactcaaggtacatggaactgcctatgcgttctgtttaactctatatgtgacataaaaataatgcactataccatttccaaagaaataagcaatagtcattctgtttcacctagattcaaaaaaacaaatgggctgacaacttaccattccaaatagttattgtaaacaacatttttcttttattttcctcttcttcctttcctccctccttctctcctccgctcttcctccctcttcctttcttccttccttccttctttctaatgaacctctgctccatgtggacaaggctctttcatgtatactatccttacatggtaaatgctattaccgagctgatggccactttgtagatttttgatactgccattgccacggatcctgattttgttgagtagatggaggatactttgctttttggatttttctgatttttttgagacacagtctcactctatctcctgggctggagtgcagtagcacttcactgcaacctctgcctcccaggactcaagcaatcctcccatctcagtctcccgagtagctggaaccactggcacgtgtcaccacactcagcgaatttttcatatttgttgtagagatggggtttcgccatgtatcccaggctggtcttgaactcctgggctcaagctattcacccaccttggcctcccaaagtgctgggattacaggcacgagccaccacacccagccagatggtggatactttgataagagaaaactacattgaggaacacagaatcctaataccatattaggccatacataacgcaggccaggtgcggtggctcactcctataatcccagtgctttggaaggctgagattggaagattgtttgaggccagccattcaaaaccagtctgggcaacatagtgagacccccatctctacaaaaaaattttttttagttatcaggatatggtggggtgtactgtagtcccagctattctggaggttgaggtgggaagaacgtttgagccaaggaatttgaggctgcaatgagctatgatcaagctgaatgcactccagcctgggtgacagagcaagaccctgtctctaaaataaaaataataaacacaaatttgaaaaacctaattaatgttttttgctttcagtatctcatttaaccctcacaataaacatgtgaggtggtaggaggaatcactcccattttcagataaaaagcagtctcaaagaagttaagaactacattcgcatatttagcagacaccactgctgggtttccttacattccagaaaggcctttaagacagcaaactccaaaaatgtttaaactctttcattgcacatataatttacaatgaaagattaaatatagaatttccctttatcaaattctttcaacctgcccaaataatttcaaacagaaagagatattctctttgacatttatattctgtttgaaggacattcctaaggccctttgaaagatgattaaccctaaagaaactgcctacatttactaagctttttgaaaatactattgcccactctgcataaccattatgggctctctaagacaaagatctggctcatgaataagagtggaaaaagaaaagtatttatctaaggactttataaaatcctgtgttcatctaaactttaatgaaatgggttataggcacatcagaaataaaaatctgcaagtgacttttataagcatatatgtcagctgggcatggtagctcacgcctgtaattccaatactttgggacattgaggcaggaggatcacttaagcacaagagttggagactagcctgggcaacatagtgagacccatctctactaaaaatcacaaaaaattagccgggcatcatgtatgtgtctgtactcccagctacctgtggactgaggcaggagaatcacttgagcccaggagttcaaggctgcagtgagctataattgcaccactgcactccagcccagatgacagagcaaaaccctgtcttaaataagtaaataaaaataaaagtgtacatgtcaaagtttagtacagttattgcacagtgaatagcaagacctactgtggcgtacaataacatccaattgagcacagtccctgtgacaaactgaaatgacaacaacaacaagagataagagctgtcttttgctagacaaccagagtgtttactggcactaagaaagcggggatggatcacagctcattatacatatttctagcaaggatacaacctaacctacttatgttgtaaaaaagttaccgagtgcttttctgggcaaacacaccctgaaactggaatgatactgacaagattatcaggcttctgaaaaataatgatccacaaatttatgagtcatttacaaaaagaaagctacatgatacctccctagaatataccatgaagctgaggttgtcaggaaggaaaattgggttttattagggagagagtgagggggaaggagagagtgagggggaaggagacagtgggctcagaggaacaggtgagatcagataaacagattaaagtcaaagggcatctggacacgatggctcacatctgtaatcccagcactttgggaggccaaggtgggtggatcacttgaggtcaggagtttgagaccagcctggccaacatggtgaaaccccatctctactaaaaatacaaaaattagccaggcatggtggtacgtgcctataatcccagctacttggaagtttgagacaggagaattgcttgaacccgggaggcagaggtgcagtgagccaagatcatgccgctgtactccaccctgggtgacagagtgagactgtatctcaaaaaataaatgaataaataaaataaagtcaaagggcaaatggcatcctcttcctaaggatcagtggctacactcaagcagagccatatttgagaaactagaggtgaccccactgcaaaacagagaacaggaagaaagaggggtttgcagttctcatgatgaagattagcctcctgacagttaagtagagcagagtatgatctgtagggttagccatgctattcaatcagaactgtacaatgattaggctgagagctgaattgtagagtgcaaaaaggaaatgccaacacactgtgctgtatctggaccccactcttctctccattcccctgtggggaagcagaattagcaagaggcaaccagtggagtcacttgtcagaactgcatgctctttatcagcagtctccaatctttttggcaccagggagcagtttagtggaaggcaatttttccatggccaagggtgtgggggcagcaggggtgggaatggtttcgggatgaaactgttccacctctgatcatcaggaattagattctcgtaaggagcccacaatctagatcccttgcatgcgcagtgcacagtagggttggcgctattagaatctaatgctgctgctgatctgacaggaggcagagctcaggaagtaatgcttgccttcctgagtactggactgcgccttggggtttggggacccctgctctacattacagagaatcctagtgaggggcccctgagcggaagatctgcaggaagagggacagccagggcaacatcagttcctagattaaggaaagaccctccattttcttattccatgccctgttccctctctccctccattctctatctctctgtctatctctgcctgaatagctctctctccctgcaccctcccttctctctctctctctctctctctctctctcacacacacatacacacacacacactcacattcacatccatagggtcttccccacaataagaaactaagagctgtggttgaagggatccacatctgggtaccaggataagagtaagagacaagcactaacatgtttatcattttgtagtcacagacagtgatacattcctattgtttaaacaatacaaagtgaactgaacattttcaactggttgaaaggctaagagaatttcctggaaatgatataagatgtcttacaatttatagtaatcctgctgcaagcacaatactaaatccctgaaaatcgctttggtggaaaatttggagttgaggaatgttagacattaggatatcggctcttaattctttgattcacaatctaatttaagaagctgataaaaagtggagcctcagttccagaaaaatacaccttcacagttaattccaccaatcttgtatataatctcacattattcaaggacctcctgaaattgctaccagtttcaagtactgctaaaagaaaaaatcgatttgggagccaacgttgtaatgatcctatgaaaactttaataataattttatgtccacaaggaaaaataaaccagatattaaacaaagaaaatcttcatgacatttaacacaaattacattaatgaaaatcaacatggtatgtcaaacttgcatttctcctctcttgttctctagaaactatgaaaggaaaatcttgggacctcaaactcactatgctgaaagggagaagttaggcttgggaaccgagttatgcaaaaactgccttccttttgttcccaaacagatagctgtaatttcacatgcttactttatcttatgtaaaaatgtggatttgctgagcatgagatgaatgcataattgaccccccctttcttttcacatgtaaaatgtagattcattgaggactaatcagagcctcctaagaatgtaaccacttgcttcattgcctacctctctctccctttttactcccctccttcttgctctttcccctttaaatattgaaattcccaaaaccatctttggaaaaagcacaggacacagatcctactgtgacttgtgtttccttttccctggtacatcctcaaccttggcaaaataaacctctaaattgagatctgttttagacactttttggcttacaaaactttttgagagtgaccaccctcacaataagcatgaatatttgtcttctttgttgaacattcatacaaacaagtctttccttgtctagtcttccagtcaaatgtccaatgccctcttaattttatatcttggaatggctctatattgtggtcccaaagacagctggacttagaagccttaaaatggggaaagactggaaaacttttttgagaaaatccacatagttttcacacttccccctggcatacagttatataactataatccatgacaaacaatggccaatgacatcaaaacatgggagaagggagaaggtacagcctcactctactagctccctcatttccacactcaagactaaattttgttttgttttgttttgctttttgagatggagtttcgctcttgctgcccaggctggagtgcaatggcgcaacctccaccttctggattcaagtgattctcgtgcctcagcctcccaagttgctgggattacaggcgtgtgccaccatgccaactgtgtattattaatagagacggagtatctccaagttggtcaggctggtctcaaactcctgacctcaggtgatctgcccacctcccaaagtgctgggattacaggctgagccaccgcacctggctcaaaactgaatttttaagactggaactcactttgcccaagtttcctttagctttctaaaggatgcactgtaagatcatcttcctccctccttttgtaaaaataatatcccattttaatccttttctttttctaaactcaatcaaaaatgagtacaaatccaagctctgcctatgctaccagggtttcctcaggtaaatacttctctgagaactcagtttcctcatatataaaggggaataatatctaacctacaaggttattatgacaatcaattaaagaatgaaaaagttctcagcaggatgcctgaatcacagattttcggcaaattttagctcttctgtctatatattgtctatgctaattataaaatgaatttttaaaaattcatttgtacatattaccaaaatgtagaattttccttattaagaggcattaaagctgggcacagcggtacatgcctatagtcccagctactagggaagctgaagtgggaggatcgcttggggccaggagttcaagaccagcctaggcaataacaagaccctatcatattgaaaaaaaaaattttttttaaacagaagcattaaaagtaatctagaagaaacagaattagataaacaagagttcccttttgtttgttcagtgtaaacagagaccaaatccttaatgttctgcttgatcttcactctagcaagtatctgtccagcatgccttagaataatggagctgaaaaggtaggagtggaggtacagttatgggtgtgcatttctgacatcacctcatggaacttcatctagctttgtgctccttgcacccagatataaagtaaaagagttgattttaggcccctgattaataatctctagacccctgaacttcagtccagaggctgagtcatacaacaggcctcttccaaatgaatagctgttcctaacactatgtattagccaagttcccatggaaaggtaaaaggcctcaggcatctgctgaaggactgctctaaaagatctttaataagtaaattcttttctggatttccaaaaacagggacagacaattttaacttgaggtcaacaatctaagtctagctcctaaaactaaagtgttttccacaccagtaatacccaattacaatctcatcttcctgggtgcaggagaaagacaaggttcatttcctccacctacccagagagggtctacataatgaactccccctttactcgctctttctcttcaaacattcaccttatcttatgtaaaatgcaggttcactaggcactaattaaagtgtcccaggaatgtaaccattgccttacatcataccttccccttttcccacatgccttcccctgctttaaggaaatgtaaacatattaaacctctggaaaacctctttggaaaaacagccacagatgtgtctgtgctagtgtttttcccagacatgccctaaagctggcttaataaatagagaggagtgagacttatacctcaatcactcattttggctgtcaatttcatccaaatgaaagttcctaacttagatctccagtggagagttagaaggaaaatcttaatggatttcctgagtggatctcacaactagaaaatctagcaatctaatgttccctgaaagaatatgtaaataacctataaaccaaaaataaaattctaagccctccaaccaactgaatggacctctcctctcagccaagggacttcaaaagtaaactgaaaaactagttcaggccatggtaggaagaatagagcagggtggggtggtgagggctgtcagtcatacctcattataatctcctccctttggaattccagaaaaactgaccagtattaacattaaaacagagatctgaagacttacaaaacagattctttgtaggaagaagataccaaactccaacgtgactctagtatagcattacatgagaaatagcaggccctaaagaaagaaattgaagtattttaccccaaaatatttctttgacatatttaaagtggccctgcaaagctatctcttgtgggggaaatctacattttgcagagaatccctttccctttccaaatctcctccagatccagaagagatttaattaagaatctagcaccttttaagatctgatcagagacatttatcaggccaggtgtggtgcctcacgcctgtaatcccagcaatttgggaggctgagacaggcggattgcttgagctcaggaattcaagaccagactgggcaatgtggtgaaaccctgtctgtacaaaaaaatacaaaaattagctaggtgtagtggcatgtgcctgtagtcccagctacttgagaggctgaggtgggagtatggcttgagtccaggaggcagaggatgcagtgagcagagatcatgccaatgcactctagcctaggcggcagagccagaccctgtccagataaaaacaaaaacaaaacagagacatttaccatctttctcgctaaagcctgctatctggaggcttcatctacataataaaaatcttgatctccacaaccccttatcttaacccagaaactcctttctattgattccaagtctttagacaataacttaactcttccaatcaattgccaatcagaaaatctttgaatccacatatgacctggaagccccctcccttttgagttgtcctacctttccagaccaaaccaatgtacaccttacatgggttggttcacgtctgcctgtaacttgtgcccctaaaatgtacaaaatcaagctataactcaatgaccccgggcacatgttctcaggtcctccagaggctgtgtcatgggtcatggtccttacatttggctcaataaatctccttaaatattttacagagtttggattttttcatcaacaaagctaacagcaaaactgtgacatgccatttgaaatcaactagaagccagtggcaattgcagaacaccttaaaaaatgactcgccgggcacagtggctcacacctgtaatcccagcactttgggaggctgaggcaggtggattatgaggtcaggagtttgagaccagcctggccaatatggtgaaaccccgtctctactaaaaatacaaaaattagctgggcatggtggcgggcatctgtagtcccagttactcaggaggctgaggcaggctaattgcttgaacctgggaggtggaggttgcagtgagccgagattgcaccactgcattccagcctgggcaacagagtgagactctgtctcaaaaaaaaaaaaaaaaaaaaaaaaagactgactcatccactgggctttttagaatgcacatctgacaagaaaagaaaacaaagaaaagcagaaggtgggttattgacttcttcacagttctctagtttcactagtagaggatgttttcaaattacaaatttctagtaactatacatacacacactccccacaaacccccaaagagaaaaggtgacccctcctcctgtctttcccactccagtcctctccctggtgattccagtttgccattctcagagaggactatttgtgcaagaaggaaacagaagagaaaagagagaagaaagaaggtgcaggggcaggggagagaggaggagcaggaggaggaggaggaggaggagaaagagaaagaaagaaactaccttttactggtagagctttcaaaatgtacatacagtatcaggaagggaggaaaaggaagggaaggaaggagagagaaaggaagggatggagggagggaggaaggaggaaaggaaggagggaaggacagatggaaggagttacgtagaaacaatttaaggttgctgatcaaaaattatcttctccaaaaagcctgagtatttgacttaatgttgtcaaactgcctaaatatcagacagatatccatttgctttaacagcatccttcagaaaatgtaatgtctctgtaaactgcagaactcttccattactcacacattgctgtgaattagagccagttgcctcctaatacctacatgagatcatcaccaagggaggacaatgatgggacaatcatctatgaatggttctttatgtttcctgtattttacatgacttatctcagattcttcataacgggtgctaaaacgttattaagccacattttaaataagggaattaagctcagagaggaagagaaactttgcaaatcacatgtccaacaggtggagctgtgatttgaatccagctgtctgcttactaagtgaaggactaaagagtagaagtcagtgagggaggcagagaacacaaagacgctgtgcaaagagccaccctcagggcttttgtctgtggcattccctgcacactgctgtgccatgaagcaggcatgggcttccacctccaagactcagaactcaaggtggtacctaccacagctgttggcattgtaagctgcctaggtccacataattacaaatcctgttctgtacataactacaaaacaggcttttgtggtcaggcctgggaaccatatcacaattcacaatctgactcttcataaagtgggtcctctctgtgcatgaggaaggcaaagcagaaaggatatgcagtgtccctagagcagcaggtctgcctcaacctttcaaattcctcaaatttctaggacgcttggagtaaattttttcttgcctagtttttgtggccagtttacaaacacccagaagttgttaaatgtcatgtcaaatcctgcacaaattataagcattcattcccacggtttctttgtagaataaatcagtctcaagagaaattggtatggacaatggaattctgtgaacaaaattatcttaaagttgataataataatgggatggaggtgggggggattcatgggacaagcaagcaaaatctgcttttgtctggtcatgtttcctgtcagcagcattttcctattaataatatgtattatgagccaactccacacacagctatagactactgcccaccccaacacatagaagtcaccaatataaaccaaaaataaaattctgaccccccaactgactgaatggaccctttctctcagccaagggaacttcaaagaaaccaaaaaactagttcaggccatgatgggaaggtgggttttcagacatgcttcattatacccttctccctttcaaattcaggcacaactgaccagcattaacattaaaacagagatcaggtcacttttctgatcctaaagagattagctaggtgtctagcaccttttaaaggtctgagtagaaaacacttgccatctattcccactaagggcatccacctgtgagacctcatctacgtaagagccttggggccctggctgtggctcacacctgtaatcccagcaatttaggagaccaaggtgggtggatcacctgaggtcaggagtttgagaccagcttgactaacatagtgaaaccccgtccctactaaaaatacaaaattagctgggtgtggtggcacacacctgtagtcccagctacttcaaaggctgagacaggagaatcgcttgaacctgggagatagagattgcagtaagccgaaatcttgccactgcactccagcctgggtgacagagcaagagtgtttaaaaaaaaaaaaaaaaaaaaaaaaagaatctcagtcttcacaaccccttacctttacccagtcactcctttctattcacaactcctatcttaacccagtcactcttttctattgattccagatctatagataataactctttaaaccaattgcccatcagaaaatctttcaatccacctgttacctggaagccccacctctttgagtagtcctgtctgcccagacaaaaccaattacaccttacatatactgatgtcttatgtccatccccctaaaaagtataaatccaaactataacccagccaccttggacaccttggacatgttctcaggacctcttgagaatgtgccttggaccacagtcactcatattaggctcagaatagacttctttaaatattttacagagtttgattcttttcattgacaccaattataacattaagttccattaggagctaacataaattttaactgcttttgtattacagttgacctttaaacaacatgggtttgaactgcctggatctactcacacagggattttcttcagcctctgtcacctgagacagcaataccaatccctccaactcctcttcctcagcctactcaactttgtgaagacgatgaggacaaaaacctttatgatgaaccacttccatttaatgaacagtaaatatactttcttttccttaggattttcttaataacacttgcttttctagcttgctttataataagactgcagtatataatacatataacaaaaaatatgtgtaatcaactgttaatgttatcagtaaggcttctggtcaacagtaggttattaggagttaagttttgggggagtcaaaaattatacagatttttgactgcatgggggattggcatccctaaccccctgtgtatttataaataaatacacaagcactactagttgcaactttactaatacagtacttacaagctggcaagatgaaagcatttatcctaaaaacatacacctcctaaccagtcagggcttcatgaatatcactttgttatttctcatacatttctgggaattatttggttgtttgattataaaatggaaagtctccctagttgtggaggtctccactgaatgcactatgtcaaattcctggacagtccaatgctctaactcagatggaacaatttgatatggacttaattagtctgcactcttaccatctccatgcctatgttctcaaatctcccgaatttgttcacccatgtttcatctcaaggttaataatgtgacccaacaaaaactggctttttcttttaaatctttgtaaagttcagcgccctaaacatagttgatacacaaacacatttctgagagaacagcttactgaaggaatcacacatttgattttgtataacgagaaactgtctccatctcttgagatattttaacttgaagcccctacgttctaattcacctgagatccattaaactcctaaaattgcatgcaattttttggagtgctttcatttttctcaaggtagagtccatagcttttattagattttcaaatggggggtggttataagaggaaaataagattaatatacaccattataattaatctattagtccattttcatgctactgataaagacatatctgagagggggcaatttacaaaagactgtggtttaattgactcacagttccacatggctggggaggcctcataatcatggtggaagatgaaggaagagcaaagggacgtctcatatggcatccagcaaagagagaaataagagccaagcgaaaggggtttccccatataaagccatcagatctcgtgagacttattcactaccatgaaacggtatgggggaaaccgcccccatgattcaattatttccactgggtccctcccactcaagtgaaaatcatgggagctacaactcaagatgagatttgagtggggacacagccaaagcatatcagtcttgtaaagaatactaaataggacgggcgcagtggctcatgcctataatcctagcactttgggaggcagaggcaggaggactgcctaagctcaggattttgagaccagcctgggcaatatagtgagaccccatctctattaaataaaaataaaaaataaataaataaataaataaatgcatataaagaagaatactaaataggctggatatggtggctcatgcctgtaatcccagcactttgggaggcctaaatgggcagatcatctgaggtcagaagtttgagactggcctggccaacgtggtgaaagccctcctctactaaaaaaatacaaaaaaattagccaggcatggtggcatgcacctgtagtcctagctacttgggaggctgaggtaggagaatcgcttgaactcaggaggtggagattgcagtgagccaagagtgtgccactgcactcccgcctggatgacagagagagactctgtcaaaaaaaaaaagaataataaatacaaaatcaaataggctcacacttattaggtgtgggacctagggtaaatcactcaatctctttaaggccttagtttccttttctacatactgaggataataatagcatctaccttataatgtcagataagataatctataccaatatcaactaatcaggacaactatacaaactggacaaaatatatttcaaaatatcaaaaaataaaaagcaacaagttaccatacctgaaaaaaagacaggctccaagggggagagctctatattttagagtaacaattattttgggaggcatgtgccccttccataaggggctgctgagtaagctgagagtctggatgtgcttttaacagaatcctggactggggggaccaggataggagttagtaccaccaaagaggtagggcagctaatgatgccaccctttcctctttgggttgggacgatggagggctatgacctaatataactgtaaatcctaagtaggcaaatccactcaagttagagctcagctagaaaatatatcagtaccaaaaattagtgattttagtttgcaactggcagaaaaaatttttctcatagaaaataacattatcttctccttcagattagtttcacaaactagaagtacaaggtccagttcataatcaaaagtagccagacataaaaaatgacatcagagcatgaatgaaaattaggagaaaaaacagacagcagaacaggcttaaaagagctcgagatatttaagttaattgaggccttacaagaaccatacttgctcaaaagagacaaaaaataagattgagaattgtaacaactgaaaattagacaatgaaccaaacaggaatatttaatttaaaaaaataattaaaagtggttgggctgaacagattaaatatagttaaggagatagttattaacttggaacagagatcagaaaaaagtagccaaaatgaagtaaaacttaaaaggtaacagacatagaagatacaatgagatgtctaacatacatgtaattggagtgccagaaagagagatgaggggatgaaggaaaggccatatttggagacagtggatgagaattttacaaaaccaacgaaagacatattaaagaacacctactacccctaagcaggatttttaaacatcacaaattatctagatcatattaaaactgcagaagaccaaagtcaaagagaaaaccttaaaagcagttagagaaaaaagacatattactcacaaaagaacaacaattcagagtgacagtttacctcagaagaaacgatgtctcaaccatgcttaaaacatattaagtgccaaccattcaaaacaaaaatatccttcaagaaagaaagcataataaagacatttggagacaaacaaaaactgagaaaagctgtcacaagcaggtcctcgctaaaggaaagagtaaatgatgtttttctggcagtggaaaacggattccagaaaaatggtcagagagggaagaagaaagtaaaacaaaaatggtaaacgtgtagagatccaactgaatacagactttaaaaatagtaataactgcatgtccttgggttgaaaatatgttaagaattaaaatatactattacaacacaaatggtatgtaaattgggggtggggagttaaagtattccatggtctttgcaatctatgagaaaatatttaacatgtcaatttaaaaaataaaaaataatggccaggtgcagtgactgacacctctaatatcagcaatttgggaggctgaggtgggagaatcacttgaagccaggagtttgagaccagcctgggcaacatagtgagaccctggctttcctttaaaaaaataaaaggtaaaaaaaaaaagtactggttaataatataattggatgagtcaaaaatgcatttgtattgtccagaataaccactaaaagaataataaaatgaatataaaacttctagctaatagagtctcaaaaagtgtaacttaaaaagaattattcccatatcccaccaaaaagcaaggaaggcaaaatacaaagaacacaaggtagctagaaaaagtataaagcacttaataaaagagcagatttaaatccaagtcacatggacattaactaaataatacaattaagagtcaaaaattttcaaaattgagtaagaaaaaagtcaactgcccaggtatgggggctcacacttgtaattccagcactttgagaggccaaggtaggggaattggtttaggccaggagtttgagaccagcctggccaatatagtgagaccccgtctctatttataaaaaacaattaaattactaaacattataaaaaggaaataaatcaactatctgctatttataaaagacatatctaaaacataaggatacagaagagttgaaagtgaaagtatgaaaaagagataccataaaaatactaaccaaataaatctattctaaccataagaatgagacaaaagcaattctggaaatacatgtgaacatttcataatgataaaatgctcaattcaccaggaatatattacaattataatgctatattattaggattgctttataaatgcaagttcaggtaaacacttgaaaatcagttactataagttaccacactaacaggataaaagaaaaatcactagtacattgataaaaatggaaaagcatttcttaaaaattcagcatccaaatataatcaaaaacgcttggcaaactaggaataagaactccttaaaataaaataaaataaaataaaatgaaaacaggcaaggagaacaaaaattaaaaaaaaaaaattttacaaaaatcaccatacttaacaatgaacaaatgttgaaagtctttcttttaagacctgggaagggataagagtatgtacaattgccacatcaattcataattgtatatgaggtcctagcctgtcaagaaaggcaaagacaatttttaaaagcataagaattaaaaaagaaataaactgtaaatattagcagatgatatggttgtgtatgcaggaaataaaaagaagaatttacagataaattaccagaattcatttcttaagttagctacattctggatacaggtgaatatataaaacagcaatatttctacatcccagtaaaaaagaaacagaaaatgaaattttaaaaagacataatatacaacagagtgaaaaaaatatgaaacacctaggaataaatataataaatgaagcttaaaacctctacacagaaaactataaaacaccgagaaaaacttgtaaagatctaaataaataaaggaatataccatgttcatggatcagaagacttgatactataaaggtaaaaattttgcccaaatttatttacagactcaatgtaatgtcaatcaaaatctcaatagctttaacatctttgttgctgctgttgttttgttttggtgagactttgcaagctgattctaaaatacagatgggtcccaacttacaatggttcgacttacaaatttttttttttacttcataatgatgtggaagctatacaaattcggtttgctccttgacttacaataaggtcacatctggataaactcactgtaaattgaggatattttaagttaaaaaaatgcatcaatattttcaacttactgaaacataactctactgtaagtagaggagcatctgtattgtgctcaaagaatagtcaagaaacctgtagaaaacaaagaacaagataatagaacttgatctactgcatataaactcttatgataaaagtacagtacacaattacctatgtaacaaacctgtgcatgtaacccatgaatctaaaagaaaattaaaataaaactacagtgtggtgttggtgcaagaatatgctaataaacaaaagacatagactagaaaacccaaaacagacccacacacatacgggtacttgatttatgacaaacgtagctctacagaacagtgaagacagaatagccttcccaataaatcattctggggcaaatgaatgtccacaaaaagtttaaaatacaatacctaacccctacttcacacaatatgcaaaaattaattcccagtgatctgtacatgttaaggtgggggttaaaactgttacatttctagaatatataagaatgtctttataaccacagagcaggaaaagacttattgaacagaacacaataaaatattaaccataaaggaaatggtatttaaaaggaaatggtatctaaacaggacttaaggaattttaaaaattaagaatctctgttcattctttacagagtaaataggtaaggaacaaatgaagattttgccacacatgtaacagtaggcttatacccagaacatattttttaaatttctacaagttagtaagaaaaaagacaatccggttgaaaaatggacaagagacttgaacaatcatatctcaaaatattccaaatggctaataaacatatggaaaaatgctcaacttcatcagtcaggaaaaagcaaattaaccctgcaatgtgatattactccaaaaccacaacaatggctaaaattacaaagactgacagtgttgacaaggatatgtgatggaacaaggggaacttccatatgctgctggtgggagtatattggtacaactactttggaaaactggtatcatctactgaaattgataatacattatgagctagcaattcctctcctgtttatagagcaaatagaaacgtatgcccacaggcaccaagaaacatgccccaaaatgaccatagccacattatccataatgcccccaaatgaaccatccaatgggccaccaacaatacagttgataaagagatgaataaattgtggtatactcatatcatagttttctacacagaacagaaaaatgaatgaattacaaccaacagcaacaaaatgaatatcacatacacaaggctgagcaaaagaatccagacacaaatgaatatatactctataattccatttcatttcttgcttaaaaaaaaaagcaaaaccaaaatatagtgtttagggatatgttctttggaaaaactacaaagaaaatcaaggaagtgtttacaaaaaagcatgaggatagtctttatctttgggggaggtgacaatgattggctgagaatcacaagggggcttttggcacattagcagtgttctatattttttatcctggtgttctatttttttttatcctggtgttggttgccaagtgttcacattgtagtagatcactgcactttgcatctgatttctgtaattttatgtatatgtatgaaatctcagtcaaagggggttaaataaatcaatcaaatgcatccacaatggaagacttcattgcaccaatgcctatacatattgcttggaatcaggaacctagaatatcttaatttttaaaaaatgttaagtgtcctcaactttgacccactgttttttatagctttctgtgctaatctttccaagctccctgatgaccacactttgagaccacttctggccagttcacactgggcaagtttccctactcatctgtcatctatttgctgggtgtacacatgtacactgatccagataatgcatattatgtaaaggtcctgagatcttccagaaaatctccaacagctgatatctaacacttactcttccctcctctcctcacaggcagatctttttctttcttcagttctaagctcaagcgtcacttcctcaaggaatctttcctttgcctccacctccaagaccccatcacttaactgggactaaccaacatcatgttcctcttcttatgatatttgttctgatcattctcagtttgcccccatccattcctgggaggctgatcccaagaaactacattaccaggactctttccagctagattcttttttttttttccttttctagcgataaggtctcaccatgttgcccagtccggatttgaatgcctaggctcaaaccatcctccagcctcagcctccccagcagctgggactacaggcatacaccaccatgcccagttccttagctggcttctattgggttccagggatgggaggcagtggcagaagctgggagggtgggagaagagagaagtcagggcatgtactccccactccctttctgctattgtctatgtttttacaagtagctgcttctctccaggctcaagttcctcttccctggctccagctctcacggactcctgagagtcctgcctctggtttgccttacaccagttcaaataaccatgcctctatttttcgaagttgtcttttcactcatctctcttcatttggattctgttttctgctgggactctgtagagtggcaattttactttaatttatgtgattatttcatcaatacctgtcttctactaggcttgagcttcacaacattagcacttctagaagttgccaacaaatatttgttaaatgatttagtgagttagtgaatgaatgaacttacattagaatcagaatatactacacattgtgtaacatttctaaaatgttcctgctacatttgacatggcaccaaggtattagaccaaacattttacctctcttgcttgaaaatagcctttgttgtcataaatacttttactcatgacaatgatttcaattattccattaataagtgcaatcactgtgatttctcaatttacaagatgtaattttacctaagtgaaagaagtcattgatgacaagatgagatttcaagtggaccgtagtcagttatagctctaagaaccagtaggaacacaatacaaatgttaagcagaaaaagaaggctctgaatccctgaatttttcacatcctattacaaatgacacaggtaaatgaatacttaatgcttacaaggtgtaggagggttaattgcagaaggaaatgttctctttttactacaataaattatctactctgtgttgttgtcctaggcttaaaggactacatgggccgggtgaggtggctcacgcctttaatcccagcacttcgggaggccaaagtgggcggattatttgagatcaggagttcaagaccagcctggccaacatggtgaaaccccatctattaaaaatacaaaaaaaattagccgggcgggttggtgcatgcctgtagtcccagctactcaggaggctgaggcaggagaatcacttgaacccaggagaaggaggttgcagtgagccgagatcacgccactgcactccagcctgggcgacaaagcaggactctgtctcaaaaaaaaaaaaaaaaaaaaaaaaaaaaaggacaatgtgggctgattccaatattagatatgtaaattacatattaacatttagagttagataacttctacaaaatgacctggaaaatcctggtatcagatcactagtaagtatttccagaatggggtctggagctctgcagatttatcttttctggtagaatcaagatccttcaaacataccagtatacattgtaccacatgacacctgaattttaatcttaagaaaattagtttataaatataatcataagtaaatacatatatcaagaatctttatttcatagcacagcatttgaaagcaacaatttacctattgtgcaaactccaggtgatatatgaggttgatataagctcaactctgaggagggtcaaagttcatctcttttttgcagtctcctttctagtgaaacctctactatttcttctgctaactttttcactgtaaaaagtattccagttctgttcattctaaataacacagagatggagaaggtccaatttctctagtatggtatgagttcgagattatttctaatatggcactactttggatatgggtctgactgatcttattatcctgaatgatatgacatggcttcagcaacaattacaataataccttgaagggagggggtttagggaagaagtgattgagcaaaaatagttaaaatgcagttatacagccaattatttttacaactagaaccagacaatttgctttgctttatgtctaattaggtgaaacaaaaaaattcctgtttccgtattcattctcttcggtcataactcatataggaaatgaccacatcagttccttacttatcgcttccctggaaacaaaagagcattttatacctgatcctgctgttgccagtaaagaaagtggagcaaaaattaaccttcttccatccctcttttccatttggaaaacaatatttttaagggggggaggggaagggaatgatgcattcaatatataggggataatacattccctccgccccagactcactctttcccattctcctcaacatatccacttaaagagcgctcagtacgctgagggccccaagcctgacagagtcaaaaaaagaagcatctctgcccaacctgaacatcacgactctcgatgcctcgcatacaacgaggcagggcgggtcgcccagccccaggggaccgggcggcgtctcccgagcctgcagcccaggccgcgggcggcgccgcagcgctcccggctcccctcctgcagggatcggccacggtccttacccgccagtccgccgccgccgcctccatcgccggcgtggcccttcctccgctgcaggatgaagtatgggttggccctctcggtgatccacagcgcgttggccagcaacacctcctccgggttcacccacatggtcctggctgccgcgggcgggcgcacaatgggcccgtgggtccagtcctgcacccaccaccgcgacaggcgcgcactcctgggcacacgcgcgcccgcccgcccgtccgctaggtgcggcggcggcggcggcaggcgacttcagggggtggcccgcggcgtccgggccacaacaaagccccagcaggcggcccgggaggacggtgaggacgcgggcgcggcaagcagcatcctccccgcggcgtcgccgccccgcgagagcccgcggccgcagacgcccggcctggcactctgcagcccggctcccggcccacggcggcgggaggagcgggaggaggaggaagaggaggaggaagggagcgggaggaggaggaagtggtatagctcagtcccgggatccggctcagcgccaggcagggctaagggccacccgagcggattcggccccgcggtcagggccaagctgggctccggcgctgctgctcccgcggcgccgactggagctccagagcccctcccgtctctacctgctcgagctcccgaagtcgccgcgccttaacgcgccgtgtcggggccgcaggcgccactagggaagcccagctccccgctggaaggacgctccggacactgcgaatgaatgacgacaacgcggctcacttggagcgggtccgggtttgtgcggactcggtaccaccgcgggctccgcgcgccgagctgagcagctgtggctggcttcgggggaaccttcgggggaagctcctggggaccgtgtgccaagcactgggcccgacgcccatcccagcagggaggacgccgccagcctgcgtgggtgcgtgtgtgctgtttgtgtttaaggttgacgctctatgggatagcgccaccccttttcccaggaaaagtgtttcaaggttccagacctggagctcggttagagacccggggtcggaagccaacgcagccaatggtcgtcgatgtttttgtttcctgcatccccagggcaagtcatgcgctaaacttgtcaccgcttgtgacccctcccccctctccattccattgtaattaaagtggcctagctaagtgcattacatcacttctttccttgacctgtagggcgtgagcaatagagaagttggaagcggcccaaaagcttagaccaactaattcacaccacagctgttcctatatcgcatttggggcttcgaaaactgggcatggcagaattttaaaatttatccactcttggtagatggattttttttttaatcagtgaaaccagaaacacacaaaccagggcagctttatccctagacagtttcagtttccccaaatacttcgagcttccagtggtgatcacagcccatctgcctacatatctgatgaccatttttttttcctcccgcccaggagatctggaggatagttcagccaaaaaaaaaaaaaaaaaaaaaaaaaaaaaagttcctcttcccaaatgatgggaatttagcagactctgctttgttgtggatgctgggcaatcctagggacttttccctttccaaatgagcagagattcaaatgaaaccttcttgtgtgggcttcaaaattgtgacttttgtagctccgacttgaattgttgaattccttcaattagtcgaatgagcaaatcaccagccattctaatgagactgccatttcatctgttcgcttcctaccgcttgggctctcaaggaatggaagtttcccttgatgttaccacacagactgatctgcttcttccaggcatcagtgga

SEQ ID NO: 602 - DNA, 194122 bp, Homo sapiens
  source 1..194122: mol_type = genomic DNA
caatcgccttgatgtttggggggttccccagatccttcttcaccgcctaccaccggaagatccccaaggctccgggcttcgaccagcggctgctgctctaccagctgtttaactacctgaaccactggaaccacttcgggcgggagtacaggagcccttccttgggcaccatgcgaaggctgctcaagtagcggcccctgccctcccttcccctgtccccgtccccgtctccgtctccccgtccctgtccccccgtcccccgtccctgtgcccccgtccctgtccccctgttcccgtctccccgtccctccgtctccatccccccgtccccccatcctcctgtccccgtccccccgtccccgtccctccatccctgtcccccgtccccctgtccccctgtccacataccaatccccctgtccccgaccccccatccccgtcccccatctccgtccccgtcccccctgccccgtccccgtctccgttcccccgtccccatcctccatccccgtctcccatcgccgtccccccgtccccgtcccccgtccccgtcccccctgtccctgtcccccttcccccgacccctcccagatcctggggaccaataaagcccgcagcgggtctcggctggcgtcctgcgcctcgttcctccgctcgtggggctgctttcagggccagacgcacggcgagctgtgcacggacgtttttgcggcgattcaggggaaacgcacgcggacccggtagccaaggccaaagtcggcgcagcgcccaccgcggcctccgggccccgctcccgctcccgctctggggcgcgccaccactcggcgcggggcccgtgtgatccgcgcgggtcccagcgtggcgcgaataagtgtcagggcggttggctctgaggggtgggtcccggggctcgcctcgcgcccccgactgcgtgctcaggccccgcccctccccgtccacgcatgctgaggctccgccccgctccgcggtcccccggtcccacccgcccccgccccgcccccgccccgccccccggcgtgttgtggctccgccccgctgtctccggccccaccgcaagccctgcccctcccacccacgcgtgcccgggccccgcccccgttgcgcgcagccccgccccctatcgcgtgctcaagccccgccctggcggcccccggccccatcccgaagccccgcccccccgcacaccgcctgctcaggctccgccccgctgtcctccggcggcggcctcaccccgcagcccggcccaccgcgtctcaggccccacctcctgtcctgccccgcccaccgcgtgctcaggccccgctgagcggtcccggctccgctcgcgccctgtggggtccacggcgcgctcttccagagcctttgggacccgtgcccgctcgcgtcctcaagtgcacgcgccgtcccgcgcgcggtattttggcggccgacgcgttccgtagcgaggccggcgagtggggtcggaggtcgcggggcggggccagcgtcggttgccgccttagcgggcgcctccttttcatccctcatccttcatccctggctttcgcgctctagcggagtgggatctgcgaacacgtgaggcgggggcgcggtccccaggctgccgagatggccctgagcgacgaaccggccgcgggcggccccgaggaggaggcggaggacgagacactggcctttggcgcggcgctggaagcgttcggcgagagcgcggagacccgggcgctgctgggccgcctgcgggaggtgcacggcggcggcgcggagcgcgaggtggccctggagcggttccgcggtgcgtgggcggcgccgcgtgcccgcttcctcccccggcccgggttcggcgcgctgagtgcactttaccgggcggggaccgcagcccggcggcgccggccgctctgcgagggctgccggtgcgcggtcccgcgggccgtggtggggcgcggccttcctaggcgggagagggccaccccggcgcggcgttaggtgcacggggcagacgcgcgcctcccttggggggaccgtggcccgcggagcgcctgctctcgcacggggtgaagcctctgcggcctccccgggaggcggggtgcagaagccctccgtcccccgtctccgtcactggaggaggtccctgggctggggagactcgggccagacccctccggacagctggtcagccctgcagtgtggactcccaggcttgcctccaccgagcgcggtttctgtgaatgttgtgtggacagggagatagggaatgagagagggggacgcagggaacaaacctgctgcaaacaaagcgcgcctcgggtggggagggcagcagcctgtccgttccgtggacgccgtggacagagcgggctggccgggtccgtgcctctgcaggcggggtggggtgtaggtacccctgtggaggccattcgatgagtctaaattctccgagttcagacccacctttaccgctgtctataatgggttatttccaaacaagtccttaggagctcatagctaagtagttacatggggttttgtaattcagtaaaatcatctttgtagaccctttgagtaagaagaacttttgcattatttggccttcctcattttagaatgacagcgctttgattttaggagtcaggcagggtggggggccttgtgggaggagtgcgggttcggcgtcagatcctcctgcctgtgaattctggccctgtcgcttggacctgatacttgattgcctgtttcttcgggtgtaagctggggcggataacgatgcctctcgtgcagaactgttctgagggtgagggaccctcatccagggaccagtgaagccagattttttgttcctggtgtaacagcccaatggcttcttccttttttttttttttttttttttgatacgaagtcttgctctgttgcccaggctggagtgcagtgcagtggtgcgatcttggctcactgcaacctcaacctctcaggttcaagctattctcctgtcttagcctcccgagtagctggggctacaggcgcgcgccaccacgcccggctaattttgtatttttagtagagggggtttcaccatgttggtcaggctggtctcaaactcctgacctcaagtggtcgcccgactcagcctcccaaagtgttgagattacaggtgtgagccactgcgctcggccccagtgggttctttctgcgggctgcccagatagagttgatttgtcagggcaggggagttgccatggagaagatttagttcacgcagagccggttgaaagggagactagactagaggtttttttttttttttttgaggcggagtctcactttgtcccccagggtggagtgcagtgatgagatctcagctcactgcaacctccacaacctccacctcccaggttcaagtgattctcctgcctcagcctcccgagtagctgggactacaggtgcgcgccaccacgcccacctaatttttcgtattattagtagtgacgggtttcatcgtgttagccaggatggtctcgatctcctgacctcgtgatccacccgcctcagcctcccaaagtgagccaccacgcccggctggagttttattattactcagatcagtctccctgagaatttgagggccagggttttttagaggtaatctgggggaaagggtgggggtggctgattggttaggggtatacaatcataggggagtcggaaatgatcctccgtgatgtgctgaatcgcgtctgcgtggggccccaggagcagtgggcgggtccaggtggagctatcatgggtccgtggatcctagtgtaggtgtcagacatggaaacaatctgaaaagatatctttaaaggccagtctcaggttctgcaatagtgacatggtctgcaggagtaactggggaactcgcatgtcttgtgatctcaagaataatggctggcaattaggttacgccttagcggaattcaggctcctctcctcctcctagcctggtggcctctcattaactttacaaaggcagttgagttttggggaagggctcttagcatttaaactataaattaaatgtctcccagaggtagcttggcagcttgaagactaaaggcatgagggggttgcctggatcagatctgccccattgccataatttcctcacagatcacttttgcaaaggcagttttgctgggaagcagtgggtgtgttcagatgtggaggtgggagctgccggattggacagaagcagtttcagctgctgagaggaggagaaagcggtggttcagggtctgggaggttgtgaagagctggcagctgtgtggaagggagcagtgcctggatatgtcaaccaaaaagtatctgagacgagtctcaatcagtttagaaggttaagggtgtgcccgtgaggcagcctcaggaggtcacatgtccccaaggaagtcgggctacagcttagttttacacgttttagggagacgtgagacatcaatcaatacctgtaagatgtacattggtctcgtcagggaaggcgggacatcttgggtgggagggcgtccagggcattggtggattcaaatatttcacgattggtgattggttgaaagagtttatctgaagacctggaatccatagaagggattgtctaggttaagataaattgtggagaccaaggtttttcttatgcagatgaaggttccagttagctggtttcagagagaatagattgtaaatgcttttcatcagactaaaaaggtaccagacttagttaattttctcttggatcagggaaaagacctagaaaaggaagggattctctacagaatgtagcttttcccagcaagagacaacttagcagaaccatttcaaaatatgtcaaatatattttagggaaaaatattttgatttctttcagggcctgctgtctgtcatgtgatgctgtactagagtcaggctggaatttggtgtcttattgctacttaagatcggttttaatgctaatactgatcagctgtgcctgaattccaacgagaggagggtataatgaggcctatgtggaccactccccacaatcccttaatatcatgaggcctgaactagtttttcaggttaagtttggaatgcccttggccaagaggaggggtctgttagatggctagggggcttagaattttgtttttagtttacaggcatgtttggcaggggagtgtgagaggagtgccagggatgtgtgtctcacaaggacagagttgagcttggcccttaacggctggcagaggcaggagagagtgaaggaaggaagaggcgaggaggagactctgttaggaagagtatcgaggcagtgggaaaagaggaacagtgtgccaagcaagtaaactgcacgaggctgggccacagtggccctcaaaaggctagagggaggtggggcattccctccaggtggcctgtgtggcctcctttagtgagaggggaggtgtgctcttgagagctggggaagaggtggagctgccctgtggaagctagcaagggaaaatggggtttctgaggctcatgggtatgtttggcctagtgataattaattttcatgttatatttgtttttagtaataatggacaaataccaggagcagcctcatctgttggacccgcaccttggtaagaatagaagctgctgattttgatcattcagttacagatgaccacggaggccttggtgtgtggtgctggcacatgcatgtgctttgccaggatcaaatgccaagaagtgtccctgtcttgcttgcctggctggttggttttagccgacctgtgatagtggcttgagttccagatgtcactctaggctggggggagatgtgtctgagctacttaattcctttctgctaaggaaacaacatctgctcctcatgtgttttttttgtttttttttcttttttttgagacggagtctcgctctgtctccaggctagagtgctgtggcgcgatctcagctcactgcatcctccagctccctggttcaagggattctcctgcctctgcctcccgagtagctgggattacaggcatgcgccaccatgcccagctaatttttgtatttttagtagagacggggtttcactatgttggccaggatggtcttgatctcctgacctcgtgatccgcctgcctcggcctcccaaagtgctgggattacaggcgtgagccaccgcgcctggcctcctcaagtgtttttagtttacattagtttattattttagtttacatttgggcacatgatgtttttctggtaatagtcatacagggtcaggtgttttacatgggtcatcatttaatcctcacagcagctaaggagggcatctgttgtcatctccagtttacagatggggacactgaggctcggttttcttactttagtgtaaggggtgtggtttcttattgttttctttatttttgatgtatttcacactgattaaaatttttctttttctacctacaaatgtgacacatgcttctggcagttcacctgggaaagaggaaggtggcaatagtcaccacgttgagagggagcaccctgggtgggggcaccctggcttcatagcccagtttcaccattcagtttttgagctgctctttgccggggtttcctcgccccccgtggtgttgagatctgtgtgagagacactaagggtcagcctttcatgtgcgcacacgtgcctcttaaagagtagtttgtgctgtgcatcttgttctgtttttttttcttcaaataacagattttggctgggggtggtggctcatgcctgtaatcccagcactttgggaggtggaggcgggtggatcacttgaggtcgggagttcgagaccagcatggctaacacgatgaaaccctgtctctactaataatacaaaacgttagctgggcatgctggcagttgcctgtagtcccagttacttgggaggctgaggcaggagaatggcgtgaacccgggaggcggagcttgcagtgagctgagatcacgtcactgcactccagcctgggtgacagagtgagacttcatctcaaaaaaaaaaaaaaaccaaaaaaaaccctctaaattcgggattcaagaattcattgggatcagacttgtccttctgtcctagaaaaatttataggccttgtgaaggagaccaaagatagaggtccttgggagagggtcagctgcagggaacatgactctgacatctggtggaggggctagccatgctggatggcgtggcaggcagtgggctccccaggccatatcttataggaggtcttgggttcctggagttcctgtgtgtgagcgctggttcccaggaaacagatgtggtcactgctcacaaggtagcgggtggtgtttttatatctcttcaagtaacaacgttggacctgtagttaaatgcctttattcttgccagacctctttccagagtggatcatggaatattaacacttgttgtgagctgcttagagtactgcgaatgatttttagagttattttctttctttgcaaaaactgtttttcgccgggtgtggtggcttatgcctgtaatcccagcactttgggaggccggggcgggtggatcacctgaggtcaggagtttgagaccagcctgaccaacatagtgaaaccccgtatctactaaaaatgcaaaaattagccgcgtgtggtgcacgcctgtaatcccagctacttggggctgaagcaggagaattgcccgaacccaggaggcagaggttgcagtgagccaagatcgtgccattgtactccagcctgggcaacaagaacgaaaacgtctcggaaaaaaaaaaaaaaaaaaataaataaataaataaatttttttttttgtagagaaggggtcttgccgtgttgcccaggctggtctcatacctctgggttcaagcggttcacccaccttggcctcctaaagtgctgggatttcaggtgtgagccagcgtgcccagctgagttcattattttctggaattcctttttagaaaaaggaaaatgtagtcgtgggatgctggtcctttgtcatttgttgcacatttttccacccttttgcttttttttttttcttttttttttttttttttgagatgtagtctctctgttgcccaggctggagtatagtggcccaatcttggctcactgcaacttctgcctccagggttcaagcgattctcctgcctcagcctccagcgtagctgggattacaggcgtgtgctaccacgcctggctaattttttgcatttttagtagagacagggtttcaccatgttggccaggctggtctcaaactcctgacccccacgtgatctgcccaccttggtctcccaaagtgctgggattacaggtgtgagccattgtgcccggcctgcttttgccttttaatattgtgtctggtgtattttatctactgaagttttttcgtgtttgtttttttaaagagatgggatctcgctctgtcacccaggctggagtgtagtggcgcagtcatagctcactgcagccttgagctcctgggattaagtgatcttctcacttcagcctcctgcagagctgggacaacaggcacaagctgccatgcctagttaattaaaaaacttttttttttggccaggcgcagtagctcatgcctctgatcctagcactttgggaggccgaggcgggtggattacaaggtcaggagttcaagaccagcctgaccaacatggtgaaaccctgtctctactaaaaatacaaaaattagctgggcatggtgaagcatgcctgtaatcccagctacttgagaggccgaggcaggagaattgcttgaactgggacccaggacgcggaggtagcagtgaacgagatcgtgccactgcactccagcgtgggctacagagccagactgtctcaaaaaaaaaaaaattttgtttttgcagggtcagggtcacgctgtgttcctcaggctggtctcgaacttctggccccaagcaatcctgccttggcctcccacagtgctgggatgacaggtgtgagccactgcacccagtctctactgaagttttagaaatatttagcttgtcaaactatcagtttctttgtgtttggcctttggtagtacggttagaaagtttatttttcctaatcagttatgtaagcctcatttattggatgatttagtggcctctcccctacttgaaatgccattttaaatctatattaaatattcaaatatattagcctttgcttttagattttttatcctgttccattgacctatctgtatgctcttttttctgggtcatttcgtttgtttgttttttttttttttttgagatggagtctcgctctgtcacccaggctggagtgcagtggcgtgttcttggcttactgcaacctccgcctcccaggttcaagagattctcctgcctcagcctcccgagtagcatgtgccaccacgcctggctaatttttgtatttttagtagagaacggttttcatcatgttggccaggatagtctcgaactcctgacctcaagcagtctgcccgccttggcctcccaaagtgctggaattagaggcgtgagccaccacgcctggcctgggtcattttgtttgatgttagtttatattttgcctggcatcctttcctcttattttcttgatggttttgtagcccgttcattaatgcggatgaactccggaattattttatcactctccaccctttggaattctattaaattcacaaattcatgtaggggagaagtctttctaagatttaattttcatgtctaagatcatggtattatgtctctaattattcacatcttttgtgttcctcagtgaaggttggtgattttctttagatgattcctggagacttttttttaggtttatttctaggtatgttttgtcttttattgctcttgtgaaactatttgttatgtgttctaactagttattgctgatgtctagtgaagatatgttttgtatactgtttttgtaaatggcaacactgtaatggaatatgtatgtgtaaacatacatttcttaacatctttatagggatataattacatactatagagttcactcttctaaatatacattttagtgttagtgtattagtgtattacagagttgtgtaactatcactaccacaatctaggcattttcatcatctgaagcaacccaactcccatcaacaattccttcccattctctgcttccgcagtaaccactcatctggctctgggtttgtgtgtattcagcattttgtgtgatggaatcatgcagtaggaggtcttttggcactggcttttttcacttagcatcatgtctatgaggttcactgtgtgatgaaatgtttacttcaatagtttttcagtctttttttttttttggagacaaagtcttgctctgtcacccaggctggagtgtaatggcgtgatcttggctcactgcaacctccttctcctgggttcaagcgattctcctgcctcagcctcctgagtagctgggattacaggcgccacctgtaaaattagcctggccaatttttgtattctgagtagagacagggtttcaccatgatggccaggcttgtcttgaactcctgacctcaggtgatccacctgcctcggcctcccaaagtgctgggattacaggcgtgagccaccgtgcccggccagttgtttcttctgggttttcttagcaggtaaatattatatggtttgtaaataatgctactctttatccacgattataaatttttattcttagaacattttattgagttttaattttattgagtttaaaatttacctactataaaatgcacccattttagtaagatgtttgagtttcggtaaatgtatacaccccgcgctatcaagatatggaacatttctgtcatcccaaggagttacttgatgtccttttgctgtcagtcccctcaccccagccctagggaaccactgttggttaatggtactgttcattagttttgcctgttctagaatcattcagtatgtgctctttttgtcttccgttgttaaaataacatctccgggacttaccattgttggtgtgtgtatcagtagtttgtacgttttctctcgtgctgataaatcacaatttgtttcttcttttttttttttgagatggagtcttggtctgttgcccaggctggagtgcggtggagtgcagtggtgcgatctcggctcactgcaagctctgccacccgggttcacgccattctcctgcctcagcctcccgagtagctgggactacgggtgcccgccaacacacccagctaattttttttttatttttagtagagacggggtttcaccttgttaaccaggatggtctcgatctcctgacctcgtgatccgcccgcctcagccttccaaagtgctggggttgtttcttcttttatctgttgatggacatttgagttgtttccggtttttggctgttattaataatgctactttttgggaggctgaggtgggcagatcatgaggtcaggagattgagactatcctggctaacacggtgaaaccccatctctactaaaaatacaaaaaattagcccagtgtggcggtgtgcgcatgtagtcccagctacttgggaggctgaggcaggaaaattgcttgaacccgggaggtggaggttgcagtgagccgagatcttgccactgcactccagcctgggtgatagagcgagactccgtctcaaaaaaaaaaaaaaaaaaagtaatgctactgtgaaaatgtttatgtacaagtttttaggtagacagaggttttattttctcttgggaaaatacgcatgtgtggaattgctgagtagcagaaagtgtcttacttgtagaaagtgtatgacttggccaggcgcggtggctcctacctgtaattctagcactttgggagactgaggcaggtggattgcctgagctcaggagctcaagaccagcctgggcaacatggtaaaaccccatctctactaaaatacaaaaaattagccgggtgtggtggcaggtgcctgtagtcccagctactcaggaggctgaggcacgagaattacttgaatgtgggaggcagaggttgcagtaagctgagatgacaccactgcactccagcctgggtcacagagtgagactctgtctccaaaaaaaaaaaaagtgtgtgactcatcacctgccatactgatgccatgaagattgtactgttgaccatttctaccaacaaggtatgaggattccagctgctctgggttctcttcagcactcagcgttgccagtctctctgatttcagggagtgtatctcgttgtgtccttctctgcgtttcccggatgccagttgcagttgttttccatgtatgaagacttgcagcccagcgtatggtctgttttgttgaacattccgcgtgcacttgagaaaaatgtctgttctgttgttgggtagattgttctctaaatgtcacgtaagtaaggtgggtgatagtgctgtttaggtttcagcgattttctcttacttgttctatcagttcctgaaacaggagtgtcgaagttttcaaccgtgtctcctttcatttctctcagcttcttctgtgcttattttgaagctctgtaggttggtgtgtatacttacagaattgttaagtcttcatgatgaattgatccttttattatcatgaaacattctgtttatctctgatggtaatgcttgttctgacatttactttgtctgatattaacagagccactccagctcttttatgatttgtgattggttggaatatctttttccttttgcttacgtttaacctagctatgtctttttgtttgtttttgttttttaagagacagggttttgggccaggtgcggtgggctcacacctgtaatcccatcactttgggaggccgaggtgggtggatcacctgaggtcaggagttcgagaccagcctggccaacatggtgaaaccccgtctctactaaaaatacaaaaattagccaggcgtggtgacgcgtgcctgtaattccagctacttgggaatctgagggaggagaatagcctgaacccgggaggtggaggttgcagtgagctgagatcacgccactgcactccagcctgggggacagagcaagactctgtctcaaaaaaaaagaaaaaaaagagacgggttttgctctgttgcccaggctggagtgcaatagtaggatcatagctcattgccgccttgaaattctggcttcaaatgatcctcccaccttggtctcccaaagtgctgggaaaacaggcatgagccaccacacctggccggcctcaatgtcatgttgatgttcacttttacagtaaatgtttcctatgtttttccctagaatggatgatgaacttgttgttggacatagtgcaagatcagacatctccagcttcccttgtacatctggcttttaaatttctttacatcatcaccaaggtaacatttccatagcacttcagagttgacagatacttttgtaatatacttggtccagaggttaccctccaaaatgttatttctcaagaaagatagttcttagacacaagttgtgggtttaattctgtccctttttactgtatgttggggatcagaatttagtgatgtgggctctttggctgaaacagtgtcaggatattcagcatcttgcatttgaatagattgaagcactgtgtagctaggaagggaatggggtggagatgagactaaatcagaaaaacttcttacaaggagaaagcaggccgggtgcggtggctcatgcctgtaatcccagcactttgggaggctgaggcaggtggatcacctgtggtcaggagttcgagatgagcctggccaacatggtgaaaccccgtctctactaaaaatacaaaaattagctgggcttggtggcacatgactgtaatcccagctgcttgggaggctgaggcgggagaatggcttgaacctgagaggcagaggttgcagtgagccgagatcatgctgttgcactccagcctgagtgacagagcgagactctgtggaaatggaagtgcttctcacactttaatgtgcagatgaatttcctgggaattttgctgtgctatagattttgagcaagtaggtctaggcgggggtctcatagtctgcttttcttacaagcttgcgggtgtctgtgctcatagtctgcttttcttacaagcttgcgggtgtctgtgctcatagtctgcttttcttacaagcttgcgggtgtctgtgctcatagtctgcttttcttacaagcttgcgggtgtctgtgctcatagtctgcttttcttacaagcttgcgggtgtctgtgctcatagtctgcttttcttacaagcttgcgggtgtctgtgctcatagtctgcttttcttacaagcttgcgggtgtctgtgctcatagtctgcttttcttacaagcttgcgggtgtctgctcatagtctgcttttcttacaagcttgcgggtgtctgctcatagtctgcttttcttacaagcttgcgggtgtctgtgctcatagtctgcttttcttacaagcttgcgggtgtctgctcatagtctgcttttcttacaagcttgcgggtgtctgtgctcatagtctgcttttcttacaagcttgcgggtgtctgtgctcatagtctgcttttcttacaagcttgcgggtgtctgtgctcatagtctgcttttcttacaagcttgcgggtgtctgtgctcatagtctgcttttcttacaagcttgcgggtgtctgctcatagtctgcttttcttacaagcttgcgggtgtctgtgctcatagtctgcttttcttacaagcttgcgggtgtctgtgtgctggcccagaggctcactgttggcagttttgactatggaagtactcacagccgtctcagggtggggcttggggttcgtagtggcgaggcgcatttctgttgtctggcgggaaagtccttggccagcgagaggacactgcgggtgagctgccaaggacacgcaggcctctgtagctcctctgtttgaggttaggatttctccggaaggcgtggtatcactgagcttcagggaagtgttaatgaatttgggcccttgcggtttgtaggcacttattcctcataaatgtcagaggacagtcatataaatgaacatatttaatgactgattccgtaaatatggtaatgaataacactaccaatttaggaaggaaatctttttttttgagagatggggtcttgctctgtcactcaggctagagtgcagtgatgcagtcagctcactgcagcctcgaactcttggtctcaaatgattctccctcctgcctcatcctctcagactacaggcatgtgccaccatcctgtctaatttttaattttttatgttgcccaggctagtctccaactcttggtctcaagctattcttttgcctcggcctcccaaagtgctgggattacgggtgtgagccatcgctcttggccatgggtagctttcttggggtgactacggtcttactaaattgtgtcactgtaatgtcacagaattctctttgatcagtgggtcgcgtagctggtgatttttgatgaaagggtagaaaggcaattttgctgctctctgtatttttaaatgttataattcagcatctctttatttgataggttcgaggctataaaacatttcttcgtttatttcctcatgaagttgccgatgtagagcctgttttagatttggtcacaattcagaatcccaaggaccatgaagtgagtgtctctgcctcccccctcgtctccagccctccgtgcctgtccttcctccctgcttgccccaccctgctgcaccttccccttcctgtttctttcattttatctccctttgttttgtgtcactcctcttttctttcttttcttttcacttttcctttacttcttgtacaagttgctttaaattattttcgtttaaaatagcccctttataaaaaaaattatgcctaggtgtagtttaacaataaatccgtcattgtttctatgtttttttaactgtgtaagtataactgtgttgggttcccaagaccacccccaggtttgatacttcctgagcgggactcacagcactcagcatagagtcctccttttggctgtcacttgttatggcaaaataatacacagcaaaatcagcaaagggaaaaggcacatgggtggggtctggggagaaccaggcgggagctcccggggtcctccagttgggtcccacagggcctgtgtcattcccccagcagtgagatgtgaccacacctgtgaggtgtctatcagagaagcacgtttgagacttggtgcccagagctttcactggggtctggccacatggacacctctgcctggcacgaaacgaaattccagacccccagcaggaaagcaggtgccagcgtaaagcacacggtttgtgcagattgagccagcgagggacctcatcaggcagggcttggtgggaaccctgctggtgtccaggtccctggataccagcccagggccggcctcgtcaggggccttgcctcagacggcagcggggcctgctatgctcgctgtcttctgcgtggtatgtatttggaggagcacacggtttataaccgtgcagtgcggtggcttgtctcggcgtggatgtgactgatgagcgctgtggggcatttccctgctgccctgcactccgtgcccttctttccctagtacttctagcgccccccagtggaatgattgcagggacaaattgggatgttttttactaattactgaaaataagggtactccttttttattagaagttgataattgttttctttattcttttttttttaaaaagacagagtttcactcttcttgcccaggttggagagcaatggcacaatcttggctcactgcaacctctgtctcccaggttcaagcgattctcctgtgtcagcctcctgagtagctgggattacaggcatgtgtcatcacgccagggtaattttgtatttttagtagaaacagggtttctccatgttggtcaggctggtttaggactcttgacctcggccaggcacggtggctcgtgcctgtaatcccagcagtttgggaggccaaggtgggcggatcacgaggtcaggagatcgagaccatcctggctaacacggtgcaaccctgtgtctacaaaaaatacaaaaattagcctagcatggtggcaaacgcctgtagtcccagctactcagaaggctgaggcaggagaatggcgtgaacccggaaggtggagcttgcagtgagcgaggttgcgccactgcactccagcctgggcaacagagcgagactccatctcaaaaaaaaaaaaaggaactcctgacctcaggtgatccgctcgtctcggcctcccaaagtgttgggattacaggtgtgaaccaccacacctggccttttttctttattcttaggtgtttttactttttatctgtttttcactttttcaaaaggccagtttgtatgtggagaggtgccagcgaagagaagctgctatactgatgtattatgatttttctttgttcattttgatgtctctcttgtctgctgagctaagttacggcggtaggtgtgtgtggtggggattccgggggggatgtggcgaggagttggtgaacggcttgcatttctggccctgagggtgatggcatttgaatggctttcataggcattgggtgggcatggagggcagtgactttgagtagattgtggccagtggcctgtgattttcaagcaagactcattcttcccgtggtttaattttttaggcttgggaaacccgctacatgcttttgctctggctctccgtgacctgcctgatcccttttgatttttctcgccttgacgggaacctcctcacccagcctgggcaagcacgaatgtccataatggaccgtattctccaaatagcagaggtaaatatcatgcagataattagctgctaattagtactcactttcatgttcatgctgtcttgatgttagtggtttactcggtaagcttctgatatgtattcaactgctgtttttttcagtggggtaaaatcccataggataacttattttgaaattgtgataattcatgtaggggtcaggttgagttagcaaatctcatttctttgtagatgatgcaaatactctgttgagggtaatcatggcagataaggaagggtttagtggcatggtgagagagaataaggacccattttacatttagttcttaacgttatataaataatagatgctcatttgtaggagaactagaaaataaagataagcaagaaaaatactaaatttaaatttatgaaattctagtgccaagagataagttgtttattttctccgaacttttcctgatgtaaatattatgcatataaacacagcttattgtattagttatctattggatcataactaattaccccaaacttgagtgtttgacacacatttatcctcttgtagtttctgtgggtcgggagtctggcatggctgagctgggtcctttgtgtcaagcttgcccacagctgcagttaaaactcgacatgggcaggctttgccccaaggccgttggattgaggccaccctcagttctttgccacctgggcccctccaacttagtgacttattccatcaaagcctgcaagggagaaactctgctaatgagatggaagtcatgataatatgttacctgatcatggaagtgacgtcccattcctctgccagatcctgtggttagcagcaagtcaccgagtccagcctacgcaagcgagcactaggaggctgtcaggctctgagccatctcagttgtctcggtcttcctgccacgctgactgcgacagccctggtcagcattcactgagtgcctgctgtgtgcctggcaccgttcaaacactcatagattaatctttaatcacttatggattaataatttaacctatacattgggctgggcatggtgggtcactcctgtaatcccagcactttgggaggccggggcgggcagatcacgtgaggttaggacttcgagaccagcctggccaacatggtgaaaccctgtgtctactaaaaatacaaaaattagctgggcctggtgacacatacctgtaatcccagctactcaagaggctgaggcagaagaatcccttgaacctgggaggtggagattgtagtgaactgagattacgccactgcactccagcctgggtgacagagcgagagtccatctcaaaaaaaaaaaaaaaaaaatttaacctatacgttgatgattgatagatcatcagtgattaattaactgtgattaataatcattgaattctccttcatgaggctgttgacaattcttaccctcgtttaaccgagaaggcaacaggcataaaaattaataacttagtttactttgctcataaatggtggatccatgtttgaatccaggcggtttatctggagtctgtgctcttcatcagggctcagcattgccccatgacctgctgttctgagtcctttttaccctcagcaacacgttcttagtgtcttacgatgtcagaaagtgtccccctcataatcgttaagggaaaaggtactccattgtaatctaatttaaaattctctctgatagatggatgttttgtttgttcttgttttgttacgttagaggtagtgtggtgatgggctgggtgcggtggctcacgcctgtaatcccagcactctgggaggccaaggtgggcatatcacctgaggtcaggaattcgagaccagcctgaccaacatggagaaaccttgtctctactaaaaatacaacattagctgggcgtggtggcacgtgcctgtagtcccagctactcaggaggctgaggcagaagaatcgcttgaacctgggaggcggaggttgtggtgagccgatatcacgccattgcactccaccctgggcaacaagagtgaaactccgtctcaaaaaaaaaaaaaaaaagtagtatggtttacccacccttgtttacttgtctgtggagagggactgccaggtcaagggagcatggtttgtcaagacttggcactctgtgattgccgttagaaagcctgccccggaggccgggcacggtggctcacacctgtaatcccagcactttgggaggccgaggcaggtggatcacgaggtcaggagtttaagaccagcctggacaagatggtgaaaccccatctctactaaaaatacaaaaattagccgggaatggtggctagtgcctgtgatcctttcatatttattcaactgttctcttacaaatgaacagctacttgggaggctgaggcagagaattgcttgaacccgggaagcagaggttgcagtgagccaagattgcaccactgcactctagcctgggcagcagagcaagactccgtctcaaaaaaaaaaaaaaaaaaaaaagcctgccccagaaaaaaagatcttctaagtgtatcgttatgggaaaaaacaaacaaacaaacaaaaaaaaccgagacaagcattggaaacattttaaggcagccctccgaaaaataaatctagctgggcgtggaggtttcatgcctgtaattccagcactttgggaggccagggtgggaggatagcttgagcccaggagtttgagagcagcctagacaatataatgtgactcagtctctaccaaaaaataaaagaaaattagccaggtgtggtggtacacacctttggtcccagctattctggaggctgaggtgggagggtcatctgagctggggaggttggtgctgcagtgagtttttttttttttgagatggagtcttgccctgtcacccattctggagtatagtggtctaatctcaactcactgcagcctctgcctttgaggctcaagcaatcctcccacctcagcctcctgagtagctgggattacaggcatgtgccatcatgcctggccaatttttgtgtcattagtagagacggggttttaccatattgaccaggctggtctcaaactcctgacctcaggtgatccgcctgccccagcctctcaaagtgctgggattacaggcgtgagccgcagtgcccagcctacagtgagctttgctcacaccactgtactccagcctgggtgacagagcgagacccggtctcaaaacaacagcaaaaaaaccctaagaccagctactggggaggctgaggcaggagaatggcgtgaacctgggaggcggagcttgcagtgagccgagatcgcgccacggccctccagcctgggcgacagagcaagactccgtctcaaaaaaaaaaaacaaaaacaaaaacaaaaaatatatacacctactatgtaccccaaaaattaaacactaaaaattaaaaataactaggtatttgtagtaaatctaggtgctcttcagtttgaacagggcctcttatctagtctgaatactccaatactgatggttcccttgtgctggaaggcatattaggtgctcaatgaatactcttgattctttgttacaattgggtaactcctttgtttacattctcctgctctgttcttgcaaatgtgtgtttcaagggggtgtgaccaaatgctctgtgtagctcaggcacttcctgggtgagtgtagcagttggcagctgtagcccttggctcagattgaagagaggtttttttttgcagctttggacttaggcctgtgctggtaaggtttgtgaacctgggccctcggggagctggtgagggtgggactggtgactgtgtggtgtccccaaggctggcgtgtgcaggagtgaccgtgtctgtgcttcaccctttcttgcagtcctacttgattgtcagtgacaaggcccgagatgcagctgctgtccttgtgtccaggtaagtttccatggcacatttcttggtgtgtggctggtgggttctgagaggggtttgtttgggtacgtgtttcatgtgcgtcttcagtcctcagacgaaggaccccgggaagtctttggactctgtggctttctctgagggagtgtgcagcagtgtttgggcacagaagacctctgaccctgaaatgaccaccctcagtggtggtttggggtgctggtgggggtcacctgacaggcccatcgacaggagtgcaggtctggaagaggcgtggctgtcatccctggggtgcagcccctgcacagggatggggtggcagttatgagaaacatctcgggccgtctcccatggagatgatgggtggtgttgggcctctgtgactggggatgaaaatcccccaacgtcctgtattaactgcaccccccgtgtgccccagacaggggaaggtggttttctctgctgagcgcagcaggcctgcggtgttggaaagataccaaggatgtgtgtatagactgagcgaacctgtttcatgagatgcaagaaggaagaaagcaatatttctaatcagtattttacatgacatgtgattttaagtatgtatgtagtttactaagtcagaacagttgacattttccccctctgcaatagtgaaagtcgaaagctggtcctaaaacctttcggtggttgtggttgggaatacggtcagtgcctcatgcagcgtcaccttcactcgggtgtgtagctgcaacttgcacagcttctttcccagagaagtgggaggagagaagcttcctttgtggggcagttggaggcattggatgaggggtttgtgacagcctggagctgaggaaggaacgcctgagtcccctggagcaggtgaggcccctcccgagagggcagaggctgcttcctgtcttgtcaaggacataaaaagatgatcgtctaattattaaagtaatctgtatatatttagataatagagcatgaagtacaaaataaaacctttgaatgctttcatcccatgggggtgtgatggcccctgtctccctaccgggtggcgccaactctgtccatggtctccccgcggggcggcaccaactctgtccatggctcagttgctgcactcaattctttgcaccacggaccaggagatgggcctggtgcgccattgtcttcttccaaaacgagatgacctggtgcgagagtgtcttttctttttctttcttttttttttttaattgagatggagtctcactttgtctcccaggctggagtgcagtggcacgatctcggctcactgcaagctctgcctcccggtttcacaccattctcctgcctcagcctcccgagtagctgggactacaggtgcccgccaccatgctcagctaatttttttttgtattttcagtagagatggggtttcactgtgttagccaggatggtctccatctcctgacctcatgatccgcccacctcggcctcccaaagtgctgagattacaggtgtgagccaccgcgcctggcccgagtgtgtcttttttttttttttttaatttttttagtatttattgatcattcttgggtgtttctcagagagggggatttggcagggtcataggacaatagtggagggaaggtcgcagataaacatgtgaacaaaggtctctggttttcctaggcagaggaccctgcggccttccgcagtgtttttgtccctgggtacttgagatcagggagtggtgatgactcttaaggagcatgctgccttcaagcatctgtttaacaaagcacatcttgcaccgcccttaatccatttacccctgagtggacacagcacatgtttcagagagcacggagttgggggtaaggttatagattaacagcatcccaaggcagaagaatttttcttagtacagaacaaaatcgagtctcctatgtctacttctttctacacagacacagtaacaaactgatgtctctttcttttccccacatttcccccttttctattcgacaaaaccgccatcgtcatcatggcccgttctcaatgagctgttgggtacacctcccagacggggtggcagccgggcagaggggctcctcacttcccagacttggcggccgggcagaggcaccccccacctcccagacggagcggcggccgggcgggggctgccccccacccgagtgtgtctacctgtcgtttgtggtgggacatttagactgctgccctcccaatttggtattaaaactcaatattgcaaacagtccacgtaaaattgtgtaccgttctgactgatttctagggatgagtttctacaagtggaacgcacgttttcagggtctgaatgcaattactggagaggctgaacaagttggaagttctttccccgtcttttccagttgggtcaaaccttaagaatgtttgccaacttcgttcaatgggaaatagtatctgcttttattcttacttttcttagcagcagtactgagggttgcgtagatttttgccgagcttggctctgtggagtgcggtgcctgtgggccaggaggcaccatctgagtacttctccctccgtggggtcctccgggaaaagagcgcgctggctcgggatcccgggcggactcccggcgagacaccgcagcgccacctagtgccgggatgagcaggtgcttttcggccgagccagtttccgtgcagaacacctgagcctgggatccaggagaggtggtgcctgggggcgtcggtgccgtggagcctttctcccccttggtctcgcacactctcgcacactgattctcaagagtgtttgagaatggcggatgccgtcagtggaagagctcttacaggtgcttggccggttccctcgacacctcccagactcaccgcaggttctgagtttcctgtacttctcagacccctttttggtgaggattgttcaggtaaggccagggctgcgaggggtcctgtgccagcatttgtctgcagtacaggttcgttttctgctctccagggaggagcagcctgctctagcccactttgctctcaggattgaatgcttctccctgtatcactggcggctctacagctgcacccgtctcccttgattaactgagcttgccaacatccacagcgctgtaggtggtgcttggtgttacagtgttgctagaacatgcagattgagtgctgccttagaaacccacaggaaggggaacatcacactctggggactgttgtggggtggggggaggggggagggatagcattgggagatatacctaatgctagatgacgagttagtgggtgcagcacaccagcatggcacatgtatacgtatgtaactaacttgcacaatgtgcacatgtaccctaaaacttaaagtataataataaaaaaattaaaaaaaaacccctttaatagatatgcctttcgccaggcacggtggctcatgcctgtaatcccagcactttgggaggctgaggcgggtggatcacctgaggtcaggagttcaagaccagcctggccaacatggtgaaaccctgtctccactaaaaatacaaaaaaattagctgggcatggtggtgcgtgcctctaattccagatacttgggaagctgaggcaggacaatcgcttgagcccaggaggcagaggttgcagtgagcagagatcgcaccattgcactccagcctgggcaacagagcaagactccatctcaaaaaaaaaagaggtacgctgtatgcagaaaagttggaaatcttggcgtggcgtggtggcacgcacctgtggtcccagctattccgaaggctgggtgggaggattgcttgagcccagaaggttgaggtttcagtgagctgtgattgcgccactgcattccagcctgcacaacagagcaagaccctgtctcaaaaaaaagttgaaaatcttgaaacatagaagttggaaaaagatatataggtaattcttatacacagtgcgtgtaccgtgtttatcttctttgcaccgttatgacttttaatgtgcacagcatgatcttaacaagtcagagtcagcactgtgctttttcacctgatttcatgtaactgctgatgaatggctccgtcgtgttctgctgtgtttcgatactgcactcagctctgtcacttcctgcctcttgtgagcagtcacggacgcctgggtttggttacagacccgttctcgtgtcaggattgtttcgtgaggatgggcccttagagatggacttctgggttccaggacacgagagtggtgttggggtctgcacacctggtggctctcagctgctctctgagcagtgctttggtggccgaggcagccccaggaacaccccacccccaaattggattaaacatggtgtcgctgattgcaggtatttaattggcatcacgctgattgccctcaccttaggtgttacatactccgcttcgtgacctgactctgcgtgtctgtgggctccttggggccttttcttccccacgagtgtgagtttcctccggtgaagggcgatgggtattgccccaggtggttgttggccttttcctttttttttggaccaaagttttaattttaatgtcaaaccgtttttttctcctttatttagttatttttacttttaagcctgcagtcttattaagagatttaacaagtagtcatttatatttttctctaccgtttattaagacagaattattgattcatttggggtttcttttggtctacagtagaaccccgcccttcccagtaggtaaccagttgctttagtgccattttgtgtctgtagggaccagcaccacaaggtcggtgggtttctccctgtgtgtggagatgagagagtgtagaaataaagacacaagacaaagagataaaagacagctgggcccgggggacaactaccaccaagttgcagagaccggtagcggccccgaatgccaggctgcactgatattattggatacaagacaaaggggcagtgtaaggaatgtgagccatctccaacggtaggtaaggtctcgtgggtcacgtgtccactggacggggggcccttccctgcctggcagccgaggcagagagagagagaggagaaggagataaacagcttacattattatttctgcttatcagagacttttcactaatttgctactgctaactaaacggcagagccaggtgtacaggatggaacgtgaaggcagactaggagcgtgaccactgaagcacagcatcacagggagacggttaggcctccggataactgcgggcgagcctgactgatgtcaggccctccacaggaggtggaggagtagagtcttctctaaactcccccggggaaagggagactctctttcccggtccgctaagtagcgggtgtttttccttgacactaacgctaccgctagaccacggtccgcttgtcaacaggcgtcttcccagacgctggcgttaccgctagaccaaggagccctctggtggccctgtctgggcataacagaaggctcgcactcttgtcttctggtcacacctcactatgtcccctcagctcctatctctgtatggcctggcttttcctaggttatgattatagagcgaggattattataatattggaataaagaataattgctaccaactaatgattaatgatatatataatcatatctaagatctgtatctggtataactattcttgttttatattttattatattggaacagctcgtgtccttggtctcttgcctcggcacctgggtggcttgccgcccacagtattccgcttttccattcatttctaatgctctgtgggaactctgtgcgttttaaagggaacacggtttgtcaccaccttaatgctgcttccttctgcgatgaagttaactgccctgggccccttttgcagatccgctaaagttaactctcctggggaggacacatgagtttcttttttctttccttttcttttcgagacagggtctcactctgttgcccaggcgcgagtgcagtggcgtgatcacagtttactgcaacctccatctcctaggctcaagcaatcctcccaccttagcctccccagtagctgggactgcaggcgcatgccacgacacccagccaatttctttttctttttttttttttgagacggagctttgctcttgttgcccaggctggagtgcagtggcgtgattttggctctactggagtgcaatggcgtgatctcagctccactgaacctctgcctccctggttcaagtgattatcctgcctcagcctcctgagtagctaggattacaggtgtgcgccagcacccctggctaatttttgtatttttagtagagacggggtttcaccatagtggccagggtggtctcaaactcctgacctcaggtgatccacccgtcttgacctcccaaagtgttgggattacaggcatgagccactgcgcccggccatgcctggctaatttttgtattattttctagagatggggtttatttatttatttatttatttatttatttttacggggtcttgctctgttgctaggctggagtgcaatggtgagatctcggctcactgcaacctccgcctcctgagttcaagtgattctcatgcctcagcctcccgagtagctgggattacaggaatgcgccaccatgcccagctaattttttaatatttttagtagagatggggtgcaagacaggctgttctcgaacttctgacgtcgtgattcacctgccttggcctcccaaagtgctgggattacgggcttgagccactgcgcctggccaagatgggggtcttaccatgtttaccaggctggtcttgaactcctgaactcaagctattcacccacctccgcctcccaaattgctgggattacaggggtgagccactgtgcccagccaaatgattctttactttctggaaatagggacttctttccccattgttcatgctgagcccctccctaagcatgctccacagggacagtggcggaggggagaggtccttgctgttacgagcagttggcaggtgccagccgtcctgtcagctgggcagcgcttctgttttgtgagggccatgaccgagtaggatggcacgtgcgtggctgtctcctgtgtgttaagtgccctgagagggcttgtccccacggaagcatggagccggctctcgcgcaggccaactagatggatgtgctggaacaagggccgggaaggtgggatggccggagttgaagttgcagtggagatgacgtgggggccggagggaggttgggcgtcatagcctggcagctccagcttccacgtctcaccttgcctggggtctccacgtagctgtctcgtgggcgtcgcgtggggcactcccccacgtggactcttccgcctcctggccctcccaagtgtcccttccgggaggtggccttgtggctgttgagggagcgcctggtgcctccctcctggcatcactgccgtctccttccccccaccccataaaggtgtggctaggatgccagtcagacctgccggcatggcctaaagaggaggtgggcaggcttggccagtactggtcctgtccccagcacctctcccactcggctgctctgcttcgaccatgttgcctttgcagttcgcgagttcccttggctcccttctgccctgggccctggctctcctgcttccctgggcagcagcactttcctcccaggttttgcagcccccctcgttgagctccgtggcttccgtcctctctctaacgaggccatgccctcccgtttccttcgtaacttttctttgcactgtggaagtccccagctgtttgtcgtttctctccagagtgtcagctgtgggagggaagggccttgtctgttctccgtgtggcagtgccagtctcgatcatggaggcaagctgggggcctggcctatgaactcctggtggagaaatcaggaggatctgggctaattagctgggcatggtggcgtgcgcttgtagtcccagctactcgagaggctgaggcaggagaattgcttgaacctgggaggcagaggttgcagtgagtcaagatcacaccactgcattccagcctgggtgacagcacaagactccatctcaaaaaaaaggaagacttgggctttttttttttttttttgagacagagtcttgttctgtctctcaggctggagtgcagtggcacaatcttggctcactgcaacctccgcctcccgggttcacgcgattctctggccttagcctcctgagtagctgggattacaggcgcacagcaccacacccggctaattttttgtgtatttttaatagcgacagggtttcactatgttggccagactggtctcgaactcctgacctcgtgatccgccctcctcgtcctccaaagtgctgggattacaggcatgagccactgcgcccggccagatttgggcttttggtttgggagctctgtgtgctcaaggtgtcctgcgctgaggccgggctgcaagaggggtggggagtgtgagcactgcctggaacacgaggccgagtccaacagggaagactttcatggggctacacgagcagctggctgtggaaacaggcctgtgcacaagacgcatggcaggtgtgggggagggaggtcccaggggctggggcccagctgccggggccaggccttgcacgtgggcacggtgtcctgaggtcaagggatgcagagttgggtccagggaggagggaggggctgagaagtgggcaggggctccctggcggtgatggggacaggtaaaactgggggggtggagggggcaggcggggggggatgggcagtaggcctgcgacctgagaggttgtggtggggaaccggctgctgagggccctggtcagggcagcgacttggtttctagggttggagagaggaggaactagctggaggaggacaggactcagtacagagctggcatcttggtgtaagggtgcgtgaggtgggagggcctggggaggtgggtgtgtgtggggtgggctggtgaggcgtgggcgaggtctcagtgctgaggccttggttgagctgtatccttttggcagatttatcacacgtcctgatgtcaagcaaagcaagatggctgagttcctggactggagcctgtgcaatctggcccgttcctccttccagaccatgcagggggtcatcaccatggatgggacgctgcaggccctggtaagtgctgcccgcaggggctgtggagatcgcagggaaatggcgccttacatggggaccacggaatgatgttacctgtgattccatcttgacgtaattggaaccccgtgggattgatttaaccgggccagggtcttgggcagtttccttttccctctgctttgggtcctgcctcaggcagggctggtttctgcgctggtgctggtggatgggcttggagccccacctgttgccagcagagggcagtggtgccacgcagccggggctccccagggtaggtttctctgcatctgggctgcttagttcctgtttaagtgcagagactgaacgagctctaataaaacaaggtgggtgagttgaaatttgattctgttcctttgcactgggctcgggttggatgttcctgactgcttcgttgggacacagaccctggcctctgcctgcaggtgcctggttagtgccctggctgcagccctttgccagccctttccctgccctttcgctctgattgtctcttgtgttaccttttcttgtgctaacgaggaggaaaggtcaagtctcagaagagggcaaagcctcttttgggtcagcgtcctggaggctgcagctccctggtcagccttctggagggggagccggcagccggctgtggcctttggcgtggtgggttcagcgccttcttctctctttaattacagcgggtgaggctttgagagcacttctcatccttgtctcacgctgtggagcctgtggtccctctgaggagcggggcactttgttcttgtttaaaaaatatattttatagagacagggtcttgctatgtaggtcagggtggtcttaaactcctggcctcaagtgatcctcctgcctttgtgatgatcccaaagtgctgggattacaggcttgagccgccgcgcctggaaggacactttggagcgcgttttaggggagatgatgagtgccacctcgccacggcgtcctcctgtccgtggcgtcgtcctcctgtccgcagcatcgtcttcctatccgcggcattgtcttcctatccgcggcgttgtcttcctgtctgtggcgtcgtcctgtctgcggtggcgtcgtcctgtctgcggtggcgtcctcctgtccgcagaggcgtcctcatgtcctcagtgttgtcttcctgtccatggcgttgtcttcctgtctgcggtgtcgtcttcctgtccatggcggcctcctgtccgcggtgccctcctgtccatggtggcctcctgtccgctgtgccctcctgtccgcggcgtcgtcttcctgtctgtggtatcatcttcctgcccgcggttttgtcctggccgtggcaggttctgccagggagcgggaggctgtcagctgggtggaggggggctgtgggagtgatagcctggggtgggggcatacgtttcttgagggggaattgggaagtgtcctcctcaatgtctgctgcttcccggtcatgctgccgtggtcttcaggagggcagcctttgaaatgaggaaaaggtttcagacgtgtgagagaaaactgcagacgtgtttcctggagcctgtgctctgcccaggtgatgtctgttttcttcaggcgtcccctcaacctccacataaatgtgacagattcagcagttttcaaaaatcaagatataattcacataccacaagtaatttatccttctaaggtaaacaattctgtagttttctgtgcggtcatcaccattatctaacttcaggacactgtcatcatcgtgagagaaaccttgattgcaccgagcagtccgtccctcaccttccccagcccctgcagccgtggatccatgtgctgtccctgtggacttgctggttgcggacatctcacctcaccagagtcgtacacgacacagccttttgcgtctggccttcactgagcccgatgtgtccaaggttcatctgcgctgtggtgttgtcagtgcctcgttccctttatggccgaatcataagccaacgtgtgggtattttccatatgccagcgtgtgggtattttccatatgccagtgtgtgggtattttctgctcttacaaattacgctgtgaagaactttcatgtgcaagtttttgtttaaacttaatgctttcaggccgggcgcggtggctcatgcctataatcccagcactttgggaggccgaggcaggcagattacttgaggtcgggagttcgagaccagcctggtcaacgtggtgaaaccccatctctactaaaaatgcaaaaaatagccaggcatagtggcgtgggcctgtaatcccagctactccggaggctgaggcaggagaattgcttgaacctgggaggcggaggttgagtgagccgagatcatgccactgcaccccagcctaggtgacagagcaagactctgccagaaaaaaaaaacagaaaaaacaaacccaacttaatactttcagtacccttgggtacacaacactagtttttaataaaattttaaacaaaatttggaatgttttcatctttctggagtctttctaaaaagatttttctggtggcatacctgtcgtactgatgaaatagaggacctcctcatgccaggcatttttgggcattgcaggtacagatgtgctgtctgtgtccccaggtgcccctcgttccggccgtgctggggcagcatcctcaatgcctaaagaggattcattgctatcgtggaggtcagggcaggctgaggctggccttgaagggtacgggggtggaggggtagggcagggaggactcaggtctcggacgtacccactgtgccattggtccatggatcctcagggaatgtgcgttttatgttttaggcaattctggtaaaggtggtggatttagttgcaattggattcttcattttttgccttgggtctcactgaggaaacatgaagaaggggtagatggcagtggccagggtgggggtcctgggaattctggtagcttcaccttaatgtttgtgatgctgggtgtacagacagcctcccacatgaccaaggacacgctcttaggtccctaagaccccagaagaatgggccgctactgccaagaagtatgacatgcgtgtggaagaccatgagccttacccggctggtggcatggggtgtggcaactgccgcagctccccgaaccattgcagtgggaaaggggtacgtgctgtgactaagaccactggacccgacccatcgcagcgacagggggtccatgctgtgtgactgagaccactggaccccacccatcgcagcgggaggggggtccatgctgtgtgactgggaccactggatcccacccatcgcagcgacagggggtccatgctgtgtgactgagaccactggaccccacccatcgcagcgggaggggggtccatgctgtgtgactgggaccactggaccccacccatcgcagcgggaggggggtccatgctgtgtgactgggaccactggatcccacccatcgcagcgacagggggtccatgctgtgtgactgagaccactggatcccacccatcgcagcgggaggggggtccatgctgtgtgactgggaccactggacccgacccatcgcagcgggaggggggtccatgctgtgtgactgggaccactggatcccacccatcgcagcgggaggggggtccatgctgtgtgactgggaccactggacccgacccatcgcagcgggaggggggtccatgctgtgtgactgggaccactggacccgacccatcgcagcgggaggggggtccatgctgtgtgactgggaccactggatcccacccatcgcagcgggaggggcgtccatgctgtgtgactgggaccactggacccgacccatcgcagcgggaggggggtccatgctgtgtgactgggaccactggacccgacccatcgcagcgggaggggggtccatgctgtgtgactgggaccactggatcccacccatcgcagcgggaggggggtccatgatgtgtgactgggaccactggatcccgtccatcgcagcgggaggggggtccatgctgtgtgactgggaccactggatcccgcccatcgcagcgggaggggggtccatgctgtgtgactgggaccactggacccgacccatcgcagcgggaggggggtccatgctgtgtgactgggaccactggacccgacccatcgcagtgggagggggtccatgctgtgactgggaccacctggcctgaggttggactggtgaaatgacaatgttggcacctacatgtgtgtcaggatccatgtggatatgtcccgcacacctgcttcttggaatattgtgtaagcagctcttcagcttcacggccttcatgatcgtgttctgggtggggaagaattaaccagcctaccagcccgtggggccaaagcagtgtccttataatcatctgcacctggaaccaggtggcgatcccaccgtagaacctgtggctcacaggatctgaggtggcttcgagggcttctctgccctctaggattccctcatccttagaaatttaaccttaatgaaatccctaataaaactcagtgctgtgggggaaaaacatctcaggtcaggggagcaaatgggaggtctaacaggatgtgaccagagctggttgtctccaatggctctgccccgagtgtggtgcctctgcaggggaggccgttagccctgccccgagtgtgggtgctgctttgggaggggaggcaaatttgatctctgtccggtctcttaacgggcttctaggggtctcctgcagctctcgtcagcctggcctgggagcctcccctcctctgccgtccccaccccatgctgttgggtcagcaggatatcccagccttggggctggagccagctgtggctgcccagggacttgcaggcaggtgaggcgtgccaccttctggccaggctggctgtgggagaggcagcctcctggtgaggggctgtgggccactgcgttcaggctgccttggagggctccacggtgtcccctgggtgcagggctccgagtccttctcggcttgggagggtcttgtggccacatgtgtctagttctgcagtttctttgttgtgggttcggttctttactttttttttttttttttttgatgatcttgttggttttctctagattgttcccaagttttctgttcttccatcccaagtgggagacacgtgttgcacagcctgcatttggaatacccagagggtgggtgggcgggacggctcgctgccccattcccctcctagctgctgggacaggtgggaattcctgtagcaaagtcaaaccagccaggagtggggaagtgctttttattttgacatctccaagttccacgttgaggtggagagacattcgtttttccccttcctcccgaggtgtaaaacggtcttctcaaaggcttaggagagccgagccctgtgccaccccccggcatatgctggcaaagagtgaggcgtgctgtcctgccgtttagggcagagcacccaggcggtttggcagcagcacctcagaactattcagagatttgccctcagcaagagtgagcaattgtctgacgcagccggctgaaatccctgggaagggaatgaatgaaactgccgtgaagcaacgcctggcggggccgggcttctggcagctcctggggccagcacgtcccttccagagcgtctgaagccctgggcggctgctggagcatctcgagtctttccagagtcatgtgtgttgtttccttctgtctcttggaagggtccgtttggtctgatccaggttgcctcagcaggaggaagtcgtgctgggtgctgagcgggtgggaggtttcaccttgggcttggcagagctgcaggcagaggccgggcgcctgctgtacatgatgaaacttgcaggtggattctgcttagggtttcatctgtttcctttgatgcacttggcttcattgtcatccacctgttcattactgtgggcgaaacaggtgaactctcaacaagtaccatcgaaaccaggatttgatcttcatttccctcgaagcgtagttcccttgcagtgagggtttttaactcctgtgggagggaagcaagtgtttggcaatgtaatttccctggaaggcccctgtacttcagctttaaaaacacgctttggtttagtcccaatttaagcattaagattaatgcaaattgaggaaattcaaggaaggagaaaaacacattaaaaatggaaaatgggctgggcacagtggctcatgccggtaatcccagcgctttgggaggccgaggcaggtggatcacttgaggccaggagtttgataccagcctggccaacatggtgaaaccctgtctctactaaaaatacaaaaaattagttgggcatggtggtgcgcgcctgtaatcccagctacttgggaggctgaggcaggaaaatcgcttgaacccgggaggtggaggttgcagtgagccgacatggcgccactgcattccagcctgggcaacagagcaagactccatctaaaaaaaaatttacaaaaaggaaaatggctgtcatttcatgtgtgactctgcttgctgattgatagttgtgctctcttggtttctagtgctctgattggaagattgtcgactgtgtggagtgggtttctccctgtgtgttctcacaatggctgggaggcggcggcggggctgggggactcggactgcgagacggggctgttgactatgaaagtggtaataggatgctcttccccttatcggctgttaggctcgagtctcccctttgcagtgcggtttctttttatttttatcattgacaaaagcacaactcttgttaaaggataaaatagtcacacacaacagcattaaaaaccaagaaagccaaagaacgctggcactgtcagcctcactcccagctcccgctcggcccttgtgaagagaggtgctgaagccactctgcttttttatagttaataaaagcagccaggtccccaagtaggagtggttgtggccaagagtgtgtgggccgggaaccagggcttgagctgctgtgagctgtgcccaggccctttgctgactccgtctctcctgtgacctgaggccagggtgagcaccagcgcccgccccacctgggagggaagcagcagacctctcaccgcagaggctggtgtgaggctaattagcacagtcagtctttgaagatgaaagaagacagctgattatctaaaacatttcacatttaggctttgatttctcttcagatttggggaacagcaccctactgtttcatttagggttcagtgtggccagaggaagatgacccacgtggtcctttttagttgtagtgctctcttggggcaaggttttggatggagaaaataggacaagagcagtttgaatgtgggtactttccagagatcatgctcctgtagcatttgggtgaaacgaggtaccccaggccacgctggttcggtctcctcgtggcgttaaggaaagacctggagcagccagctcctaacactcatttcccatcactcagcattttatgtggggcgggcacagtgccgtgagtcttacagaaacctgcatggtgagccgcacgcctttgagtccccatcagccctggcccatccctgctgaggtggcgcgacctgctcacagacgtgtgctcacaggcagcccgtcgcggggtcatgtgctagacggggagggggcttggcgggtcaccagcctcaccccgctcagttcttagatgaggaagagacaggcagagagctgggctgggctgctgctgagtgggctagagctgggtctcagtggcccctgccccagtcgtcctgacctgtggcccctgtgcaggttggggtgcccctgccctctcccctgccccgccctcacctggctcacagacccgtgatgcctcactgcccacgcagtcaccttagaggcaccttccctctaaggcagatgtccctcaggctttggtcctggctgttgatatctcagctctgattcacccttgacctttattacctgatttctgtccttggttctcgagccctccttctgtggacccgttgggtacacgtgtgacacttcagaacccgcaagtcccaggtcacacctgttgtaccatcactttcccctcctggcctgtttacccgggagcccagcaacaaatgggagcttctgtgctgctgtccgtgcatacggcccaggagccgggctcatccccgagacgccgtgttccctcccgctgtccgctcacacctgcctgtgtggacgtggctctgacatgtctccttcctggttcattgctcatctgttctcatgtggctgcgccgccaccctgtcctgggggtccttgtcccagcacgtggctctgtgcttcacgtcatcctgagtctgtcccgctctgccgcctggtccaggtgggagccatttccttctgtgaagtgttccctctggaggccctgggctccccgactaccctcccgcctctcctgtggctgtcggctgcagtaaaggtgctggtggagggtgtgagccatccattcatagagtgccagactctgtcccatgctgcctctgtgcccttgatcctggcagcacacctgctgtcctgtggcctgcgtaaagggtggcctcggaagcctgtggcctgggtaaagcgtggcctcggaagcttgtggcctgggtagtgggtggcctcatcttggcctcggaagcaggagggctcaggctgtggcccacgcctggggttccccatccccccgtgtgtcctggtgtctttgcttggctcgccggcctccatgggctccccaggtggcaggtggctctcagccatgctctccgtcctcatgcttgtttctgccctggcagagctgctcagtggccagcccgtgggacccctgtgcaccctgccgcccccagcatatgtcagcagcgccgtccgggggagatgtggcatcagcacagccttgtccttgtctctgcccgttcttccttccttgcctctatgtgtctgcttttttctcttccacatggtgtccacagtggataaccacatccactggcctcctggttggtggatcctcctcctgctgggctcagagctgtgccacccccacctgcactgcagagaagctcagacccctctctgacctcagacgctggagcctgagccccctgcttcccaggccaatgccccttcaggtccctgcaaagccactgctctttgtggtctccctgccgccgttgccctccctttgccgctgagcccgtgggctgcttggtggcttgggagctgcatacaattctattttgtctggtttgttttcaggctttctgtggcaggaattgtgtctcttgcatctttttttttttttttttttagacggagtctcgctctgttgccctggctggagtgcagtggcgcgatctcggctcactgcaagctccgcctcccgggttcacgccattctcctggctcagcctcctgagtagctgggactacaggcaccctccaccacgcctggctaatttttttgtattttagtagagatggggtttcaccgtgttagccaggatggtctcgatctcctgacctcgtgatctgcctgcctcggcctcccaaagtgctgggattacaggcgtgaaccactgtgcccggccatggatcattaacctcttttctagcatcttacctctgtggtggttcacttttgcgagcttttgctgggccttggaaggtgcgtgggctcgctgctcctctcttctgtgggaactgttgcctttgggcagggggcacaccccagaggtggtcacacacacctgaacgggagcacagtcataagtccctgtcatgcaaagatgggctgtgcagaatgagctcggaatagcagccagaaggctcagtgatgggggagttgtttaagctggaatactgtaatgctgctggctgtttatggctgtgaggtcactacgtgggctgctgagaacattttaaaatgctgagtgagtcatgaaacagtcatgcgtcccctaacaatgagggtagtcctgagaactgcgtcgttgggcagtgtcgtcgtgtgaacaccgtagcgtgcacttaaacatagatggtgtggcctgctgctcccaggccaggtggtgcggcctgctgcactcccaggccaggtggtgtggcccgctgctcccaggctgcaaacctgtacagcacctgactgtgctgaatactgcagggaactgtaacacagtggtgtttgcacatctaagcatagaaaaggtacagtaaaaatatatcatcagctgggcacggtggatcacgcctgtaatcccagcactttgggaggccgaggcgggtggatcacgaggtcaagagatcgagaccatcctggctaaaatggtgaaaccccatctctactaaaaatacaaaaattagccgggcgtggtggcgggcgcctgtagtcccagcgactcgggaagccgaggcaggagaatcgctcgaacccaggaggcagaggttgcagtgagccgagattgtgtcactgcattccagcctgggtgacagagcgagactccgtctccaaaaaaaaaaaaaaaattatatgtatatacacacgtgtatacatgtgtgcacacacacacacacatatatgtgtatatatatgtatatataaaatccttttatgggctcactatcaatatgtggttcctcattgaccagaatgttctatgatgtaggactctagtgcgatacactgtcatgaacagattgataaattaggtgaaggatgatgcctgtgaatgacagacgtaggaagccacaatcattttgtgttttccacactctctttgagagctgtgttgccttggtttatggatgaggacatggacccaggtcaggggctgccaggtcggtgctggggtgtggagctgggccttgcatggcccccacctgtgaaggtaattagtgtttaccttacagtccaaagtttggtgaaaaataacacttcgttctggaaagataaaagctagatgtgattatttcgatcattgaagcatttttgtgtgaaattacctttttttttggcgtcagtggcatgatctcagctcactgcaacctccacctcccgggctgaagtcatcctcccccctcagcctcctgagtagctgggattacaggtggacgccaccacacctggctaatttttgtacttttagtagagatgaggtcttgccatgttgtccgggctggtctgggactcttaggctcaagtaaccctcctgccttggcctcccaaagcgctcggattctaggtgtgagccactacacccagcctgaaattagttttcattttgatatttgttttcttaaaattctttataatttgtcagaaatttattttgtcagaaacagtatattttttcactctggggctctgattctaatcagtcatttaccaatccagcaatgaaagttttcacttccgtcaatggcttttttcctctgaatgtgtggtggtcctgaggggagtgcattttgctcgctcctgggggaggcagtggtctggcctgtccccaccagtgccccctaggccccgccttgaggacaagctctcttctgtttctgagcgctctcccgtcctgtctagggcaactgctgctctttctaggggtggtagtggggctctttaagatgtccctcgctttgatttttgcaggccagcaaatgcactggacgttgtggtttttctggcctccagtagtggtgtggtgggaaggttcttttcctgccctgctgctgaggggagcctcgagcgtaccagagttcctcagtgaagcctttgcacgtcctgcagggtgcagcccagcatgggtttcactgccctccaggaaaggcctggccctggtgggctcgctgcagcacaggcacggacctggggctgtgctctcaaggcattccagcctggaaagggttgttttggtgttaaagatcctcttccgtgcctgtcctgtggcccctctgtgtggcatgcccaagagtggctttgaacatggctgccctccgtgtgctgagcctgcgggggcacggctaccctccgtgtgctgagcctgcgggggcacggatgcgattggttgcttcccaagataccatttcttggtgtcggagcaggactcgggatggcagaaaggggaacagactcgctctcctcatctgcagagtcggcatggttatgtggggccacagggtgacccgctggcctggagctagcgtggtctcagccatctgcctcagtgccggccggcactcacagcttctcagaagcctgtgttaccagccagagccaagcctgaactggtgtggtgtgggggcccttctcccagggcctcgggtggagttgcttttcttggcctagatttggcagtgcctgaagggagcctcaaaccagcatctcctgcttggcagcgggtgagcttgctcccgagtagctcgacagcctgtgatttactgggcttggagaacatgccccaggggggggaagctggctcgcacgttgcagagaagccagcttgggtgggtagccatcgaaaggtggggcgggttaggatgattgctgagaaactccttttgtttgcagcttgtgctgtgctggtttctagaacaacaaaaacagacctgcagtcattcctcatttaccatgcagggctgttttcctctaatccctggtgtcatcacctctgtctagtgtatgcttttcagcaggtggttttaatttggttcccattatgcttccatgaaagtgggctgtgccccccattttatggcctagcttatgagcactcaagaccattgatgactagagtgcgctctctctggccgcgtcctcctgctgacaggtaccccatcccaccgccacgctgagcactggccactgcacactgcacactttctctggtgaagatggccttacttttcagtgaaataaatggaaacaaagccctgtcttcattgactcgttccttccctgtcgtctcttttgccctcctgcacccatgcctgggaaagtggataacttttggggcttttctctgtgtgtgctgaatgcccaggaggctgcctgtgtaattcagctggaaactgtccccagggtagagagaagtgtgaggagaaaaagacccttcgccctgtaaatgtgtggggttctggtttctcccttactgcagatggtggcgggccctggccttggtgctgtctcctgtgtgtagctggggacggtggaagctgggctgggcctttccaggtgtggggcatccaggccagttacaagagatgatgcttgctttcccgagaactcatcaccacttgtatcttagtctgctgtagagaatgttgtactacacttcataggaattgagtaactaaacaacgttcatgtgtgagggcactctaggaatttcacagtgtcttggattctttttatttagtgagagaaaccagacgacgtgttagcccgttgccaagtaagactgggggacacgtcagcctgttgccgagagagaccaggggacatgttagcccgttgctgagagagaccgggggacacgatagcctgttgctgagagagaccggggaacacggtagcctgttgctgagagaggtcatttcccggatctttgtcctgcgtccgcccacagctgcacagctgctcttctggtttaggttctggcctttcccactggggttttccagcagcctctgtagcggtcttcgttgttgagcacttcactgttcatccccaggttctccatccagctgctgttggaatctggtcatgtggccatggctgcaggtgatacggtggtgctctttgcctgtaggatgagatttcagccgctcgcaggttcatttgttgtggaacaacgtactccacagctggtggcatcagtgacagccgcactcttgcgtggatcgattctgtggcctcgcagggtggggtgcagggggccgtttgttactgccctttgatgcctgggcctctgccgagaagaccacgtggcaggtgccttgaagggctgggtgcggcaggggcccttgactgaagctggctcttcctgcatggcagccggcttcccggagggagtgtctcaaggggaggtgtctggagaggccctgaaagaggccgccaggcttctgacctgggattgggggtcactggcatcactcctgcctgcctctgttggttgtggcagttggaagcctaccaaggtggtgggtgagggacccttgattgtccgtctggcaaactctgttccccactgagctggccagccggctgcagtgacagcttctctgtgaagtgtcttgtcttcttatcccccaggcgcggtccggcttctcgttgcacactggtgggcttcaggccgtcagcccacctcccagggaatttgagtgtgtgcttggccctgcgactgcccccgaaccccgcgtcccgttgcggggagctcgcctgtgccccacggtttctgctcagcaagtgttggctctgtaaaccgatgacttagggttaaaacacatattaaattagatacatctggactggtgtgaaataatttaactttcgattttatatttcacacaaactaaagatggggaagagttcttaaagttaaatgagaacttgttttgggcaaacaaggatcatctccattcacttggtagggaacgtgttactatccatttcgctaaagagaaaggggctaagtctctgatcaccttggtgaatgtgttattctgagtggctcagggaggtgggtgctgccactgccccattttacagacagaggaacaggagcgcagagaccctgctctgctccacaggcgtgactggtggtctgtctggctgtctccttcctgttttgatcgtaggtgtgggatctgcaccacaggtgtgactggtggtctgtgtgcctttgctgcttctccactcagcgcttaggagagccccccagcgggctccatggagagagtctaagttccctctccttttaagaagatgtttctattctacacttaagtaagagatcaggcagtttacagggttcataatgcaaataaaagacaccagtatttagtgaaagcctcttcaccttgtctgagcatctcctgatgggcggcacctgcttcttcatttttccgtgtggtgggcgacagcaggacaggggtggcgtggtgtgcggtgcagatagtctgagacagatgcagttctcaccttgactgtgaaattctgttttctgaaggaaaggaaattcattcgcgttttcttagaagggctcagttctaggattcttcgattatgaggcttggatatttatgtgaatcatcgcatttgtcctccagactttaaagcagaaggtaaaacctcaggttgagaattcaggagggctagaaccagtgtttgagagaaaatctgatattcctgtttggtctgatggactccaggtgatgacgtccgtgtgtgcgcatcgtggggaccgggctgccaggtgtgtgtgtgagacacgggctgagctggtcacccttctcatttgttggtgaagcatgaatgcagatggaggcctttgtgtgaggtggtttggcctgtaacttttatcctttgtaactttatttatacgcagataatttttaaaaacctactgagatatcttctttttccaggctagtagtgccctgaacttaaacctgggcacgttttgtgatgccattgatgagggaggggtggagaggctgcagtctccatgaggggactggacttatcattgcatccctattttcagatgaatttttgggagatgatttcactagtctcttataattactttatcatgtacagaaactgttttctttattattaggtggtgagtgtttagaataaaaattctgaaagatgtgatgaattgttttcacaatttgtgtgtatgttttaaacttctatttgtatttgtaacattaaaaatctttttttttttttttaggcacaaatatttaaacatggaaaacgtgaagactgtttgccctatggtaaggtttatttttaagagacgatatctttgtgatgtgagtttgctcatatacaatcaagtgtctttccttaacattttattcatagatataggaactgtacattggtatgtttggacactatcgttcttttttttgttgtgggttttagtaactgaacttttttttttttttttttttttttttttttttgagactgagtctccctctgttgcccaggctggattgcagtggcacaatcttggctcactgcagcctccgcgtcctgggttcaagcaattcttctgcctcagcctcccgagtagctgggactacaggtgcctgccaccatgcccagctaatttttgtatttttttttttttgagatggattttctctctgtcgcccaggctggagtgcagtggcactatctcagctcactgcaaactccgcctcctggattcacgccattctcctgcatcaacctcccgagtagctgggactacaggtgcctgccacaatgcccagctaattttttgtatttttagtagagatggggtttcaccgtgttagccaggatggtctcgatctcctgaccttgagatccacctgcctcggcttcccaaagtgctgggattacaggtgtgagccaccgtgcccggcctaatttttgtatttttaatagagatggggtttcaccatgttggccaggctagtcttgaactgctgacctagtgatctgcctgcctcggcctcccaaagtgctgggattacaggcgtaataactggactttttgtcactttcctagtcctttgataaagagggattgctgccaggggtctcgtgagggaggtctgggcaaagcccgtgtcatgatctgaggttggacctggcttcttggggcccaggagcagccatgttcctctgatagccacagccaccacctcttttgccttcttcctaattctcttaatttattctttttgagactgcatcttactgtgtcgcccaggctggaatacatgacacagctcactgcagcttcgacctcctgggctcaagccatcctcccacctcagccccctgagtggctgggactacaggcgagctctaccacgcccggctaatttttttagcagtggggtcttgctgtgctgtccaggctggtcttgaactcctgggctcaagtgatctgccctgccttggcctcccaaagtgctgggcttaaaggtatgagccaccacgcctggctcaattctcttaattttagattgagcctcaatttctgaaaataagggcagtgtttttctccacgcagaggtttaccatctggaaaaagagaaacttcttagagcctttgtgtgttttagaagctatccggactgggcgttgtggctcacgcctgtaatcccagcgctttgggaggctgaggcgggtggatcacgaggtcaggagatcgagaccagcctggccaacatagtgaaaccccatctctactaaaaatacaaaaattagctgggcatggtggcacatgcctgtaatcccagctactcgggaggcggaggcaggagaatcccttgagccagggagttggaggttgcagtgagctgagatcgcgccacagcactctagcctggcgacagagcaagactctgtctcaaaaaaaaaaaaaaaaaaaaaagaaactatccgaatatcaaatttgaataactttctttttttgaaagtttttcattatggaaaatttgaaacatgtataaagaagagagaatggcgtgcacgccccgtgtctctctcaggagtgtgcgagttttcgtgtgcagcctgtttcatccctgcaccgcacaggagggacacacagtgccatctcacctgtgtgtacttccatacatgtctctggaaggtggggctctttatgtcctcaccacacccgagaacgcgagcagccgttgccaggccctgtcggcgggaggagcgtccttggtgacgtgaacacagacctccctcttgggctgtcgtgcttgtcacccacgctcattgtgcccactgtcagagccttctgagaagttactcagatgctctttcagctgacctggttttataggcaagcattatgagttaaacggcacctctgcccgaggtcacggcacccacataaaactggtgaacgttcactttctgtcatttcccagcctcaaggcagagcttcctgcagggcactgcagctccagcccccatccccctgctctgtccccgccccactgccccttcctccatctccttgtcttccatcacctcacctaactctcagctctgtcttcagcttctcttcttttctcctgtcccctgtcagttggttgcagtcttgtccatttcacttccagcccatctctgaagccgccatgcacttccaccccagcccttgtctgtcccgggaatgctgtcctcctggcctcagcttgccctcgtcgcagcacccgggcgtctcctgctcgcaggctctccctgtcgtgctgtgcccagtgctaccttgagcctccccttggctcagcctcctgtcctgctattgtcatcactgcatgacaccgagtgattccccctgaaaaacagagcaagccacaggaaccccgtggcctgtgtgttctccccagccgcagtgtgctccatggcttctggggttgctgcagtgtgccctgtggcctgtgtgttctccccggccacagcatgcccgtggcctgcgtggtctctgtggccgcaggatgcccgtggcctgtggggtctccgtggctgcagtgtgcctgtggtcggttgggcctttgtgtgtgctgccccccttcagattggctccctgccctctgagtacttgctctcctgacctccactgatgttgcttcacagcaaggaagtcgagtaggttcaactccagcagctcttggttcatgatttgggatgatgggggtcttggtgatgtctcctgcctcaaggcccctgtggagccggctgttggtttcggggacacaggtggtgcagtcagaagatgcctgcagcccttcctgcgctgagtccagttcttgtttgcagctgccactgtcctcaggtgcctcgatggctgcagactccctgagagcaaccagaccctgctgcggaagctgggggtgaagcttgtgcagcgactggggctgacattcctgaagccgaaggtggcagcatggaggtaggcaccatgagggcggtgcctggggagggccacggggtggggaggggttgctgtggggggcaggcgccattgatgagggcggggcaggtgctgttggggcaggtgctgtggggaggcagtcgccctgttgcggggtgggggaggcaggcgccatggggtggggaggcaggcgccttggttctggacacagttgggggcactctctggagggcaggccgagccgtaggtgagcgtctggtgtggctggtgctgtggcttttgtgtccagtggtgatggcagagaagatgtgttagtaacaagtgttttctgctttcattcatttctttaatcctagaagtgtttctgattttgagaggaatggttttcttttggttattttctgactgcatctcccagttggaagaactgcagctggcgttggcaggaaggtggcgtgtgcgtcgtgtggctcggagtcagcgtggcaggatggcggcgtgtgtgtcgtgtggctcggagtcagcgtggcaggatggcggcatgtgtgtcgtcgtgtggctcagggtcagcgtggcaggaggctggcgtgtgcgtcgtgtggctcggtcagcgtggcaggagggtggcgtgtgcgtcgtgtggctcagagtcagcgtggcaggagggcggcgtgtgcgttgtgtgggtcggagtcagcgtggcaggagggcggcgtgtgcgttgtgtggctcggagtcagcgtggcaggagggtgacgtgtgcgtgatcgtgtggctcagggtcagcgtggcaggagggcggcgtgtgcatcgtcgtgtggctcggagtcagcgtggcaggagggcggcgtgtgcgtcgtgtggttcggagtcagcgtggcaggagggcgtcgtgtgcgtcgtgtggttcggagtcagcgtggcaggagggcggcgtgtgtgtcgtcgtgtggctcggagtcagcgtggcagcagggtggcatgtgtgtcgtgtggctcggggtcagctcagcctccctggcgtggcagcgtgtgtgcgtcgtgttgctcagaggcggtgcggcctccctggtgtggacgcgctgtgggggaaagctgcatcggatcagtgatgagtctgaatgacaggctccctttcaaagactgttggagaaagtgaaaccgcctttcttgctggcagaaatgatgtcttagcagtctgtagcggccggtgtgaacgggttggttctcaaggagacagacttttctagtgttcttagggtgctgtgtgttagcgaccttcagtttgtttcaagtgctataatacgtgtggtttgggaaggaattacttggttaaggtcagctcacactccgtcctggatgatggcaaattccagagacgcgtgttgtgttgcagtgttgggtgtgcagctcactctgtaggaagttgctcattaggcacagtgttcgtggctagtttctcaaagctgctgtggggaatgttcagtgctgtaccaggcagggttctccagagaagcagagcccataggatgtgtgtgtgtcggcgaggctgtgagctggagaccaggagagctcatggtggttcttggccaaaggcctcagggtggagacccaggaagagctgattggttttagtctgaagacagaacaagtccagttgagagattgccaggcaggagggcttcccccctcctcagggagggccggcgttttgttctgctggggccttccgctggctgaacgaggccccctgcatttggcagggtcctctgcctgactttgtctacagattcacatgctggtccagagcccctgacacaagcactggaagcaggtgtgatgaaatagcggggcgccccacggcgcagtcaggttgccatgtaaagttaagcatcacaagcactgaaatgttggtacagaaaataatccagtatcctagttctctcgataatgatgtgcgtgttgccacatacacttcacgtaattctaacgtggttgggttttagtccccgtcttgtgtttttctcttccgtctttctctacgtttcctgtatttctaacttttttccatttttatctcctcggttggattttcgttgtctctgttagtaccgttctcttcttggttgtcttctgttgatgaggacggacttacgctctgacgggctgttagatttctggttcatcccactcctcctgccagccttggctcgaggctttgttagggtgggtctttctcagctcttttcctccagggattggtctttcctccacagcatggtccttgctttaagtatgtagcctttcagggacttaggtgaaagtcacggctttctctcccgtcctgctgggcccgggtctccggggccctctgagggttgcacagtctccaagttctctgcggcactcggcctcccagccattctctgacaggtgcgtctgagtctcgccttgtgcttccttatcttggagtgcccagggatccaagggaatttttgggcagagttttgggcctctgtctcagcagctctcttctccccaacatcctctcccccacatatgagccctccactcattgagattgctgcttcctgggctgtttccttggtacggtgtagaaagtacccctgcggggaggaggtggaggtggcccacctgcagcttcccctcgctggggattgttgccctgccttggttgccatcacctgctggccaacagtggctttaagtcttccgtccgagtctcaccattgttgaggtcgggagggcatgtgtagaagcagcctgaggtcattgtctttgtggtgccgtctggtctttgtgaggtggctgagctgcgcgcttgcgtgaggagaatggcggctggggtgcaccggtctgtggggcgttaggggagactgggggctggggtgtgccagccatgggccattaggggagactgggggctgaggtgcacctgcccgtgggacgttaggggagactgggggctggggtgtgcctgcctgtggggcgttaggggagagtgggggccggggtgcacctgcctgtggggcgttagcggggagtgggggccggggtgcacctgcctgtagagtttaggggagagtgggggctggggtgcacctgcctgtagagtttaggggagagtgggggctggggtgtgcctgcctgtggggtgttggggaagagtgggggctggggtgtgcctgctcgtggggcattaggcatcttgctgggtgtctgatggtctccgccacggtcctaagatggctgatgatactctcttcataccagttaccctacattacagtgtaccccgaaatttagcagcttaaacagtgcactttttcctcacagttttggtgggtctggaatcttgacgtggctcagctgggtccctggtcagggtctctcctgaggcttcttaaacagtgcactttttcctcacagttttggtgggtctggaatcttgacgtggctcagctgggtccctggttagggtctctcctgaggcttcttgaaggcgccggcctggccactgccgtctcaaggcctgcattgctggggggtgtgcttccatgctcctcatgggttgctgtcgggacccggtgccttgtgggctgttggtggggacctgtttgaagtccttaccatgtgggcccctccgcagggcagtgcacagcatggtagctggcttcattggaggctgagaggcgggtggaaaccacggctgtttggaaggtggcagctctcaccagactctgcgtattctgttccttgggagggaatcattgggcccaggccacaccccgtgtgagaggaacgctaggcggtgggggtcgtgggctgtcttggaaactgcccccctccttgtttcctagacttggaaactgagtcccagagggctagagctaggatgagtcattcgaagcaggttgatggcatcagcaccagtgtgtgagttctggttctgccgccaaagcctaagctgtttgtcctctgggaggctgtctcaggctacagccgcagcagctgccctgaactctcactggacaccttttctgcatgagaccggggaagcagggcccacagccaggcggcccgccctgcactcacccttggcaggagcagctgtgtacgcgggggccttgctcagcgcagggctgggctgcacgccgagcgcagactctgacggctcctcacacagctctctgcgtaggactgcgttcccattttatagagggggaagtgggggcatggagcggctcaggagctgttcagaatcacacagcaagtaggcgtagagcaggcctgaccaggagccaggtcccagggtctgtgccatgggccccttcatggcgtgtccaggggatgacaatgcaggttccccatgtgggtgtgaagagggctacacgttgctgccttttgaggggcattcgggaggcaggatctgtaggaactggtgaccggtgagacgcagcacctggtgatgaaggggcggtgtgtggcctgggcggtggcagtggtggccgttcaggaaggggctgccaggaggcagagggtcccgaaggccgggtgcttccccagggaaggcgctggtcctgtcgtctgtgtacccatcatctgccttctctcctgactttccctaatcaaagctggacactagctgaggatgttctggactcggggcgtgttttgtggcccacaccaggatcttcctggcagtttgtgctgatggcactgcctccaggttctcccttcttatccggtctctgcaaagtgcatggaattttcacaggcacgctttaagattcaaagtgacactgaatgactggttccagtcatcaggatgctgtgagctacaaagctgatctgaggatgctttgctttgcacaggtaccagcgtggctgccgatctttggctgcaaatctgcagctcctcactcagggtcagagtgagcagaagccactcatcctgaccgaagatgacgacgaagatgacgacgtcccagagggggtggagcgtgtgataggtgcgtggggtctaagcggcggcctctgctcttgggcaccgtcgggccaattcccctctactccaggaccacacttccttcttccttgctggtgccggcactgtctggccacccgtccccttcgctgagtgcacggtcactgcccgtcctctggctcctgaacccaggcctgtccctgaccatggacagtctcttcctgtgtgccgtagaagccctttttcccaccgcctcgcctccttcctgacctgggctgcctgttctgggcagctgggtgtgtcctcaggaaacagttctcccaggaaattgagttggggtccctggggctcaggtctctggctccttggcccctaaaccctgctcagttccttacctcaggagccatttcaaactcccttaaaccacattacaccttgcaggggtctccatccactgccctgttctcctcctgtggggtctcctgctgcacagagacagagccatcagcggagcccctcatggcggccatcctgggctcctgtccacacactgtcctgccctcctgccgcggttggatgaagtcttccctggacccaggcagggcctcttcatgtcccctccctgtgaggcccccatcctcccagtatctcccagcttcctgatgggcaggcggggccacgctgcctgtgctgtgctgcactctgctcacatccccgccgctccctccagggcaggtttctccccagtcatctgcaccccacctcgaccgtgaccatcagggcgcctgtggcaccgttgccagccccgagccagcatccactccggcccttcccttgacctttgcttctcagagccctccctggttgcgtggtaggcgcccgcatctgtgctgggcggctctgagtcccgggcggggccctgggtctgccccttccccgtgtccgcagcctgccccaggttcattcccgtctcccacccgctgcaggcagtcccccctgcccgcattccagctgctgtgctggctccagactgtctctccaccctcccctgtggtcactcagcgagcttgtccatcagggtcttcccagggctgcttggtgcccacaggcgaaggcttcacccttgctggggcttgcagggccctcaccgtgtgacctgacccctccctgcatcctctaggcttctgtgtggttcttaaaagttcagcctgccgccaaggcctggtccctgggagagacgtcttcgtgcagccgctggctgggggttttctctggaagcttcccagcccactttggtcacccgtgagctgcgggctcttcccctggcctgggtggggcccttgatgttggccttcccctgggggcaggcagctgctccctgtagccggctttaatggggtagatctctttcttaggaacagagaacttgggaacatggctgtatgtgatgatttgagaacggagggaaggaaatgttcttttcctgtcattaaaattaatattgttaatgtaattcccttcggcgtgtgcactgagtagcgtacaggatgggtcaccttacagctgggaaactaggaactttgtgtggactctgtcacgcatcaccttcctcttcctacagagcagctgctggtcgggctgaaggacaaggacacggtcgtgcggtggtctgcagccaaggggtaggtgtctgtggccgcagaagcaccccggggggtgggccggcctctcctgtgcgattcagcagctacaaatacccaacagctttggagtggcagcgcggccccctcctcggccccctccaacttatgtgtgttgctttacgtgttggcgtgaagatggttcccgaggcggagcttcggtctcctccgtcctcctgcctctggctggccctgccgggtcacgagcaggccgggtttacctgtttatcttcaaaatgttcccttgcttttccacatcctcatcactgtgccccccacctatcgttccccacagatgggggtcacggctcctacaatgacggtgctcagggaagagccctcttttgtggggtgagcaggtgccagtccctcattcacccctcactagcacctgtcatacctgtgggagtcgacatgcaccctgcaccccaggcctcagtggaggtcgtggggcagatccagtggggcctggccttgaacacaacaggtggagccctggcctggaggagccggtggccctgtgggctcgggctgtgcagggacagcgatacacgtgaagaagatgctgaagtgtcggggaggcccctgctgtggaggagaggaggcaggtgcaggggccagcaggtgctgaggtgtcagggaggtaccttctgtggaggggatgaggcaggtgcaggggccagcagatgctggggttgggggaggcccctgctgtggagaggatgaggcaggtgcgggggcagtaggtgttgaggtggggggaggcccctgctgtggaggggacgaggcaggtggaggggctgacaggtgctggggggcggggaggcccctgctgtggaggggatgaggcaggtggaggggtggcaggtcctggggggcgggttggcccctgctgtggaggggatgaggcaggtccaagggctggcaggtgctggggggcagagagaaccctgctgtggaggggacaaggcaggtggaggggctggcaggtgctggggggcagagaggcccctgctgtggaggggatgaggcaggtgcaggggccggcaggtgctgaggtgtcagggaggtccctgctgtggaggggacgaggcaggtggaggggctggcaggtgctgaggtgtcagggaggtccctgctgtggaagggatgaagcaggtggaggggctggcaggtgctgaggtatcagggtggtccctgctatggaggggacaaggcaggtggaggggataaggcaggtgcaggggctggcaggtgctgggggatgaggcaggtagaggggccagcaggtgctgggggacggggaggctggtttttgccattgctctcccatgcgtctgtgctgggtccgtccataccatgatctctgggaggagctccacagggctgtgcaggggctcacataggcctttgtgttgctgtacgcaggggatggcttttcagcccagagcctcgtctggttgggtgtgatgggcccacgcagtgagaggctgggcaggccttcccagtgtccttcctggaggcccctggccaggaccttccccacggggccatctccagggacttggaccctgtgagccagcctcaggcggcctccatgtggggccgtgagcccatcacctggcctgatgggtgcctgcacagtcagcgtttggggtggcacagaggaagcccggctccagtagggagggtcagggtgaagccctcagcgttcgcctgctgcctcggtaccctcagccgtcactggtggcctgcagcgtccgcgttacagtggtacatggtgacctaccctgtgccgcgtgtgctcactcgtcccctttgaatctggctgcaggctcctttaccctgcagcgtgttttagcgcgggggctccaagcagggtgcgggcttgcctggagttggcctcttctctcctggtctctggaggaaaggatgggtgttcaggccattcacacgtgtcacgcatgcccttggcgacaggctggtggtgcccctgacggattgctgcgtttctctttcagcatcggtaggatggctggcaggcttcccagagccctggcggatgatgtggtcgggtctgtgctggactgcttcaggtatgtgagaagagcaggggaggcgtgtgggcctgaccctgagttgagaagccctggctttccttatatcctttcacgcttgcttttcattgagctgtttgtcagaactccagaagctcttttttcccccttttgaagttaaacttgagaactcttgttatttctggtatgttgcttttatcaattccattctatttaaaaaccttaaggaaaaagagagtcagtttagacatatacccatgtagatgtttattctgaaaggaaaagctctactgagtgagttggggctgctccgagagctttctgtgggaggttcgggtctacccctcgcctacccattagccacgtgtatcactcagaccttgaagtgaggctggtgtgaccaaggcctgagtttgaattggatttcattttaacgaaatgtgaggctttgggaggccaaagtgggaggacggcttgagcctgtgaattcaagaccagcctgggcaacgaagcgaaaccccatctctacagagagttaaaaaattagccagacgtggtcccagctactcgggaggctgaggtgggaggatcacttgaggccaggagtttgaggcttcatgagccatgatggtgccactgctgcactccagactgggcaacagagtgagacccggtctcagaacaaaactgagtgtagacagccacgtgtgctgtgccgcatttctcttgtcagccttcagggagttctgggtcttgggaccgtgtggcttgtgggtggtaagttgtgggctgggatgtgcgggtggcagggcctgggatttcagcctggggcctgcagtcctgccctggtgtgctcacacgtgtgaggcatcgatctgtgacctccccagggaattctcccttttgcttgtgtaaatgtctctcccagtttcagaagcggagggtcgagagcaggcgtccagcttgctcaggaccccgggcgtgctgttgctcttcattagcctggacaccgtggcgaaagctgtgctgtcagcactttggaggctccagttcgcgttgcctgtcagtcaccagggacagctccggagccgttcacaaagccttgttttccttctggaggagatttcttgtgcacttagcctccagcctgctcagtgacaatttcaggagcacaggaaacaatgtgtcagatacgggtcatgtttttcagagcagtgtgcatgcatgtgtgagaaatattcttccagtggaaacattgctagcagaaaacatgctctttaccacaactgcttgatgggaggcaggggttggagggtgctacgtgcttggcttctctgtaggcgacctccagccttgtttcaggcgtgtccctggagctcctttctggtggtcatggtgggcatatgtcctcctgtcgcctggtgccacctgcggccttcacaacagtgtggtgggctccaggccgggcctgcctgtgcctgtctggactttgcctctctcctccagccgctgggcggcctgctcatcaggcctagtgcgtctcctaaactcactgtgtgtctttccctccacaacgtgcagcctctctggactgtgtgttccttactctagctcaccttcttggtctagtttcatttttcctggctggtttaatcttcaggtgctttttaacctttatttttgttattttaatgtgctcattccatttttgtagctaggttctgggacggggtggcctttttactcttgatttcgcagggccttcatcccaaagtagctgcagggccatcatcccgagtcctcgcaggatgcagctctggtcagtgcctgccttcccttttcctgggtgctcagtgtgtgattgtcaaccgtggcataaaaaggcggctctggacagcgcctgctttccctttcgctgggtgctcagcatgtgattgtcaaccatggcataaaaaggtgcagcctcagagcaggatgtctgaagacaccaggaagccaggagttgctggggtgtggggcggcccacagccctgcatggtggctgctccaatcttgtccttccctgggacgtgtggtaagctgccagcctcttctgaaacgggtccgagaaagggcattaattatattaactgtaagaacacccagcacccaggagggttaacttactccccgctcctttcctgggctgggttatgcagtgagtggaactgcacccatccccagggggttcaggatctgtgtggctgatgtggctgtcccccaagcgtgcacgactccctcaggacctggggccccctcctgactcccatcaccagccctgcagcattaccctggacctaggaagtagcgccagaccccaggctgtggcagaagcagggtgccttggagaggagtgtgtctgtgtctgtgccaaccccattggtttctcccgtgagcaaaccaactgaacctgtgcccgggcccagctgtgggtcctgctgacttgcccgagggcatcttctgagacactcggtgtggagcgtctggaagccacggcactacgctgtgcctccccctcgcccgccgccccgtgtcagcaggagcctcaccacgtgggttcctttctgttgagctttacggtttcatcgaggttttggactgggtgatgtgttcattcaaaagtcaaaccaaagggaagaagacagcctccccagaccccagagcccccccgcaggtgacctggggcacccgtttcgcatccctccggggactgatgcaggtgtgagcagatggatacagaggttttcttgttttgtttttgagatggagtctcgctctgtcgccaggctggagtgcagtggcgcggtcttggctcactgcgatctccgcctcctgggttcaagccattcccctgccgcagcccccaagtagctgggactacaggcgtgcaccaccacgcttggctaattttttgtatttagtagagacggggtttcaccatgttggccagtcgggtctctgtctcctgaccttgtgatcagcccgcctcggcctcccggagtgctgggatgacaggctgagccaccgcgcccggctgttttgtttttagagatggggtcttgctctgttgctcaggcaccatgatagctcactgcggcctctacttcctaagttcaagtgatcctcctgcctcagcctccgagtagctaggactataggtgtgcagcaccacacctggctaattattttatttcatttttgtagagatggggacttgctatgttgcccaggctagtcttgaactcctggcctcaagcagtcctcttgcctcggtttcccaaagtgctgggactatagacctgagccctgtacctggctaaaattgtctctttcattttacacagataatggcttacttgtcacactttaacaccaaacgcatctttgaggtcattttacattagtgctgttccccttgctcttgatgatctgagacccgtgtacctgcgacactctttacccgcctcctctctctctctctctcttcctctcccgctcatccgcccactcatagcttccactattttctgttgtcttccctcctctgagaccccccctgtgcttccaggagtgccttaagcttggatctgagggcgggaactcgccccggctgcttggcttctccctgtgcccctggtgtccatggacagggtcccctgtccggttccactgtgccgtggtggtgctgggcctctgaggcgagccggatggacggacggcatcccctggaccctgccacccttgccaccgtgccacagtgaacacgtgtctgatttagaagtagacattggtctgacaggcatttgttttggtatttttaagtcacggtaaccttggtgttttgtcaagttcattcagatgttaactaaatctttgtgaaaggtgtgaagcatctttctccaatgaaaaccctaaaggacgcaagtgctgatgtgaaaatacgcaaggggctcacggagcctctgggcagacagtacacgtctggaacttgtttaattgtgattgagtctgtcggtgacagtgagctctgaggagcccgctggtggacgctggtgtctgtctcagcccctcctctctgggctgggcacgcaggaggtgaggcagccactgggcggacaggcactctccgattttcctaagtattcttgtccatactgattgccagctagtcatacaatttagtgggttttcctaaacatttatttgctgtcaagtcaatttaattagaatcaggagagcttctgaaccaccccggggaaattagtacgtataaaatattatgacttgatcgatggccattgcaattgttcattaaaagttcatatttcaaatactgtgaaaaatcttgaaatgccaattcattattgtagcatttaattctgagtttgactaaacagtggggtgtcatttaaagaaggtcttcctgctcccttttccactgacgtcttcctgtgctgggattcctgttttaagttcctacttttctgaagtgtcttatttctttctatgggagcgtgggtgttgcccgtacttggagcgacaccactgtggtgggaaaaccccacctgggacggcacagacgggacggtctctttgtttggggactgaccaagacttgtcctcactctcgggagatctgaagaggccctggggtaggcacggctgttgtcttcatactcagttgcagtgtgttatttcttcagccaactgattatttgtttttttattttgagacggagtcttgctctgtcacccaggctagagtgcagtggcgcgatctcagctcactgcaacctccgcctccctggttcaagcgattctcctgcctcagcctcttgagtagctgggattataggcgtgagccgctgtgcccagccttgatactttaaaaacttaggaatgggttttagtgagccttacgtgagccttacaggcagaggatatggacctgccaggctgtgctccttgccatgctgtgggctttgaaccaaaagctgacacgtgggctgtggtctcaggatctttgttgctctcagtttccaggagactgacaaggcgtggcatgggggatgtctggcgctggcagagctgggcaggagaggcctgttgctgccgtctcgactcgtggatggtgagtagctgaggcacggtcaggggggatgtctggcgctggcggagctgggcaggagaggcctgttgctgccatctcgactcgtggatggtgagtagctgaagcacggtcagctgcgtcaccaggctgtccgtggcaggctgcagcccttcgtctgaacccatctccgcggtgtggccctgccgcgggcacgcccagaagagcttgagaacaaggtctgtctacctttttctcgcattggcctttgtaatttcctaattgcctcttttgtctgctgtggaattttaatgccacagattaccctgtgtagctggttttggagggccacgaatccttgtaatgtctgattttcttactccccaaaaccggttttcattcttgagggacattgtcgccccttaaggacacatgcagtggcacctgcttcagttgtagaaccaggtacccctggcagcatcctgggtcacctggagtgacgtggtgctccctggagatgaggctcacgccagcgtgaaaccagggtgggaactggggtggagggccaggggagctctgcagtggccagcagtggggtggggacagagggcacagcatggcagatgcaggggcactgccccagaccagctcttgtgccgtggccacacgcagccctgtctgtgtttggtggggagagtccctgggtgtggctggcagtgccctctgagggcaggaaggaaaggatgtctgtacaggatagagtgggggcccatcctgagagggcctcaccacagagacttgattctgtccaaaataaagacacctgagatgtggtggcctcacgtcttcccagtgtggagctgtggtggcgtctgaagtgaccgctttgcacttggcattttgatgtatggggagagcttttagagcctgcagttcttttttttaatgtctctgcttatttttttccagacttctttaatgtttagacctctttattgcgatctaatttacatgccataaaatgcactcatttaagtgtacggttaagtggtttttatatatttacagagttgcgcaactattgccataatttaatttccgaacattttcattgcctccaaaggaaccctgtgtttaagaactcactctttactctccccagcacccccgccctggcagccatgtctccagtgtctctgtgaatttgtcttttatagacatttcctaacagtggaacctacgacatgtgatctttggcgtccgaattcttcggctgagtttctctgtgtcgtagcctgtggagtgcctccttccttcctgtggcagagccttgtcctgctgtgtaaatgcaccacacgccacgttttgtccatccttttcatcagctgatgtacatctgggttgtttccacctttcactgttaggttaatgctgccatgaacatcgtgtacacgtttttgagtggatgttgggtgtaggcctagtagaaatgctgggtcatacggtaactccacgtttaactttctaagaacctgccaaactttttccaaaatgattgcaccatttcaagttcctgcctgtagtgtgtgagggttctgcttctctgatcctcaccaacacttgcttttatctttttttttttggacgcggtttcactttgttgcccaggctggagtgtggtgatgcaatctctgctcactgtaatctctgcctcccaggaccaggcgatcctctcacctcagcctcctgagtagctgggaccaccggtgcccaccaccatgccacattaatttttttttttagttttgttagagacagggcttcaccacattgcccaggctggtcttgaagtcctcagctgaagcagtccacccgccttggcctcccagagtgtggggaatacaggcgtgagccaccacacttgccccctgcttctttaaaaaaaaaaaaaaaaaaaaaagccgtcctagtgagtgtgaagcgccaccttgttttgcttttcatctgcttttccccagtgactgatgacactgagcattttctgtgtttgcccgtttgtatgtcttctttggagaaatgtcttttcaagttctttactcatttaaaaaaatatttttttaattgttgttgtaagtaagagtttttttatgtattctggatataagtctcttattggatatatgatttgcaaatgttttattgcgttccatggttgccttttcactttctattgattgattgacagagtcttgctccgttgcccaggctagagtgcagtggccccatcacagctcgttgccaccttgatctcctgggctcaagccatattcccaccttagcttcccaagtagttgggactacaggggtgcaccaccatgcctggcaacttttttttctttttttgagacaggatctcattcccatcgcccaggccggagtgcagtggcgtgatctcagctcactgcagcctccacctctcaggctcaggcggtctgcctacctcagtcccctaagtagctggggctacaggtatgtgccaccatgcccagctaatttttgtattttttatagagatggggttttcccatgttgtccgggctggtctcgaactcctgagctcaagcgatccccccgcttcagcctcccaaagtgctaggattataggcgtgagctactgcacctggccttcatgcctggctaattaaaaaagttttttgtagagatgggggtctcactatgtggcccaggctcgtcttgaacttctggcctccagtgatcctcctgcctcagcctcccaaagtgctgggattgtaggctgtacctggtgtgttttcaatttctttgatggtgatatttgacccaggttttaaattttaattaagtccagctcatcagtctttttctttcttgtgtttctggtgtcatagctaagaaatcattgctgaccccagaaccatgaagttgtggtttcatttaacgttttgttccatccgaagtaagtgactcgtaatgtttatttgtgacactagatgtgtgtgagggtgtgtgtgtgaatgtgtagctgggatggaatgaagtccctgcctgtggggagccagctccaggttcactcaaaggagacaagagactctactggcttgtgtgtgtgctctgtcatgtcttatggcaacatgcactgaccccaggcagctggggcgagaggatatgggtgttggcatcataaacgaaaagggtaaagctatggttcagaaactgacacgtgatgtggaatacactggcccatgaccttcgcatggttggttggccccttctgcctggcggtgccctccatgtgagctgaaccctctttgcagcccccattctgttcctggtgggacatggagaagctgtgctgtctctgcacagggcaagggttctttcaggcaggggtgaaagagatcccatcttggggctgactcaggaggtgacagggctgacatttgatgagcatttgcagcatgctttttatgtttttgttttagacctcacaccattcctctgagagccgtcttgtttatataaagctatagttgggagccacgtgtggtggcggtgcctttaatcctagcctcttgggaggccaaggcaggaggatcacttgagcctaggaatttgataccagcctggacatcatagtgagacaccctctctgaacaaacaaacacacacacacaaacactgcagctgtgggagccaggaagtctttctggtgtcacagctcatgctcagcccttcggcctcctccatgtcacacggctgagctgtccctgcacctccttgtctccttggagagttactgtggttctctgtcagtttggtttgaaaagtgaaaacaggctgggcacggcggctcatgcctataatcccagcactttgggaggccaaggcggggggatcacctgaggccaggagttcgagaccagcctggccaacatggtgaaaccccgtctctgctaaaaatacaaggatgtggtggtgcatgtctgtaatcccagctactcgggaggctgaggcagaagaatcgcgtgaacccaggaggcagaggttgcagtgaaccgagatcgcaccactgcactccagcctgggtgacagagcaagatcctgtctcaaaaaaaagaaaaaaaagcgcgaaaacaaatgcttggcaaataaatgtcgtagaaagacacaatatagatgagcatgtttgatgactaaagcttttgtttgtcttagaggaaatgtggagcttcattggtgcatgctaaaggaggaagaagtaaaactagggaagtcaggtgggcaggcagtgatgcgatgtttgcctggaaggcaccctgggtctttctgcccttagtcctctgaatagggggactctgcctgctggactcaggaaaaaagcatcgcattttctttgggttactttttagggaatcctgctgattcctctccacacatacagtgcacacacacacagaatctccatctgttgtgctgtaagcctatttcttggtctctgactctgtgcacaccaccacgcccagctaattttttaaagaaattcgaaagtagcctgcgcaacaaaatgagatcctgtttctacaaaaattgttttaaaaaggtagttgggtgcagtcccagctactcaggaggttgaggtgggagaattgcttgagtccaggaggttgaggctgcagtgagccatgatcgcagtgctgcactcacgcgatcctcctgcctcggcctgtggacagtgggccatgttctttttctctttgcatcatcacctctgtttgaggactactgttaaagggctacttggtctttattttaggtgattcaaattccaggacttttcttgagtggtcctggcgtaggtcctttcaccttttttgtggctcctctttgaacacctctgttgttgtggcaggaggaggtgggcactcctcaccatgagtaagctcctacaatgtttgtgaacccttacggtttcctttgttggatacaagaagcacaggtggggggatgtattggtttaagtttaccttttttttttttttctttttttgagacagagtcttgctctgttgcccaggctggagtgcagtggcgccctcttggctcactgccagctccatctcccaggttcaagtgattctcatgactcagcctcccgagtagctgggagtcaggcgcccgccaccatgcccagccaatttttttatttttagtagagaccagatttctccatgttggccaggctggtctcgaactcctgacctcaagtgatctgcctgccttggcttcccaaagtgctgggattacaggcgtgaggcactgcgcccagccaactgtactattttgataaaatgtatacatgtgctccttattatgcattttgtggttttcatcagtattttgctttttgaaaaatgtcaagtgttctgatctctttggacattttgtatgaaccctatttcccttgctatccttattgattgagaattgtgcatattgatttgggtaataataactagcacttggtgtttttctgagcttggatgtgtagattcatgtctttcatcaaactcgggtagttttcagtcattgtttcttcaggtatttttgctgcccctctcctctccttgtgggactcttgttatgttaatacacatgttggtactcttggtggtaccctatgagtctcttaggttttgcactcatttcagctcttgagtcttcttgttatgttaatacacatgttggtacgcttgatggtgccctatgagtttcttaggttctgccctcatttcagctcttgagtcctcttgttatgttaatacacatgttggtaagcttgatggtgccctatgagtctcttaggttctgtgctcatttcagctgttgagtcctcttgttgtgttaatatacatgttggtaagcttgatggtgccctatgagtctcttaggttctgcactcatttcagctgttgagtcctcagttccagaatttctctttagtttctcttttaataatttctttttgagacagggtcttgctctgtcgcccaggctggagtgcagtggtggtatcacggcttactgcagcctcaacctcccaggcccaagcagctctcccgcctcagcctcctgagtagctgagaccacaggcctgctgcactggaaaaaaaaattgtagaaacaggatctcactttattgtccagactgctttcaaattcttggactcaagtgatcttcctgccttggcctgccttgggattataggagtgagctgctgtgcccagcctgtttttataatttctgtctctttatcaacattccatgttagtttaaatgttgttcttttggtctcctttagttctttgtccacagttttcttgagatctgtgagcatatttttgtctaagactgagcacagtggctcacacttgcttcccagcacttaacctttgctttaaagcctaaaaaggaagaaatctttgcatatgtgtttcccaaataacagatttgagggctgtgttggtgacataggtctgtttatacccactgtgtggctaaagcaggtctctgttaaattagcatctacaaagcttttctcctgccttccctcaaacttaggaagctccctatgcaatcttcaggctggggtccttcactgccccctctcaaggaggcctaccccttcccccagaaggtgcagtctgtcaccccatgtcttataaagtgtaatggtctggtgtcccaaagccacagagaagcccattctaaccttcctgcaactttctgaaggttggagagcatgtttgttttactgctaggaggctcaaggtccctgtgaacctgcatcaggtagtaagccctgcatgtcggaaatacagactgcctaactcttatctaaggtgatgttttgagaaaatttttaaatgtataatacattttataaatttcgaaaaaattttaataaacattaaatttttataagtttatataaatgttataaattttgaaaaatgtacagagttgcattggagcacacgctctcagtgttcatcgaagacgtacaagcagcgtcttacgacgatgttgctgcagctgccttggggtcttgttaaaagcaccattcagtagattaattcccacctgtggactgtgttttctggcttccaaaagaaactgtcatgtttttctctctggatgacgaaaactctgcacgtacttcctatgacaagtgcgattggcgcccactgctcttggcagttgaggtgaggacacagcgtttctgtgacggtgaaggggacagggtttggagggagattcagacattaaacaaggaaacgaagggagcaatttcagagaatggataaagtcgttaagaaaatacaaaagggcggtgagatcctcagtgatggggccaaccagtgacttgaataagacttggggaagacctcctggggcgacatttacgctgagagcttctaccgtgaaggagccgagcaggatggactcctgaccgcagcatctcaaagaggaacgaaggctcgcacgagctgggacagcggaaagagcagaagagtgggcacagaaaagcgcctgggggccagatcctagaggggcttcaggaacacagtgaggggtttggaaattattcaacataaagtcagatactggggaatacacgggggtgcagtggaaaggaagagcgagggagagtgaggccattcgggagccaccacagtgttcggagtgagaccagagctgtgaagaaagagaaaaggaaatacgctgcatgtaggattctgaactcaacgactttgctgttctattcagtgaaagagagtgagatagtaaggtcagtgagtgacatgttggagccttccacatagtaatggtctacaaagttatggattgatgagttcacacaggagggagtgagagatgaggaaggtgaatgggtggaaaagcttgaaccgggttcccaggctcactggcatggggaggtggagaaaaggggaggaagcagccgacatggaaacccgcagaggctccttcagaagggatattttataggagaggagtccgattctgagagggggaaggggtggaggaccagagtttcctcacaggctctggagcactgaggtggatggtaaattccaggagagcagctccagctgaggtctagggacagggcattccctccctggtagagccgttggggctcagtgccgaggctggctcaggctcttgtggggggccctgctgtctgtccagccctggctgtggcctggcctgaccctgctgccccctgcaggcctgtgtacctcagttcccaggtgatcaaggggccctgggagaggttgggtctgagcacgtcctgacatggccccagtgtccagttccccgcctgtttttgttggcttgtttaatcttggtaggcttttaagctttcaggttttcaggaaaatgcaaagcatgagacatctttgactttgtacgtggaccgattgttctttttttgtgttaatggtgtttttttccttgtgtgaacgtgtgtgtttcgtgttgcactccgccctgctctccctccctccctccctgtagaacgtggcattttggctgaacgttaacactggtgggggcagacggcagtgggcccccgttaagactgtttagaaagggcgttgtcggcatcttctcttacatgtgaattcaaggatcctttattttttttcagctttattgatatgtaattcgtctaccatataattcacccatttaaaatatatagttccatggtttttagaatattctattattacttagaaaattgtggcaaaatatgtataacaaatttgctctttttattattaagcatgttaatccagtggcattaattacactctcacttttgtacaaccatcaccattatctggttccaaaacttctcatcaccccagattaagaagtcactcgcccctgatgctccttcccttcaaccctttgtaactctagtctactttctgcttgaaaaaggactttgcctgttttagagatcttgtacaagtggaattggacaatatttggcctttcatgtctggcttattttatttagcatcatgttttcaaggttaatctgtgttgtagcatgtatcagaattttctttcttttaaaggctgaataatatttcattgtatggacataccatatatttatttattttatttttacttttatttttatttttttttgagacagagtcttgctctatcacccaggctggagtgcagtggtgcgatctcggctcactgcaagctccgcctcccaggttcacgccattctcctgcctcagcctcctgagtagctgggactacaggcgcccgccaccatgcccggctaattcgttttgtatttttagtagagatggagttttatcatgttagccaggatggtctcgatctcctgacctcatgatccacccaccttggcctctcaaagtgctgggattacaggtgtgagccaccgcgcccgacccatatatttattttttaaagataggatctcactgtattgtccaggctggagtgcagtggctattcacaggcccaatcatagtacaccacagcttccaactcctgggcttgagcgactctcccacctcagcctcctgagtggctgtgattgcaggtgtgcaccaccgcccctggccatattttcttgatccattcatttgtcagtggacgcttgggttattcccaccttttgggtattgtgaataatgctgctgtggacatggatacaagaacctgtttgacacccctttttttagttcctttgggtatataccctgaagtggaattagtgggtcatgtggtaattctatgttcagctttttgagagcttatcactttttgtatgtaaaaattacgagtgtttagttcttaagtcggatcatgcataaatgcagaaacgtagttaaaaaataagtctcttttttttttctttttgctataaagctctaggaatcgattttgcttttagagatagacacaaagggcttatcctggttgcaatgggtgagctattgcagatgacctttggaggaattgtgtcggagtgtagaattttcacagtgtagctcgccatgcatcaggcacatgtagcctgtgccacaaccattgtgcttgggcggggttctccatgctgccctgttgcaggaggatgctctgcccctgcttctccctatttgtcatttaagatgattcctggtgctttttggtgagcgatcaaatggtgttctcagaatctttgggcccttgacaacggagggctgtattcttgggggtgtgatgtgagagctccttgtctgcagggtgtgaggctttgggtcctgagtgtggaccgtggcatgtgatgtcttgtcacggctccctgcacggctgtttagtttctgaaagctggaagtataatatttttgttctttgccaaaacatactggtgtatataaacagaagtgcccaggtgagcgactcagcactgcgcctgtgtttatggttctgcgtctgaccgtgtgccttttaggctggtgtagtggttgtctgaggtgggtgcctgacagggctgggggacctgctggtgtccttgctgctgctttagggacagcttgaagcagtgtcctcagataccccttggaattgtgacaaactctgtatccctcttacaagttttatagaactctaaccagttgcaaataactatttgccatcctgagtattgtcattttaaaataaaactattgcgtcactcatctgaataaatctgggaaattgaggtagaataatctaccattcttcgttaaaaaatttacagggctgggcgccatgtctcacatctgtactcccagcactttgggaggctgaggtgggaggatcacttgagccccgggaggttgaggctgcagtgagctgtgatcgcgccactgcactccggcctgggccagtgagcgagaccctgtctaaaaaacaatttcataggcaagtttttctctcacagaaattttattcttcctttttcttcttaagcccatatttccatttacttttttcccagagcattttaccctaatgtaatgtatttctgtgcctaagaatctttattgatctatcatttatctgcaacgaaagaaaataacataaacataaacttcaacttttgcattttgtatggccataagatgctagttatttatttattttttccacaggtgttcatgaccttttttttttattatttttttaactatacttttaagttttaaggtgctagttacttagaagtttttttagattgggttttaaaaaattatgagtacagagttgaccaaaacaacataaaatagcatattattgaaatttagctcttaataagatagctgtttagtttgagttatcttttgatgagtcaggctttttttgtttttattttttgaaatgattcttgctctgtcacccaggctggagtgaagtggtatgatcttggctcactgcagccttgacctcctgggctcaagcaatcctcctgcctcagcctctcaagttggtgggactacaggcaaacatcccattgctcagctaatttttgtattttttgtagggatggggtctccctgtgttgcccagactggtcttgaactccttggctcaagcagtcctctcacctcagcctcccaaagtgctgggattatgggtgtgtgccaccatgcctggccgtgagccatgcttttaaccagaataaggcaaggttctgcaacagtacaatttttgctttttatttatgtattttttttgagaaaaggtctcactctgtcacccaggctggagtgcagtagtgtgatcatggctcactacaacctctgcctcccaggctcaggccatcctcccgcctcagcctcccaagtagctgggaccgcaggtatgtgccaccacacctggctgactatttttattagagacggtgtttttccatgttgcccaggctggtctcaaactcctgacctcaagcaatccatccgctttggcctctcaatgtgctgggatgacaggtgtgagccactacgcccggcccctatttttactttcagttttaagtgctaagaagtcttattcattcaagtcttattcaagtagctaggaatggcagaaattttgctttagcaatgctggtgtttcaactttttccaagctcacgcctgacctctgtgctctgtcactgagcagcttcagtagggtggcctcagtcctgtgaagtgatgcgttgacagccacctgcatggggaagcatttcccagtctctggagcagttcccatcgtagtgtccactgcatggtttccagtgtgttgggtgagaggctgcctttcttgaaaagtgagagaaagggctgttgtgagaggggacatggggatggagaaaccctttctcaagcagagccttaggggctgaggctccggaagtctacgctcctaaagcactctgaagcctgaggaccccatggatggccattgagtagccccaggggtgcttcgcacatgccggtacttgaccactgctttaaacccatgtgcacacatgcacgctcacacacatgcacgatgcagaagtgcatacacacgtgtacatgtgcacactgacacatgcacgttgacacgtgtacacccaatcgaatgtgcacaactacccccacagatagcacacacccacacaatcgaatgtgcatacacccacagatacacacacgtgcacacccgtacaatcgaatgcacacatccgcagatatgtacacgtggacacccacacgattgaatgtgcccccccacagatatgcacctttgcacacccacacaattgaatgcacacacacccccccacaggcacacgtgcacacccacacaatctaatgcacacacacccccatagatatgagcacgtggacacccacacgattgaatgtgcatacactcacagatacgcacacatgcacacccaatcgaacgcacacacacctgcagatatgtacacgtggacacgcacgattcaatatgcatacacccacagatacgcacatgtgcacatccacacaatcgaatgcacacccccccgcagatatgcacacgtgcacacccacacagttgaatgtgcatacacccacagacacacatgcacacccgtacaatcgaatgcacacacccgcagatatgcacacgtggacacccacacgattgaatgcgccccccacagatatgcacatgtgcacacccacacaattgaatgcacacacacccccccacaggcacacgtgcacacccacacaatctaatgcacacacacacccatagatatgcgcacgtggacacccacacgattgaatgtgcactcacagatacatgcacacccaatcgaatgcacacacacccgcagatatgtacacgtggacacgcacacgattgaatatgcatacacccacagatacacacacgtgcacatccacacaatcgaatgcaccccccccgcagatatgcacacgtgcacaccggcacaatggaatgtgccccccccgattgcacacgtgcacacccacacaattgaatgcacacacacccgcaggtacgcacacatgcacacccacacaatcgaatgcgcacacacctgcagatatgtacacatgcacacccacagaatcgagtgtgcacacacccatacataatgcgcatgcactcacatgattgaatgtgcacacacccagagatgcacacacacacatctaatcagatgtgcacccccacacagatatgcacatgtgcacacccacaggatcgaatgtgcacgcctaatcagatgtgtacacccctcccacatatgtacacatgcacactaacacaaatgtgtacacacccgcaggtatgtacacatgcacacctacacagtcgagtgtgcatgccccccacggatatgcacacgtgcatacccacacaatcccatatacccacccccacaatcacgtgtacacacccccgcagatatgcacacacgcacacccacaggatcgaatgcgcacacacccacagatagcacacacgcacacccacacaattgaatgcgcaccccccacagatatgcacacgtgcacacccacacaatagaatgtgcacacacccgcagagatgcacaagcgcatacccacacccgcagacgtgcacatgcacacatccacacgatcaaatgtgcacgtgcatctgcagacatgcacaagcagacacctacacgcactcgcagacatgcacacccacatgggcgaatgtgcacaccccccccacacagatagcacacgtgtacacccacacaattgaatgtgcatacacgcacccgttcacaggttaatcgctgccacagctatcagctctttttcattgactgttacggcaaaatattctaaaggataacatagatttatgtttatttgcattttatgtttccttatggttcatatgagtttattggaaaattagcaacatacacatcattttggggaatggaaagtgaggcagagtaagccagaacattcactgtaacattataagcaagtagaataaattgataataccttcaccagtaatgcactttccctagtggaaataaattatttgtataaatagcctcttgatgtttgtgtgttatttagttatacaaatcacatttttcttttttacatatggcactttaatgttagtactgaaaatgttttttctgacattttttcagtaattgtcatttacatcaaatatgcagctagagctaatagaaaaacagttaaaacaatttgttgtaatggtgagatatttataaggaaacatttataaaagatcttctgtaagacagcttagacttgaaaatacatatcagtcttagagtcattcaggtgtttttacaaccaaaagtagaagcaccttttaatattcatgcttaatatttataaaaactgaattggagggttttttgtttgtttgtttgtttgtttttttgagaagcagcagctgcatttgtaaaaatgtgaaagtgccagttcagaggtgttgtagcttgccaccttggaaggcgtgtgtgtggccgtagctctgtgaacacacgtgtgaacccggcgttaggacacccgggccctccttcgtagtgtgaacactctggccgtgtcctgcagcttcgccttcttagctccttgctgggattttccagcatcccttagacttgtcctcttttgtcctttgggtctgaggtcacactgggcctcttggctctccatggagctcagtgtgggtgtgtcttgccggcaggcaggttccggggccgcagcatccccatcgcccacccggatgttcctggggctgtaggccgccagctggcacagggccacggctgccgtctgcttctgctcctcgctgctgtccaccgcgcatgcgtctggagcctcctcgccggggcctgtgggtggggccccgtcaccgtcgaggctgcctggcttggtctcagggtggctgggcccatcctcagaaccttctgtcccagtcttctgtggaacagcagcagcaggttctgcagctcgtggtcgaccggggaaggcaggcctcggagcctgggtgttacaggggtccttcaccgagagattgagtggaaggtcctgcagctctgagaagctggcggtttccgcctgggggctgccttggtacgtgggttcgtgggtggctgccaggtttatctctgatttcttggagaggttgagggggcccatcccggagctgtcgtccggactggaaggcgcggcctccgagacgagagaggcgcttccggtcggagcaggagggtctccgttcacaacattgaggctagaagaagccaagaaaaagcttagtaggagcttgcttagaaaagcaactgcgtgaagcagtgtgagcaagtataagcctggctcatggaacccaaccagaaacattcccttggaggttttgaaaatgacattttcttaccttactggagactctgctgtggtctcagcagcctgggcaggtaggcattctgtgcttttcttaacaggcctgaaggctgtgaggctttgctctggcgggtagagtcttcccagtgcgctggaggctgccttgttggagaggtcgtacaggccttcgcaggtctggctcgtctgcatgaagtcggtggggctcggcctccctggggagcccgtggctgcactccctgcgcgggggctcattttggacccttccgtgtctctctgcccagccttggaggagtctttagcctcaggaattggactttcgaactcgacgtgttttctgttggggtccgaagggtttaacctggaaggactcgaggctggatagaccagggtggcttcttcaagcaggtgagagctctgatctcgggtgaggccagtgacaggtgggagtctgagaccataggaggaaaatgcagactctggcctgtaaaatccgtaaggaatcggcaggttagagggatattgctggaaaaacctgtagtgatcgtatgtggctggagatggagccaggtgcttagggatcggccccgggtgaggcaggaagtgtctcgggtcttgggttccgtagactgacagcaggggtgcgtcacactcaggcgagctcccagccagcaggtaaggcgagtagatggtggccagcccgtgctctgtgtaaaagtgaggcgggtactctgggattgtggggtgcatgtaaggggaaatggccccaagcccctttgtagatgagattttatgtggaaactctggtggaaggaaaggtgagccggctttccaggggtagccaggagtgtggaaggccgacttggtgtggaaagacacggccttggcagtggggttgtgtaaagccagtgtctcgggcgcctcggcgttgtctggccccttgagtctgtgctcgccgactggaacaaatgcagaaggccgagctgcgccttccagagcaggctgggcaccgagggcggcttccggagctgggctcttgcagggtgatgccctgtggagggctggcttctgtcccaggcacctgtgggttccccgggcttgcagctccaggttttccttgatgtcttccctggcagagctgtgctgaagcttcgagtcgaaggcagagagtccatttgcgacagacttggaagaggctggcttcgccgtggcatcgggctggttggtttgcttggggtctagtgagttagatttagggcacttgggaactcgatcctgctctgatactaaagtaatcgagtttttacaaagaccatacttcatgtgattaaaaagatgtgacttctcattgcaagtaaagggacattggaaacatttatacttgaagggctttcctggaggcctggggatgtaatgtggcttttttggcttccgctctttgaggagactcattttcctccttatgccttggactctggctgtccaggtggcgtgatcactgtcgacgccgcgtgcacttcgtggtttctaaagaggcacctcccgctttgctttctttcccgatcacttctatcagaagccagctctgcgtgctgagggtctggcgagagcctccgtcatctggcggctgggagctgtaataaagagcagtcttggtgtcaggacagcgagtgaggggtcggcgagaagccggcctcggctcgccacagtgccacaggatccctgaagcagaacccctgaagggctgaaactgcctgctcctgaggggagcagctgccggtcacagaagcagccctgccctacccttggtaacctggctgctgactccccaccgtgttttctgttttctgagtctgatctgaaagagtcacctcggggcctagaggtggagtgtggtgtgtggtgcgttgagtgtctgttctgagaatgcctgtaagcctttgagttttgggaactttcatcctgtgacctggacctttcctcgaaagcgccctgccgggggctgaggacaccgagccccctcccagggtctggacagagtcctgtcccagggctgcccgactctgcttgggggttacacgcttgaagcagtgggtgtgtgatcggccacactctcacgtgaaatacgaaggggtttgtggctgtttccccttaacatgtacccacagtcacagagtgcccctcacttttacacagagcgtgggctggccaccgtctacttgctcctacctgctggctgggagctctcccaagtgctgtgcgcccctgccgtcggcctgtagaacccaagaccatggatgctgctgcctcccctggggccgatccctaagcactcgtggcagtttctgcccactttagccacgtcgttggtgtattctagtgtgcttgtttaaaaatgaagaacattcgaacacaagactctaccctactgcttctaaagtcagctttatcattaagtagcatttatgttgtctcagatatgaatacaaatgctatatttatgttgacttaaatggttgaaatactgttggtgaatttgtacatcctgtgagtgacagcagcattgtgagacatgctttcacggtcacccggttcctgctggccaggaggcatggccagcagcgcctgcccgtccagatgcaccaccaaatggaagaaccaaagctttgccacactcctgcccgagaggagaccagagtgagtagtatccgctttagagatggttgggtcatgggaggaagctgtcctggcccttaacctttagggagtgggttcagccctctggccacacccactcaggtcctgggacccaccagaggctgtgtgtgtgatgtcagagctggcctgctcttttggattcttccagagggtctctgtgtcccccttaccagcctcaggtttccttcagaggctgtgccgcacgcccaaggctgagaacaaaggctgtttttctttttttgagacagagtttctcccttgttgcccagtctggagtgccatggcgcaatctcagctcactgcaacctccgcctcctgggttcaagcgattctcctgcctcagcctcccgagtagctggaattacaggcgcccaccaccatgcccagctaattttttttgtatttttagtagagacggggttttgccatgtgggccaggctggtctcgagctcctgacctcaggtgatccacctgccttagcctcccaaagtgctgggattagaggcgtgagccaccgcacccgtcccagaacaaaggctttgagagtctgggactgtccacctggcagctgggcctggagcgactcaagcagcaactgtgcctgggagacagggtgagtgggagatggggtggaggtgcaatggatcaaggctaagcactttaattcgtattaaaaatgtaaaaaagaaaaggtctttagggtctaaatattttcaaacagcttaaaaataaagttaaatgacccaaatgcctatcagtgatagactgaataaagaaaatgcggcacatatacaccatggaatactgtgcagccataaaaaggaacgcgatcatgtccttcgcagggagaaatggatggagctggaagccagcatcctcagcaaactaacgcaggaagagaaaaccaaacgtgcatggtctcacccataagtgggagctgaacagtgaaaacacatggacacagggaggggaacatcacacaccagggcctgtttaggggtgggggtcggggggagggagagcattaagacaaatagctaatgcatgcagggcttaaaacctagatgatcggttgatgggtacagtaaaccaccatggcacacatttacctgtgtaacctacacgttctgcacttgtgtcctggaacttaaagtataataaaaaaaaaatacattaaagtaaagttaaatggagggctgggggccgtggctcatgcctgtaatcccagcactttgggaggccgaggtgggaggatcccttgagcccaggagattgaggctgcagggagctgtcatcccaccaccgcactgcagcctggtgggcaacagaatgagaccctgcctcaaaaaaaagctaaatggaaatgacttaagaaaactgtttcaactgcagtattttttttaaggaatgggcagatgtgcccattcttgagtctgtgaggttttatgtgtagacatcagggtggctaaaagtcaagtgaaaagccgccccttgaaaatagagcaacgtgtgtgggagcctaggaggcagctgtccctgaagcaaggcgccacccctcctccctgcacccgtgtccttcctcccacacgccaggggccaggggtggtggctgggctttcatatggctgccccgaactctggggaagtgctctgattttgttctcagcaaactggtttctctactgatttattcatatttctttctttctttcttttttgagacggagttttggtcttgttgcccaggctggagggcagtggtgcgatctcggttcactgcaacctctgcctcctgggttcaagagattctcctgcctcagcctccctagtagctgggattacaggtgcctaccaccacgcccagctaatttttttgtaattttagtagagatggggtttcactatgttggcccggctggtcttgaactcctgacctcaggcgatctgcccgcctcagcctcccaaagtgctgggattacaggcatgagccaccgtgcctggctcatttatttataattcttaaaaacacaaccacccttccccctacaaactgcctctattaacatactttaagttctttaagacatttatttactaagaagtggtttgggtagaaaaggggctctgctgacctgccaccttcgctgtgatgagtttctgtgtagcagggacagcgaggcacggtttggatgaggacaagatgtttgttaccctacaaccagggagggtgtcgggtgacaccctgggctcagaccccgcgctcagcacccgtctcccaccgtgggctgccacagaagctacaaggcaccgggtcaaggccaagcaaatgaaacacgtaatgatagctctgtctttctaatttccccctattagaagaaagaacgtgaaataattctttatgggctcagtccctaccgtgtggggcagacctgctctgggtgatgaaagcagtttccctgcctcccttcaggaagtagagaagccgggtgcctggttccagccaaacgctgggccagccagctcagtcagtggggcctgtgccggcatgcctcgccgcgctccctggttctgaaggcgtgagaacctctgcaagtcaggttcccatgattgtataggatgtgttacggcagggatctgaaagctgatgatttcatcactagctggaagcatcaggatcgaaacgatgacagttgcaaaatgttcatcaagtgagagctgcgtcctcgcgagaccgaaacgccgcctctagcacctgaaacacaagccctcagaggagcagatgattccctcaggatttaagaaaattgaggacttcagttttcgaagccgcattatttcacattgctgatacctctagcgcctgaaacacaagcgctcagaggagcaaatgattccctcaggatttaagaaaatgaggacttcagttttcgaagcagcattatttcacattgctgatacttttaggcaaaaaaaaaaacaaaacaaaacaaaaccaaaaaacaaaaaaacaaaaaaacccacaaaacccgtgttggttagattttctcaaaagctttacaacaggcaggttacgtgtaagctctgctgttgcccaaaatagtaattagggaaataattgcttttaaatgaatatgtctgttttctagtcagatttgcccttttgttctttgatcagttagttcacgtaagcgggtgtggcagggaggaagcccctggtggtgagagtgtttggagctcaattgctcgaagggaattggtgtcgatatggagtctcgggcagtggttttagtaaccttggataaaccgacctctcaggcttgcacaatttgctaattaaaacagggagcacagctgcttcagttgtaagccgggcgtaggtcacctgatctgtaaaactacaatagtgtcagagaagtaagtgggataacattgttgctttggtaagctttcaaatgatgatgatgtcagcctgtgagttctgtgtcctgcttaagtgaggtttataaggatgaagaaaccaaacccgacggccagtacctcaggctgtcacagctgtctgtgggcacagcgtttgaaatagtctctgtgtggtcagtttctaccagcccgactttgtactctggcagctgctggtgttaaatattcccaaaagagtatgttgttgcccaaacagtgtaacccagaaatctagctgtttacagtaatttggatttgtatttagaggtgcagtttttctctagaggggataaagaagtgcggagcgtctttctctcctgggggaggtgtgtttccattttagttaataacatgcccggagagctgtctgtctgtctgttaataaagcagagtctcattcattatctgctttcatttgagaactgcagtgctagcgtgttttacagtgaagacctcggtgtgatcctgaaggagggtttcatcctcctctcatttcccactggatcggcaggaagcgttagcagggtggacatgccacagagcttccagatctggatcaaaggtggctgttgctgaaatacttatgcagagtcttccctgactgctgctggctaatgtgtgccctcttctccaacacacctcctccgagcctggcctggcacaaagccttctttctccaagttatttcagatcaagcagccaatgtagacagtgtctacactaaagggcgtaagaacagtggggtgcagtggcttcaaacatgctcaggatccagctgagctttcaccaggcttttcttgccatatttacagatgccactctgtgcctttctaaatattttaaatgttgtgtgctcagccgatgcacttggcttctggaaagtgcgctgagctgagagctcgcttctcttcctgctcaacgtgcactgggccgggtgttggggcgtagctgcccacacagacagtgctttgaagagtgagtggtttcggttggccatggggttgtgtctaaattgccaatatactgtctttccaaaggttcctaagtgtggacagttaatgcagcagacagttgttagggtaatagtgagaagttgggatgcttaacaagcttctaaggagtttgaactttgaaaaatagacaagagaaagagttcttaaaaaaaaaaactttgataggacacagcggaagtaattacagtttaactttatgggacgtttctgtgacaggctgggtaactatgcttgtcatgcgtcctaacctgtgccctgagattgtgctgtaatgttccttttggtggtgtccagctgtctggcaaggagcctgctcggctggagcattgtgaagggcatgctgtaattacaatattgtgatgtggcgttgttgcataactcaaggacacaccattgtcgcctacccactgtgatgtcgcaagaacgagatttgtgagttttactccaattgagcttttccagtgattgactgccactccctcccagcctttcggttctttaaaatgaaagataaacctcaggacaaccaagacctggggaaaagacagtctttgggaatgtaatttggaagaatggatccagaaaaacaaccaggggctcttaactctagtttcggcaggagatcccgagttacagacctgagctcgtaaacaaacgctcaccactttacagtcgccgcctcatcctgaaactccggtcagaaatgctggaaggcctttgctaatgcgcagtgaaaattaggggcacagatgtggacggactgtgcttggtcagtaattgttctcctccaaatcaagtttatgagaaatttcatataaggaaaaaaacccttttgtatctgtgtctatatgtacagaagaccttaacaaccaaacagaaacttaacccctttggtttggttttgttttcgaaagcttatgcccaattttaaacttcatgtaagcttatgtacttattttaaactttaaaactattaaaagttaaactagatagtaaattcggcactgtctaatgtgcatacaccacaaacatataaccctaaattcagctgtgtctaatgtgtatacaccacacatatatataaccctaaattcagcctgatgtacttataccacacatatataaccctaaattcagcctaatgtacatataccacacacacatatatataaccctaaattcagcctaatgtacatacaccacacatatatataaccctaaattcagccctaatgtacatacaccacacatatataaccctaaattcagcctaatgtacatacaccacacatatatataaccctaaattcagccctaatgtacatacaccacacatataaccctaaattcaccctaatgtacatacaccacacatatatatatgacccttacctcttgttagcatttattgtagtttgtttttgaggttaggagcagttaagcaataatatgaatttgtgttggtttaacttttatgaattttagggcagaacaaggagttaatttccagataagcttgttcatgttcttagaataaagtgtcagcctcattagaagttttgtaatcgtggtctgcatcccagccatgcacctgctgggtcctgagtaatcctcggagcccagagcaaggcagagcagacacggagcaaacgctgcgttcagctgggtattttagatacgtctgagaagagttttaaaataaaacttgaatttgaaaagaaatagtgagtacttaccagaggtgggcagtgctgggatgtggccggtcttggtgccggtggctggcggtgctcaggaagcagtacctgttctcacgcttgctgggtgaaactggagcctgctgttccagtgggagggatttaagtgtaggagttgagccctcggggcgtagagatgcacctgatattcctcctgcccgcagctacgattcatgtgtttgcacccaccgagctgctgcgggcagcctccccagcactggacccagcaagcaagttatctcgccgactcccagcgctgtctccagactcaactgtctgtgagtgcggcgtcggtgctgcctggacggccatatgtcagagggctttcgatgtgtccgcagttagaatagagattactatattcatcagaatcacacccgatgaatatttggcgtcatgataaagacatgtgagactttcctttagaacttgagcatgtgtacgcaggaggcaaacacttggattgattctcaagcgcgcataccctgggaggcacagtattcatggcgtccttgccatgaggtccagtgaggcctttgaggatctgtggaccttccaccctctaccctgctcctgagagtctctgtccctggtcctcctcaggagctgagccggcagggagggagcttatcccagagcctggctgcagggacctgccggagcttgcccgacaccaggcaccgcaagagctgcggagcagggtgtgtgggtgcgggggagggggccagctgtgcactcccgcaaaccaccctccccccactttaaattgcagaggcacttaacttgggggccagtttttacctccacacccccccaccaaaactgcttgcttgcttaatcggaggccgcaccccagttgtagcgaaggctggcatgtggtgtcggtttgaggactgggaaaggaggtgggatgagctggtgtcaggcccttggatgagcctgaggctgcagggcagaggctgcagggctgtggcatagggacgagctggccaggacagacaaactggtttttttttttttttttttttttttttttgagacagagtttcactgttgctgcccaggctggagtgcaatggcatgatcttggctcactgcgtttctcctgcctcagcctcccgagtagctgggactacaggcgcctgccaccacgcccggctaattttttgtatttttagtagagatggggtttcaccgtgttagccaggatggtcttgatctcctgaccttgtgatccacccacgtcggcctcccaaagtgcttggattacaggtgtgagccactgcacccggtctgtttttttgtttttgttatttttttccttaagacttaagattttacatggctttgcgtttacttttatatttaattccttttttttttcttttgagacagggtcttgccctgtcacccaagctggagtgcagtggtgcgatcacggttcactgtagcctcaacctcctggactcgagtgatcctcccgcctcagtctccccagtagctgggactacaggcacggtcactatgcctggagaattttttgtagagacagggttttgccatgtttcctaggatggtttaataccttaaaattttttttggtggcttttgtccattgagacatccatatactttatgaagtcaaaaagagttatgtaagtcttatgacaaaaaacagcagttccctgtccctcttacctattcctggatagcaaactatcccaaacttagtggcttaaaacaagcaccgttttattacgtcttaggatatattgtgtcaggagtttgtggagggcctggccgagtgctgcttctgtttcatggacactgactgaggtggctccgtgggagaaagctggcaggtgactggtctggagggtccaggacagctttactcacctgccttctgtcctggaggggcagctggaatcctgagatcagctggaacctcatcctcacttagtagcacttcagaggcctccctagcagggtggtcagctgtatgatggctcaggacttcaagagagcaaggcggaaggttccagtcctccagaaggctgggccgcagattgtcagggtgtcccttctgtcacctttctctgctgaggcagcctcgtgctgcccagatgcaaggcgggagccgagggctccacctctcagcggcaggagtgccaggtgtctgcgctacgactccctctgcccggaagccccaccttggcctttcctaagctgagtgttctgacccttgccatggagggtccagtgaggcctttgagaatctgtgtaccttccaccctctaccctgctcctgagagtctctgtccctggtcctccttgggagctgagacggcagggagggagcttatcccagcgcctggctgggtgtttacctcctcgattccagccttactgatctgttggtggttctgtgccctctctccccctctctcccttctccactcctggtcgaggtgttgtttggtggcttcccttcatggaagatgggaatttgcctctctttgccccttctgcccccatgtctgccttccccgtcacccagggggttttgcctgcctctctcttgcactggaaggcctgctgctcggatcccatgtcgtctttctcttgagttaatcatttagtttgacatgaggcacacaccttttataggctcttgagaaagtgcaagagagatttttttggaggtcttgaattattgaaaatgtttttatctactcttcaacctcactgatagtttggctgagtctagaatttcaggccagaaatcatttaccttcagatttttgcaagtgttcttcattttctttctttcttttttttttttttttttgagatggaatctcgctctgtcacccaggctggagtgcagtggcgcgatctcggctcactgcaaactccacctcccatgttcacgccattctcttgcctcagcctcccaagtagctgggactacaggcgccctccaccacgtccggctgattttttgtatttttagtagagacggggtttcaccgtgttagccaggatggtctcgatctcctgacctcgtgatccgcccgcctcggcctcccaaagtgctaggattacaggtgtgagccaccacacccggccgcaagtgttctctattttctctagcttctagtactgtggttgagaaccttgatgccattctgattcctgattctttctctcttaacattttagtgtgaaaattttcaaaatacagacaagttgtaaggatgctccagtgaactctcatatgcccaacggtggggttctccagttaacacagctgtctgtgttcccttcccttcccctccctgtccagcttacttacccttcccttcccctcccctcccctccccgtccagcttacatacccttcccttcccctcgccgtccagcttacttatcattcccttcccctccccgtccagcttatatacccttcctttcccctccccatccagcttacatacccttcccttcccctccccgtccagcttacttacccttcccttcccctcaccatccagcttacttacccttcccttcccctcaccatccagcttacttacccttcccttcccctccccgtccagcttacttacccttcccttcccctccccgtccagcttacttacccttcccttcccctccccatccagcttaatcgtcttgctgcatttcaggtcagttgcagacatcagtatgctttgccccaaacacttttcaggcatattcttattagtttatgattcttctttcaaaggtaaggtttacattcagtgaagggcacaggtcttaagaggatcatttaacgagttttgacaaatgtgttctcccattatggccccagagagttccgtcacagcagtgccacccttccccacccagaccgtggcaactgcaggctgatacttttccaccatggattagttttatgtgttgtagaattttatgtcagtagtgattcctgatttttatggacagctgtttctcacctgcaggttctttcctttatcctcagtagtcttagttttcttaactttatatttcaacacttctgttaagtacttggtttctgattttggtttccatgagctctgttttgttctgagtgttccttttgtagcatctcattctcatgcagtactttcagtagcttttcttatctaaggattttagtgatagctttcttttagtggggagtggaggagtgggggtggatgttctccgtgtgtgtgtgtgtgtgtgtgtgtgtgtgtttaaagacctggggtcttgctgtgttacccaggctggacttgaactccgggtctcaagtgcttctcctgcctcagcctcccgggtagctgggactgcaggagcgccatgccatgcctggtgccctccctgcatcgtcagtgtggctgcctgccttccagggcctctgctgagcacctcggagagtcagccctgtctcctgccccagtgctccttgggttaggcctaccctgcccctccccacagagttctctggtgccacagatctggagctttttagggacctgtcctgtggatcagggggagtctgagttgcctccctccaggggagggctgggcttcttggtctgaggcatttcctgctgtccctgcacttccaggctcctccgtggtcctggtgctgccttccctgcccttcctcttctaccctgtagcttatttcttgaaaaaagaaaatggtccgtttctgctgtttttagtgggattttacccgctattttttacatgttcaaccccctgtgttactcagaattcttgcgattaggtttttgaccaaatcttaggaaccgtcatgggggtggcagctgatgtttcttgcgtgttgatggtgtggggcaccgtgccaggtgcatcacctgcactggtccatttactcagaagcaccacgcacctggcctgtggagtccccccacccacaggtcgggaacatggccgaggtacccagcccagagggcgatgagcagagttacaccagaggtggggggtgcttccctgggtggggaaggaggggtacctggggtggtggctgctcttgggggtaagcaccggtgccagtgtgtgttggggggtgccagggacccaggcaggtgctggcgccgcggcctctgtgtcagggcctctttccctaggggcacacaggctggaagtgcagtcctggttgagctttcctagtttccaggtcgggggtgaggcacaggacatggccggctcggccccttcctctccatcctgtccagctcagccccttcctgtccatcttgtgcggcccagccccttcctctccgtccatcctgtccggcctggccccttcctctctgtcctgtctggcctggccccttcctctctgtccatcctgtctggctcggccccttcctctccgtcctgtccagcttggccccttcctctccatcttgtccggcccggccccttcctctccatctcgtctggcccggccccttcctctccgtctgtcctgtccggcccggccccttcctctccgtcctgtccagctcagccccttcctgtccatcttgtgtggcccagccccttcctctccgtctgtcctgtctggcctggccccttgctctccctccgtcctgtccggctcagccctttcctctccgtcctgcccagcccaccccggtcccttccgcagcagcatcctctccagtgcactgtgtgctgggactcaagtcttggctcttccatcttcaccctttgtgacttggggcagcaattgctgacctccctgggcctcggtcttcctgtccgtgaaagggacttgtgagcatctctcacagaacacctgtgatgaaggaagggcgtcacatcttggatcttcttaaaatacaagattgtttctgttttaatcctttgtgttccttgtgaggtgctgcatccagaggaaaggagaaaggaaatgaaaactctgcggaaaatccacaggcctggcatcagcctcccagtctgattttgacgcggctgtaggggagacacagcaacattctatcccccgagggcacagcttcaggaacggctccgggccggagggcacctctcgcctggctgtgttgtgtctcagggctctgcgcttctaaagggactcaggccagtgggcagaactgtgggatgggactgggaggcttagggggtgagggtgtaagccctgtgcctccctccacgtgctgcgtccggcatgccacgtcccctcgtccagccctctgctgccccctccacgcgctgcgtcctctgtgctgtgtcctcttgtccagccctctgctgccccctccacgtgctgcgtccagcgtgccgtgtcctctcgtccagccctctgctgccccctccatgcgctgtgtcccatgtgccgtgtcctctcgtccagccctctgctgcccgctgctctctttgggacttccattgtttccccttccccttcctttcctggttttcttccctagtgaggtgcccttcctgctgctgcagggccctgctgtggcctctgccttccgtccctggcggtagtgagactggctgagacccaggggaagcttggagactgtcctagatttcggagatggtggtacacaggcttgctggcttgggttagggctctaggccctgccttcgggttgtctggaagccgccagccaggcctggacacctctctgcccccgtcacctcggagcagcagcccaggagcgggtcacagcccttcccctgtgttacatggtcacctgcctgagaacccctgcaggcccctgtgttttgggaagttgatttaactgaacagagcgcagctgagaaggggcgcctccctccccacccaccctcattgcctgggaccgcgtgtccaggagccgggcctcgggtgtctggtctctgggccacacaggctaacatggccaagcccagctgcacccccggggtcctcacccgccatgtgcctgtggtcgtggccaaggtctgggcccaacctgctctgggcgctgtgggcaccgctcagccattttctacaggtggccgaggagacatttggtttctcattaaaaagaaacaggccgggcgtggtggctcacgcctgtaatcccagcactttgggaggccaaggtgggcggatcatgaggtcaggagatcgagaccatcttgtctaacacagtgaaaccccgtctctactaaaaatacacaaaaaattagctgggcgtggtggtgggtgcctgtaatcccaactactcgggaggctgaggcaggagaatggtgtgaacctgggaggcggagcttgcagtgagccgagatcatgccactgtattccagcctgggcaacagagcgagactccatgtcaaagaaaaaaaaaaaaaaaaaaaaaaagaaacaaccctgagaacatcagtggggttttactgactgtgtcagacaactcagcgatgcagagaaatgaaagtggagttgatttggctcttgtggtgagatacagccaaggtgtatgagagaatttggggaaagctttctttctggacatttgttgacgttgatgagtagtggagggctttatttgtaagttgaagtctgagatttgtcatgccaatacctaaattttaatttgtttgtacaaataacgccacaatttaattcttttttctttttgagacagagtcttgctctgtcacccaggctggagtgcagtagtgcgatctccgcctcccgagttcaagtcattctcctgcctcagcctcccgaatagctgggatcacagttgcgtggtaccacgcctggctagtattttgtatttttagtagagatggggtttcatcatgttagccaggatggtcttgatctcctgacctcgtgatccaccctcctcggcctcccaaagtgctgggattactgggattacaggcgtgagccaccgggccgggcccacgatttgaatttttatggaactggggctaacttaattttttcagacgagtgggagtagagcaaacggcccctgtctgttgcccctttttcctaccaaggcccctccaggctgtctcttgcctggtgagtgtgaggagatgggtgggcgcggccctgtgggatggtgctctgtggcagggctggcagtttctgggtgtgtggcctgtgggtagcctttgtactgggcgcacagtccccggctcctcccttccaacaccttcgccctgagcggcctcggaaatggggcttctggcggctctgcaggcaccgtcagagtcagagggagggcgagcggcttttggtttctgtttaaacagcgtcctgtcgctccctcctctcctgtgcggattggcgctgcggcttctgtgttgagagggaaacttgaaaccctgagctatgtatggcttgttttgtctttgattgggaaacccaattcaggtttgtgaacttgggccaagtttaagaattcccacagttttcttcagctcctctcctccctgaaccccgacagcgaggtgtcttacgcttcggcattctcactcgcctgactcagacttgttagttttccagagcaactcatgtggccgccgtctagggagtttattcagagggtgcctctacatgcacagcagccaggtacagaagtcatgagttaaatcgcacaaggacaagtaaaatgaaaaaaattagcactcagatcttcttttttttcatgctacaaaataacagtgaaaaacctaacgatgaaaatagatgcgaacagacaaaaggtcaatgggcttgatcccttctcatcctctctcctgtgtctcctggaggcttctgcacctctgtgtcttcccccgctctgctgcgtcttctccacctcgatgtccccctctgcctgctgcgtcttctccacctcgatgtccccctctgcctgctgcgtcttctccacctcgatgtccccctctgcctgctgcgtcttctccacctcgatgtccccctctgtctgctgcgtcttctccacctcgatgtccccctctgcctgctgcgtcttctccacctcgatgtccccctctgcctgctgcgtcttctccacctcgatgtccccctctgcctgctgcgtcttctcacctcgatgtccccctctgcctgctgcgtcttctccacctcgatgttcccctctgcctgctgcgtcttctccatctcgatgtccccctctgcctgctgcgtcttctcacctcgatgtccccctctgcctgctgcgtcttctccacctcaatgtcccccgctctgctgcgtcttctccacctcgatgtccccctctgcctgctgcgtcttctccacctcgatgtccccctctgtctgctgcgtcggggctgcctaccgggcttggtcttcagggccactgtttctcctcagctaagtcctgagagtcacatttccatccattgcagtgaaatcttttccttcaggtatttccagaccttggttttggccccttttcatatcttccttgtttcctcgctgtggttttcatttcccctttcgtctccttaacctgttttttgatggtgtctttttaggttatctcaagttcatttcaagctctgaaagtaggaagtaaagtaagaaccgcgtggcactagcaatcactaggcattgttccaagcacacggataaactgagaatcctcgtggtcgccccgggggtgggactgccattgtccagagagacctgcttttgcctgtggtgccacacgggtccctctcacaggatgcgaccatggtggctttgcgtcatgtcacctcagccaggcaggaccttctgctggaacccccttccctggtagtcctcggagagggctgtgcacaatctggaggcagaagcgaagcagtagcccccgtgcgcggcagctcttgaggctgtgctgctgttggctgtgctgttgttggctgtgctgttgttggctgttttgctgttggctgtgctgttgttgcctgtgctgctgttggctgtgctgctgttggctgtgctgctgttggctgtgctgctgttggctgtgctgttgttggctgtgctgttgttggctgtgctgttgttggctgtgctgctgttggctgtgctgtgctgctgttggctgtgctgctgttggctgtgctgctgttggctgtgttgttgttggctgtgctgttgttggctgtgctgttgttgcctgtgctgctgttggctgtgctgctgttggctgtgctgttgttggctgtgctgctgttggctgtgctgctgttggctgtgctgttgttggctgtgttgttgttggctgtgctgctgttggctgtgctgttgttggctgtgctcttctgctgttggctgtgctgttgttggctgtgctgttgttggctgtcctgttgttggctgtcctgttgttggctgtgctgttgttggctgtgctgttgttggctgtgctgttggctgtgctgttgttggctgtgctgttttgctgttggctgtgctgttgttggctgtgctgttgttggctgtgctgttttgctgttggctgtgctgttgttggctgtgctgttgttagctgtgctgttgttggctgtgctgttgttggctgtgctgctgttggctgtcctgttgttggctgtgctgttgttggctgtgctgttttgctgttggctgtgctgttgttggctgtgctgttgttggttgtgtgtgctgaccccggaccccctacagtatggctgtgcatggactggtgatttggcccccatggcctcatcagccctgatccatccctgcattgaattcgtatggggcttgtggtgagtctggactgactcagctttctaaaagctgaaaagcaaaagttaataggtctgcagagataaatggacagacccggtatcctcctgagagctcaaaacacctcccaattattgataactaaatatgtagtggagatatagatatgtataaaacgcacattacatactgtgtgtgcacatacaatatttcaacagcagaggcgactggcatgattccataattgatacagaaccgtgtagctagccgttggagaatacacatttgtaggcacctgaggaacattcacagatattacacagccaggccataaaacaagtctcgagacatttcagagactcactggcggacagatggtattccatgctcacaaagtaatgaaattaaaaactggatacagaataataaaggaaaggtgataatttttagttagaagatatacaaatgtgtaaatcacatgagtcaagtctcaggaggttttaaaataaaaagttaaaaaagtttaaaaataaaaataaacagtcacaaaattattctatctaaaattttgggatgcagctaaggaaacttaaacctttaaacaggtgtgacgaaattgtggcctgcaggcccagtggggcctcagcctgtttctgtacagctttggagccaagaagggttttcacattttaaaaatgttatcaatgagaataaacacaaccaagcagagtctgcgatgtggactgcatgtggcccacagggcccgaggttctctctggccctggcaggaatcacttggtgactcggcctcagacacgtgtacagaaaaggagaaaggttcactctgcacagggcgggtgggaagagggcagtgagcagaaccctagaaatgaaggaggtggaagacaaagatgagagaggacacacagagccaaacgcagctcttcgagagggctgatgggaccaataaacgcgtggccgacgggcagaaagcaggagccttacacacggaagggagccctcgtgcagccaccgtggagatggaaaatggcatgttaagaatatcttttgccaggaaatttggtagcttaggcaaaatagacgttccgagagaaatgtaatttatcaaagttgacccaggtgggaatagaaaagtgactcctcactgcttcagcgcatctgcttgtaagcgggaacgattactgttgaccccataggatttttaatgattttgttgagacgcaattcacatgccattcagttctgtcattaagtgtacagttcagtggcttgtaacgcatttgcagagttttgcagccatcgccacagtcagttgtagaacattttaccccacgctccttcgctgtcatccccaacccccccgacagatggataaaccccccctcctagacaccacagatgggttctctgtgtctacccattctggacatttcctgtgaatggaaccgtgccccctgtggtcctctgtggtggctccttgccccgagcgtggcgttggcgtggtccgtgggcgatgcagcccccagcagtgctccttttcttttccttgttgaagcctgttccatcgtgtggcatcttagtcagctcaggctgtggaaacaagtcaccacagatgggggctcaagcagcacaaatgtatccctcacagttctggaggctgggtgtccaaggtcgaggtgccagcaggctcggcagcaggctcggtttcttccgggttttcctgggcctgcaggcgctgccttcctgctgcgtgctcgccgttcggtctgtgtcttggtgtccttgtttcctcttcttaggcggacactggtcatagcagatccgggccccacttgcgtggcctcattttaccttacgcatctctaagggccacatctccagatacaggcactcgggggcactggggttaagacttcagtatgtggatttcagggagacagaattcagcccacgacgtacatggaggccgcattttatttatccatctgtcagttggtagacgtttgggttgtttcccactgtaggctgctgtgaataaagcattcgtgtgtgagtttttgtgtggatgtggtttttgtcttgggtataggcctgggcttggagcataggactgttcggaaagttaagggaatgaacgtattcagagctcagaaccgtgtctggcttgcgatgcgttctgttttgaggttagtgatgatgatggagagcggctcccgaggacgagagctcgtgatggagagtgcctctttatgcccgatgtgaatgtggctactcagctttctctctctctttttttttaaattaatttattttgtcgagacaggttcttgctctgttgcccaggctggagtgcagtggtgtgatcatagctcactgcatccttgacctcttgggcgcaagtgatcctctgacctcagcctcctgagtagctggaaccacaggcatgtgccaccacgcccagctaattgtcgtattttttttctttttctttttttgtaagggtagggttttgccatgtagctggtctcaaagtcctgggcttaagcagtccacctgtctcagcttcctaaggtgctgggattacaggcttgagccactgcatccagcaacaccccccctccttttttttttctgtttttgagtcagggtcttgctctgttgcccaggctggagtgcagtggctcactcacggctcactgtagctttgaactcatgggctagatccatcccctgacctcagcctcacaagtagctgagactacaggtgtttgccagcacacccagctcattttttctttttttttttgtagagacggtctcaccatctagcccaggttggtcttgaactcctcgcctcaaatgatcctctcatcttggcctcccaaagtattgcgattacaggcatgagccactgttaatggccccagctttctttgggttcgtgttttctcagtgtattcttttctgtcttttaatttttttatattcttgcattttagatgtatgttgagtaaaaatctaccgtatgtgattttaagctggtgagtttagtccatttactttactgacatgtttgggtgtctttgtcttattatatgaattttgctttttcagatttttttttgtttttaaaagttgtggttcctattgggcccccaacccagtcccattccacatcttcttccttgttggtttggaatcatctattctgtttcctgtgtttcttcaggggtcgtattcagcttgtaccacgaatattcagagccaacagccagcttcttagcctaccctccaagtaacacacagcacaccctgacctcgatcactttccatctgacatatttgacattgttgagtttttagttcttcttgtttaacattagacattacaggttgagcaccctgaatccgaaaatccaaaaccgaaaactttttgaatgctgagttgacactctgcaggtgatgggctgcagtcaaaacacaggtaaacaacacacagttgattcagcaccccaaggggaaaaagatcctcccagcccccttcagctttgataaatcctttccacataagaccaggttccctcatgcaagcacgtccacaaagggcgatgaaatgtcgggtgcaggccggacgcaggcgctgcaggctccttatgaggctccacatgggcgagacctgtgcgcaccgctcgtgtgtttgcgtatcctctgctctgtggtgtacagatactgttgaaaacatcagaaaggcctgcaggttacttgtatgggggtgtacagatactgttgaaaatgtcagaaaggcctgcaggttacttgtatgggtaacagtggtcagaaaaggggcaagcattcacgtttgcatgtcgcacagaaagtcagactgctggggggagctgggcagcagtgtaagagcacggtgctggagtgagtgccagagatgacctaagaaacaggaggaatggttgacgttctgtgctggaaacgatgaccagaaaaaccctgcacaaagctacacgtgaaatttctatcacgtattgaaagagtggatctgtcagcatcgcagtggacacaagccacttaacagtgccaatcacaagacaagcaaagctctgtgtaaaggccctgatcgcattcatgaagctctgtccttgggactcatcatctacgaaaggccacacctcctaacaccgtgctcttgggagtgaggatttcagcaggaattctggggaacagaagcattggggcgtcgcatctccctgtggccttcctccctgtggccttcctccgcctgccagctgccccctcaccctgctgtccacctcacggacccctcttcgccccatatgggccactttggcccccaccaccccttcctggatgtgcagaccctatgcggtgccacctgatgcttcaagactgaattttccagaggggcagggaaaggtgtttgcttttttttttttttttttttttttttttttttttttaattttttagagccagggtcactctgttgctcacgctggagtgagtgccatggtgtagtcgcggctcactgcagtcttggcctcctggactaaagcgatccttccacctcagcctcccaagtcactgtggcactatgggtgcatgctaccgtgcccggctaattttttttatcttttgaagagatgggatctcactatgttgcccaggctggtcacgaactcctgggctcacgtgatctactcacctcggcctcctgaagggctgggattacaggtgtgagccactgtgcctggccaggtgtttgctcttaaaaagtcatttctctctttctgtgtgtatttgtgttttgaggtaaaatttcacataacataaaaataaccattaactttaaagtgaaaaactcagagcatttagtacatacccaatgttgcacagctattacttctgtctacttttaacacatttttgtcaccgaaaaaatactctggtgtccattcacatagtcatgacacatcacgacacatgactgtattcccaacccctggcacctgccaggctgttttctgcctctacgtttacttattctgagaattttatacacatggagtctgcaatgcgtgaccctttgtgcctggttcatctgtattgtagcatgtgtcaggccttcatttgtttttatggctgaataatattgctttgtatgggtagactccccccccactttttttttttttttttttttttttgtagagacagggtctcaccatctagcccaggttggtcttgaactcctggcctcaaatgatcctctcatcttggcctcccaaagtattgtgattacaggcatgagcctgaatctgaaaaagcaaaattcatatagtaagacaaagacacccaaacatgtcagtgaagtaaatggactaaactcaccagcttaaaatcatatggtagaattttactcaacatacatctaaaatgcaagaatataaaaagattaaaaggaaagacagaaaagaatatgctgagaaaacactaaccaaaagaaagctggggccagtaacagtggcttaatgcctgtaatcacaatactttgggaggccaagatgagaggatcatttgaggcgaggagttcaagaccaacctgggctagatggtgagaccctgtctctacaaagaaaaaaagaaaaaaaacagacgccccaatgcttgcgttccccaaaattcctgctgaaatcctgactcccaagggcacagtgttaggtgtggcctttcgtagatgatgagtcacagggacagagcttgatgaatgctatcagggcccttacacagttgacggacacttaagttttcccaccttttggcccttgtgaagaatgcttctgtgaacgtttgcgtacaagtgtctgtttgaatccctgtcttccccttttttgggtgcgcatccagggcgggatcgctggaccgcgtgcggaccctcgctgcgcatccagggcgggatcgctggaccgcgtgcggaccctcgctgcgcatccagggcgggatcgctggaccgcgtgcggaccctcggtgcgcatccagggcgggatcgctggaccgcgtgcggaccctcgctgcgcatccagggcgggatcgctggaccgcgtgcggaccctcggtgcgcatccagggcgggatcgctggaccgcgtgcggaccctcggtgcgcatccagggcgggatcgctggaccgcgtgcggaccctcggtgtgttactgaggcgtccccaagctgtttccacagacgctgtgctgccctgcattcccaccagcaaggcgcagagcttctggtttctccatgtcctcaccaacacctgtgttgttcttttttaaaaaattataatcagcctcgtaggtgtgagggggtatcttgtgattttgatttgaatttttcttaatgacgaatgacactgagcatcttttcatgtgctccttggttgtttgtgtatttctctggataaatgtctagtcaagtcctttgaccatttttaaattggattgtttgtccttttgttgttgagttgtaaagctgtttgtatcttctggatattaaactcttatcagatatatcatttgcaagtattttctcccattctgttggttgtctttttttttcttttgataatgtctttgtattgtgtcgtgtttaatgtaaacatttcaccattgttttaattccctcttttcagttcttttctgtgtgtgtgcagtttttgggtgtgtgtgatgtgtacatacacacatgcacatatacaggtgtctaaaaagtattttgtttttttgttttaaatatttgacacttttaaattggagttgagattctgtatggagtaacgtattgttgaatgacaggaaagtatgaagcttgtcggagtgttattacttggcatagccacaggagccatacaaatgatacaaccttgctgcttgtgtctcatggtttttttttttttttaatttaatttaatttttttttcattttttttttaaattatactttaagttttagggtacatgtgcacattgtgcaggttagttacatatgtatacatgtgccatgctgctgcactgcacccactaactcgtcatctagcattattttaatttgttttagttttttttttgaaaaagggtcttgctgtgtcactcaggcaggagtacagtggtatgatcacagctcaccgcagccttgacctcccaggctcaagcgatcctcctgcttcagcctcccaagtagctggtgctacaggggcacaccatcatacctggctaacttttgtatttttttgtagagatgggatctccctatgttgtccaggctggtctcgaactcctgggctcaagtgatcctcccgcctcagcctccctaaatgctgggattacgaacatgagccactgtgcccagccagcctttgttgtttttgaaagttgaaattcatgtttttggatcaaagctaagctgtgacatataaacatgaagtgatctagttaggtttggttatacaccatgtgcagaaagcaacctcttcatgaatcttttaatgaacatctttctacctggaagaaaccctttacctactaaacttactttcacaccttcctaattttgttgtcttccgtgtttttgctagctccaggcctattcggcatttaaaataaaatgcaggttggccagtctggctgggcagttctacaggtactacggctggaggatcccagttgacttgaaattcaggttttgcttgtgaaagtagctggctggggcttctgttgatgacagtgctgtgtggacggcctggttcgctgggtgtgcctcacagacacaggacactttttagggttgcttttgaatgtgcctgaggtgaggttcctgtgttttccttgtacttaccttcatattttctgaccctcctgtggatggaaaatcgactgagtgtgtgaagggcctgtcggtgtgaacgggccctgctcagccggtccatggctgtcttaggatcccgcttggtggcgaggagggtgcggctcgtgggtggctgcctggggctaccccgtgtagacttgctgggactttgtctagacaagagaactgctgtcagtggcgcttcctgcggggggatgagtgcggctctcagcgcctctgtggggctgggggtcttgggccgtgaggccggggccaggctgcgtggcaaccctgagtcccaccctcattgtctttgctcggggccccgagaggccatggggagcctgccggctctgtgtcctccccgcactggcttttagggaaagagagtctcgtgggtcatccggcctgccggctctgtgtcctccctacactgacacactggctttcagggaaggggagtcttgtgggtcgtctggcctgccggctctgtgtcctccccgcactggctttcagggaaagagagtctcgtgggtcgtctggcctgccggctctgtgtcctccctacactgacacactggctttcagagaaagggagtctcgtgggtcgtctggcctgccggctctgtgtcctccctacactgacacactggctttcagggaaagggagtcttgtgggtcgtctggcctgccggctctgtgtcctccccgcactggctttcagggaaagagagtctcgtgggtcgtctggcctgccagctctgtgtcctccctacactcacacactggctttcagggagattgggccttgtgtgtcctgttgggtgagcagacacacaagctgtgacttcagggctacggaagttgctctgtggtttccggcactgcagactccaagtgtgagccctgtagtgaggacaaagagtggaggttggagttcagaattgtggacaggctcctgaggaccagcagaggctggaggccagggcttgcccgccgggagtgtggctgtggaaagattccagtccacagtgggggctgctgcccagactcaccctgaataaagtgtcttcagagccacctgtcctgcctgttcatggcagtgacccagaaagattcatcagtgggcggtgagttgggaacagaaagaaaacccttgagataactgggttggagacagggagcaggcttgtcattgtgcactggtgacatggcctttggcctccccagccgtctggcctgggcctcgtggtcctgctcttgggcttcatgtgtccttgggtgtcagctccagcatggcgtcctctgggccctgctgcttctgaagtgcctgtgccagggacactgtcttggggccagtggaggtctgagtatgggggctgggagtcctaggcagtgagtcatggcagaactggcccctgacttcctggttaagcctttaattctcccgaatgcctgtttttgcttctttcaagttgttgtgcttgagccactctgtcattagctgtgggcgttccgagtgccagcgcacagtgttgagcagagcgggtaggagcgccctggcttcagggagggcccccgccccctgcatggcggtcacgctgcgctgagcgtcccctcccctctggtggcctttcgcagtggtggaggggcaggaactgactggctcttttccctgtggtggctgctcgggtggcagtgagcggacagcgagggggacagacacaggtggaaggaaccacggtgggtttcattaacaatgacagtggctcaggagatcctgaggctgattaatttgcaaacagcaattacttgggattgcttgaaaagaaagttctagcttagaacaggaacctgaggagggctggccacactggaatccagtgcccactgtgacagtggagagccagcagacgccactggctttgatggatgatggagagggtcctggtgtcttctgccatttgtggggggtccttgtgtgctgtgtttgcaggcaccatgggtctccctggacggggttcggttccaccccagcgcccttgtcttgtttcatcgcccgtgtccgggctgtgtaagaagcatgtccatttgtcccgagcggagggtctctgccccgcccctgagggaggccaggaggcccttgttggatgctctggcgggcggcactgggacacggccattgcacccggccctggacacagggcggccaccgcatccggccctggacacagggtggccagggacttggcggggggagctcttcagaatctgtcacatgcacgtgaatgctttatggctttggtattcttctgtttaattttagtaaaaccgcggcccgttgcaagaagagtgtgggcgttggcagctttgtcccaggtgctgcagggttggggtggtccctgtcaccgcctgctgctggtgggggtcagctgcacggatgcacggcctcgcaccagcggcagccccagaggccatgcatagggcaggccccggtggtcagggacccacccagtcctgccaggcgttgggcttgggatgtgcggccggctgggggcacacattcatgccgcaggtccccgtgagtctgggccgtgtgcctggcgagccctgaattccacctcacgtcagccgctggttcacgtcagccgctggttcacgtcagctgctggttcacgtcagctgctggtgttgagtgttcgcatgatgcttttctttcttgggggatggatcagtggatggagaaataaagctgtgagggcataaaatcaatgtttgtttatattgataatcatcccttaaactcagatccaggggcgtcaagagacctgagcccggccccggtgtgccgcgcactggccatgtgtccggagagggctgtgattgcggctgtcagccctgtccattggagctgcagcttggtaaatgcacagatggattttgagaaggtttccctctaaagatgtgggagtctttgcacctcaccaagctgtgctggtgtggccgtggcacataccgggctttttacgtctcttctagggagtgagtcggtgggcataggatggctaaggtatgggaattttaatagggaattttctagtaaatggttctgttagtattacagcttattttagaaagtaaggtgctttcatagagaacgtttaaaattattaagaggtagacaattcttttaaaaacctgaaggtcttttttttttttcttttttttgagacagagtctcgctgtcgcccaggctggagtgctggagtgcagtggcgcgatctcggctcactgcaacctccgcctcccaggttcacgccattctcctgcctcagcctcctgagtagctgggactacaggcgcccgccaccttgcccggctaattttttgtatttttagtagagacggggtttcaccgtgttagccaggatggtcttgatctcctgacctcatgatctgcccgcctcagcctcccaaagtgctgggattacaggcgtgagccactgcgcccggccaaaacctgaaggtcttatattgtggtgtgagtttatatttatttccatcattttatatttgtcagatttttatgcaggggggctgcataatgtctccctggagagcctcagcctctgtggaagagttgggtcaggagaagcctctcggcggaggaagccggagggagaagcctctcggtggaggaaccttcacccagagaccagcctgggggtccttggcccagacgggggaggtgggaacatggccttgggttctttcctccttgcagtttgggtgaataatgtgtgatgaggcctaagaggagatttataaagagtataatctctcagtcttagagaaaagtgtttcaaagtatgggttctcagtgtctgtattgaaaaaataaaaaattcagtgaatgggtaggttatttttcgatctgagggttatttctaagcacatgatttatctttagcacgggagggtgatgccccgccatgtctttttagcttagggactgtcttctgccgtgagttggcctctctgcctgtgcacgtgtgttgccggccccggctcagctgtggcagaagtcagtcacctgtggagttatggaagtccaggcggccaccccaggccggggcctcattccgttaagtagggccaggtgtctgtcctctcacgcgtccgaggtggctgccggcgtgcgggtgtgactgtcgatgagagctctgagctgggatatctggtgacggctgcccctgcttggtcttgcggtgtggctggggagaggattactgggtggaatgtagccgtccgccttttgtgttgacctcttgacctcccttttgggaggcttattaatgtcaaaaagtgaagatatgaggatgggatcgtaatttctttgtgttgctttccagtagcccagggaccaagctgtgggaaccaggcctccatgtgctggccccaccgtcctcgtggtgcctgtgtctgtccaggcttagtcctcagatcagctgcttcaccacattggctgcaggctgggtggcagatgcccccaggaggaggagaagcatttcttcccagggctttggcctgtgctgtgtgcctggaacctttaggtgctgtggcttcgcagacccggacgcagcgtggaggccaagcggtgtctgtacaggacccttcagtgatgagggtggccaggctccagccaggtcctagggaaagctctccgagagcgacggcttaagcagttctgaaaaattgcaaatgatctgtgttcttggagaaagaatgggagagaagcactcactcacaataatgttgcacctactgtgtgcgggtagggtgcaggcagtgtggtccagtgtgagcggggagggtgctggttgaggggttagtgctcgggacgcagcctttggacccagtgccctcccaaaactctgctcatcagtgcccctgagctcagcattgacccctggaggaactgggcgccttccctggtctcagactgtaagcctcctcgggaagcagcagttggctcctgatgcagctggcctcagatcctgttgggagagcaggattggtgaggaacctggagaggagtaggaggtgctgcctgatagcagaggtgggtgatgggggcagagagggtagcaggggcccagttcagtcctgtctggttttcacgtggagctttttatagagttgtgcttctcaagcctttcaaatgcctcacagcggcagtccgacgtgcagtcagtgacagctgagtagattaccaccctcaggactaaatgcaaaatcatcttcactgggtgcagcatttacagttttggtgctggaacctcctaaccagtgttcttaggggctgtcttaccagtgaagggagctgcctgctgttgacgctccacaggaggtttgcggcatggctgccatctgtgttgtggcctgggactttcttagagagtgggtaaaagatgagtcatctcttgtgtgatttatcagcttcacttgtgcttccagggctctttgaagcgtctcactttttaatttcatgaagaaacaaatgtagtgcagagaacagaaagctgctgtgtgacctgcgggtgcccagcctgtggggcttcctcatcgcccccatccaggcagatcgagtgccggctctctgtgctctccaggaggtggcctttcacagcagggacgttctgtgctcttattttaacaactgtaagaatctgagcttggtgacagttgggtgacccgggctctgtgtcttcgtgttggccagggtgtgtcatacacctggcctggcctgcgtgcctcacgtgtggtggggatttgtgactgtccccagcaccttgacagagggtccttgactctgcgaccctgcacagtgggtggtggcaggtgggatcttggttcacaggcacaggtggggagagttgctgggccagcgtggctgggtgactttcctgtggaaagagcgggcttggggcttggtgcgtgatcccaccgaggccggggttgtgcttggggcactgggggagagcagagcaggtgatgcatatccgggcgcccaccctagcagcacaggaagggctgggatcaccactccccggggcaccgtggggacagcgggggcctgctcactccccggggcaccgtggggacagcgggggcctgctcactccctggggcaccgtggggacagcgggggcctgcttgtgttgggggtggggctccttgccccccaagggcaggccgagcaccaagtctgtgcttgccccactgtgcagcgttgcaggtgcagcagacatgaggccagctgctgctccctgcaggcagctgagggcctctgggaaggcttctctacaacgtcctgtgggaactggaaacccagatgtcagtggaaccaggtgttctgtccatcactgcctcttacctcctagcaaattcaacactggcgtttttttttctgagcaagttgagctgcatttttgggacaggagccatggctgtgtgtgctggtgctgaagggagggtctgcagggacggccacacggatggctgtgtgtgctggtgctgaagggagggtctgcagggacggccacgcggctctcgggagccgtttcctgcgctcgggctctgcaccggcaggctccacgctgagggtccctccacatccaccccatcgtgggagggaggctcagtgctctgcaggggcctgagcagtcggggagacaccccctgcccacagccaccctctctgggctatgtgggaggtgcccacgtttccacgccttcctcgtggagggtgtggcgggctgtctgtgccgcgggggtactcggctgcactgtgcacagccctcaccgcccagtgccgaaatgggaaggcctgacagggcgatgcggtctgcaccagctacatctgcagaagtccagcacgatgcagtttatgcctggcagtgatgtttgtttttaaaattagtaaaacctcattagttatcagaaggcgtaactatatgatgattttttgtggagggattatttctaccttttgtgcagagaatgcctggatcccttctgccccttggggtcacatattgcagtggggactgtggtgctctgagggttaagttgtttctgtcacctggaggctgctttttcctcaggcaattggcgttcaacaaatgacaggctgtctagagagaagggtttttcaattacatggctggacctgggttgccaaaaggaagcctcctggggtgtgttctatacgcgacatgcatttgctgtgtgtaattggaaccatgagaaaggtttttgttcagagctattggatagtttccttattttaaacctgttgaatctggaaagagttgtttttgaaatttttttctgataataacgttatataaaagtttatggcagaggagtttctgttccacacgcccctccccgagctttgtggtcgcccaggtgcctggctgtcaaggctggcctgtcccttgtgttcagggtcccgagatgtcagagctggcagcccaagtcctcccctttatcccgagcaggagaagcagtcctcactccatttttcaccccagggtatagcagcacctaccaccctgggatgaatcagagccaagaggcttggtttttctgttcttgttaaggaaattgatcatctcacaccctctcaagctgttttactttgtgcaaatcagattcctttctagggacctgcgaggagaaacatcctcagcttctaggactcccggggatgccgtcagcagccaggccttggcagctgccgcttcacctgtgctggcgtgtggggccctgacgtctcttgcgggtgtcatggagcaggattggaggtttctgagcagcaggagggcaggagaaaggccccaggactttgcgctgtggcctggcctggaaggaggctggctgggcccttctggatgcctgtagcagcactgccacctgggcagaggccccagaggccccagaggccgaggcaggctttgttctctgctgctgggactcagccctgcgggagcacagggaggacagctggaagcccagcccctctgtggctctgtccacagctggggacagcagtccagtgtgcacgggccacccacagccctctcaggaactggcctcttctctttaagacagaggagtgcgccaggtgggcctctggctggacctcctaggccatcagttttcccagcaggaagtgctgatcagactgaaggaaggcctgcgtgtgtgtgttggcccagatgcctgttagtggacgctgtgtctgcacagctgtctctgggtggctgattcatcccagcagctgactacgatggtgctaaagagaaccatcttacacggacttggggacagaaacctgggctcccctaccgaggtcaggtcctgggggtgtggtgggatcagctcccccagcacctccgtggcctggggtggggggtctgtgtcctcccttgggggcttctcacagggctgccaagcagtgtccaggtgcatgcgttgggcgtgcaggaggcctgaggccattgtccatgctggccactgccactcgcggttgtctgttgggagtcggtctgtccagtggatgaataaattgggactcagcggtttgcacccagatgcccgaggctatggagttgccgggtggtcgtgcctggggctgcctggagtggtgttgcagtgactgtccctggggatctggcctggcagggatgccacatttgggcagcgctttcctcttgaaggtgccacagcctgttagttttgatgtgttggccacgaacaggctgccctgttagcacagaaagtgaacgtgagcagtgcgagaaggctcagagtggactttccggggcaaacaactgagggccttttgggcgtcacagatttggtttagttcggatcgaggtaatcatcttgaacccgcttattagagtcagtggctttttctgtctcacagccgccttcttgtttggtttcgcgtctcacatgcattctgtgatcctcactgactttttagaaggaaaatgtttgacatttacaagaagtgagagatactcttgcaaatcatccagcagtttctggtttgcagattgatggcagccctggcctttaccctcagtgcctcctgccggtgatggtgctgccggctctgacctgtgtgaggagggccttggagagcacaggtcccccagggggaggactccgggaggtgctttgcgggagggagtcatggccgagagagggaacgcagagctgccgtgtgtggccgtgcagggccttccacagtgagttgtggggtcctgggggtgagagctgatggtggtctgaccatggtgggaggtggtccggtcctgtagaggcgtggctgccgcagttggggcgggctctgggaatggcgcggtgtctggatgtggaggagtgaggaggagccggccctgagctgcacccaaggagagggctggccatggcgggggcaccacaccggaggacagctcttctgtgggcactgggcttgaagaagctgcagcgcatccaggtggggtgtcctgaggaaaggtggcttggagaggggtgggcccctgcctggagccctggcaggctggggagaccttggtgtctggcagggaccccggaatgtcctgctgctcccccgggcctctgtgtgcagcgccctgcgtcgtggctgggctgagaggaggcagtttccctagcccctcactctggcgaatttcacattcttgataccacggtatctttgaactttctattttgaggaaagttcatttttatgtagttttagtaagtgtataaacgtaataatcttattaaaagtaatcaccatatgtatataaaatacactgtgcagaaacatccatttttattgctgtttatagagaataaaagatccttagatgcaaaaagtcagaggggaaatttgcatataatattcgtagtcctacagttgttgcttatggtgttttgcctaagaccatttctaggtgcatttttctgggagataatgtatctgatgacagttgcatgtgcagataaccggcctctcatgtatccatcccgggagtgccttttctcagactgtgtgtagtgttagtgaacttgattggtgggtgtgaagtgtacagacggcgtgtgcgtggagcgggtcgtgtgcagagccccgaacgagaccctggcgtgtgcgtggagcgggtcgtgtgcagagccccgaacgagaccctggcgtgtgcgtggagcgggtcgtgtgcagagccctgaatgaggccttggtgtgtgggtgcttcagcgtgagggccacctggggaggagtgcttatctggggaggctgagctgggttggaggcttgggtgctccccctggctccgtgggtctccattgctggcttcatagctgtgttccgttttctttgttcagcagttgatctcaagtatttattccaaagcacttgaaatacatgaacctaataaatcgaacaaatacagtaaaactttagcttcttggaacatccccatatacttacaccacgtcctaaaatcctctcatgtctatgtaaaaaatcgggtagcctgggtaacgtgggatgccatctctacaaaaaatttaaaaagtagctgggtgtgatggtggcatgcttgtagtctcagctacttaggaggctgaggagggaggatcgcttgagcctgggaggtggaaggtgcagtgagccaagattgtggcactgcactccagcctgggagacagagccagaccctgtctcaaaaaaataagaaataaatgaaatcacacttgtgtgatgtcagattacccattaacccacttttgaatggagctggaaggataatccacacctacctcggatttctctgcgtggctgttttgcataggagccctgcatgggttattcttgaagtcagcactgtaggagccgtggccggctttgcattttcatcctggttcaccccagacctgctctgggcagagccaggcatcccctgggacgctctgcctttgcgtgtccacgacagtacaattccaggcactgcctggcatctgcgtctctccctcccctgaaccaggggcgcctctccctcccctgaaccaggggctcctcttcctccctgcctggcaggagctgcgtttccttgagtctcctcagactcggcagacccctgggtggtatcatgtgctattctgaaggagcttttgcttcatggcacttgaaaaaaatcctttcactggatctgagttggtgagcatgcatcttcctttcgtaggtttgttttctgaccaggccgtgggtctaacaggagccccgaacctctgggtgggctccgtgtcgcttgcgtgcctcactcatctggcaccgtgaccgcgctccggccctgagccccacttctctgaagcctcacgtgttgcccgtgtggtctgctcctcaccgtcttttctcttgtccttgcccagttgtcgccgtgatcctgaaggcgctgacctacgacgagaagcggggtgcctgcagcgtgggcaccaacgtcagggacgccgcctgctacgtgtgctgggccttcgcgcgtgcctatgagcctcaggagctgaagccctttgtgactgcaatctcgaggtaggcccattcgtcgaggtacatcggatgcgccgtgccccctgacggcgccgtgtgtcgtttcctccatgagaggtgtgcacagcagatgctcgtgaaaaggtgaaattacttggccagaggatctgtgacaaagccaccgcttggaggtcaagctccttttctgtgggtgagcaaccagagcagaagtgtgtggaggaacattctggaggtcttggccaccctgcaggcagtggattcttgggcgcaggtgatcgacaaccagagcagaagtgtgtggaggaacattccggaggtcttggtcaccctgcaggcagcagattcttgggcgcaggtgatcggcacgctgggtggcgtgggaggaagcaagtggggcacgggaatcgcctgtgcgtgctccctgcggtcgtgggtcttggcgagaggcgaattctgtctctatctcctttcaagttcctctggaatacagcaggcatgttggacatggcagtcttcagatggtgtttgtttttgttgaggagctggattttgtgtttttgtggaccagcacttgagagaatgttcagtagcaatagccttcgctggcatgcctgatgtcagctcctctgagatgtaagtgaacacttcagaacctctgggaggtagggagacactttttccctctggcttcctgatgagaaaactgaagccagcaggtttcatgggatcaccagaaccccagaagctgtgcggcctgtggcgggcggggctcctgcctcggtgtccagtgcgcgcacccagctgagccccgtagtggtgtcctgtgccagggactttcaggatctgatactttttgcttaggaaacatgcaaaacatgtgtccccagcgcaggaaacgattcaattcaattcaaccgtgtgcgctggttttgtacactgcttttggactgaaatgagttcttttgtgctgaagaaggcaggtgcttcctttcttgttgtgcatgaaggagctggaggcgggacaccgaggaaggcgactcagtgtcactgtccgtcatgggtgtgtgagcccacggctgaatcatcacaaggtttcacacccgcacttcacctgacaacttttactaggaaaatgaactagggaaactgacttcagaattatgcccaagtcttagaagctcctcctgcagctgttcaggagccgagcgtcccctgctcactacaagacgcctgaaggggtcatgggatgcagcgtctgaagcttccacctggaagtgcactgctccttttggtctgggcggggcggggcgccggtggcagatgcccctggtggcaggctcaggctactgtgctgggtcccctctgccccgcacgccccgcgagcaccagcagggcctccccggcatgtggcggggccagcgttggcctggggcccgcttggctttgatctcgtggggcttcgtcttttggacgtcctgggtgcgcctccactgtggctcctgggttccctcacgcacccgggtgtaagcgccactgcctgtgtccgacaagcagctcgttgtgaggcacacgctggtaagcagctcgttgtgaggcacacgctggtgtaggctccgaagggtctcggtgacaggcgcttttctcttgttcctgcccactgctgttccatcttaccaaatactcagtagcgtccggagagggacctcaacccggttacttccctgggtgtgcagcacgtggccagcgtctcatagtctagattcttgcatcagagcgaagcctgagaggagccgagggtcctcctcctatccagggagaccgtgtgtttcccgaggcagctgtgaacacgcacgtccctcttgtcctgctcctcttcggaggagaacagcgcggctggagggtgctggtgctggccaacgtgttatggagagtgtggcttacctgaggccagggaggtctggggtggctgagagcggctgtggcctctgtctgctgctctccccagtggccactctggcagcgctgctgggcaggggcttggctgctggtggtcttcagggagcagtgccttgcagagtggagcagagaagacggagaggtccggctttaggcccctgccgagctcctgaggccctgccgcgtgcctgtgccagcctgcagcgctgctgtctgtgtgcgggagctcttgtgtgtgatcagcctcaggaaaggctcttcctgttacttccttgtgctgctcctgcacttctaggaagttgatcctgtaactaggaagtgaaagcaaaaaaatgtatctttcttattgttgataggaatagtcacagaacgagaaaacttccttacgttgatatctcattcagtttccttagcaaccctgagaggtgggcaggggccaccgtcattctggtttcactgaggaagtcaggacagcactgaagacacctgtccagcaccttgtgctgacggcttcccagccaggcccatcacctggtggccgaaggcttctgagccaggcccatcacctggtggccgacggcttctgagccaggcccggcacctcgtggccgacggcttctgagccaggcccggcacctcgtggccgacggcttctgagccaggcccggcacctcgtggccgacggcttctgagccaggcccgtctgggcagcagctcccaggccctggcccggggctcagcgctgcctcgtggctgagaagctcctcaccacctgctgtgaggccgtggaaagaccctgaatgcagacgtgtgacggctgcagctgcatctggcccctcagatggtggttcccctttcatggtgaaaatcctcacggatttccttttcagcctcatattttgtctaagagctgtcaacatcactgaaacctgggcctgcccttcatcctggggaggactccctggtccagtgtcacaggaggagtcgggccagggttgagggctggcacaggacatgggggtgagacgaaacctccactcacctgggagggtgtctaggtgggcacggaacccagggtcgtgtatgggccatcactcatgggttctctgttttgggggaaagctgatcccactggagggtgactgtaatgagagtctccagatcaggtgccgactttggagaaatgcaggtgcaactgtccgaacaaatcaagtccccgctactggacggggctggcagctcagctggggccggagagaaaagtcacgagcaagaaagttcttacctaaggtcctggacaggcagatacataacttctgcctttggcaacgttagatgtcatcgttccagagtaaaatacctataaaaacctgccgatgcgcggggagcctggccttggtctgggtgtggagggctgggggccggccggtcggtaggtcctggtgcaggcgggccccgtgcttcatggaggttggcgccgctcggtggcctgctcgcttattcttaggcctgattcacagaggctggggccactcagtgatctgttcgcacattctcaggcatgaaccttcagggctggactcctgttcttttgtgcagtttccacaggggaccctcttgctccagggtcatctttctcactttgaagccccttgagccgcccctgcacagcctcctgttggccccgtgagggtcctgactggggctcctcttttggagcagctgccacgtgtggaccggcacgggcatggtcgtggtctgcccagctgggtgtggggttgagcccatcatgctgtggggtgctccctgggggttgtgtgtgtgtgggtcccacggtgggaggtggggttggggtgagtgtgacttctgtctggggcatgttgggtgggcgtgcaagggggtcctgggactcctgagtttctcaggcctgaaggactgtaggacgcactgtgggctgcaggcttgaagaaggatgtgagtttctggagtagcctggactgcacagccagggcctccccggcatgtggcggggccagcgttggcctgggtcccacttggctttgatctcgtggggctttggtttttggaggtcctgggtgcgtctccaccatggctcccgggttcccttgcgcacaccgagccagcagctgctggggcctcagggctcgcagctcacaggcttctgacgcctcagcctggagctggcgttgtgcccctcgcccctttacctgtgccatcccggccgcagacccaagggtgcccttggagccgtgcccgccggcctgggtgtcaggcttgtccaacgggttcttagagaacctgggccccatccctccttggcccacgcagactccaggcatccggccgggcgggctgtgagtcaggctgcaccaggtgagcgtgtgggatgctgctggtgcgagcctccctgcccaggagccctgcgcacccgggtatcggttggggtgtgcccttccagatctccctcccttggtttgtcataggtgaccacattttaattaccagcttttatgcccgtcaatttgggaacgtgatacaatcttgatttctctaactttcacaagttcttcggtgggtcctgtaacagtgggtgcttgggatcagagcatcagagtggaattttcgcagggaaatggaaatgcctgatcgagctgggcggtggcagcagccgctcctcactcttcaggtgcctggctcttctgagagtcagttcgggggtttagtggctcactttttctaattggttcctagctttttgctaaagaaacttggattaactgttcttttgcctcatggtgtgaatttatactgttcctgttttataaataccagaaggagcttcgtaggtaacttttaccatgtgttgaaggtagcattggttttgaaaacctgatttcctcagtgtcgcacacgggtagcttaagaggtgggataattgttggagtagtgaatggatttccctgagaagccaagtgcaatttaggggcagtgacagtgcgaagttaaagtgggacagagtggttatgtgttatctgcaaaatccctcctaaccagtaatcacagtctaatttgcaagaaggaaaagaaagccgagccctacgctgctgctgctgccattgtgtgtccagtgatttcctcacctgaaactcttttgtaagcagctcatgttgacatcagctccgcccaggcagccacggggccctcccctgccagggggcagcctctgactttcggcctccacctcgagcaaacctgctgagcggcgcggcccagggaggatccgccgaggcctgcagatccgagatctcttcctcgggggcaggattgtcctggaaaatcaggaaatggcaggcattgctcagagctacgtcttgttctccctcaccggtgttgctcagtggcacagcttccaggggaagacaacacgtgtttttcaagaaaagttaagtggccattaccgagcagagtcctaaccctgtgaaacccggcaaatcctgcctccacgtcagctcaggtgtgactcgaaagcacttaaaaaattctcgtgttttaccactgtgttgattagtgtgagctttggttcttgggggttaggaaaattcagccataggcaggtccgatatgatttgcaactttcaaaaaacaggatggctaaataacaaattactagtctgatattttttaaatgtctgactttcaaatgacacagaattattgtttcttaaggtaaaaacagtgtatttggctttttattgctataaaatattatataaataagaaaacttgagctggggtgaggtctgcactttgctgtacctgccgaaaatgaggtgcctggagcttgggacaagtcgaggcgtgcacttccccttgactcggacaggaaagagaatccctttctgtttgacacagaccatttctctgtgttgggaaatcctggtgaagtatcacataaacttctccagcgaaagcaaacgggcgaggacacctagggcacgtttcagcgcagacaggccggcccttctcgcggcctcgcagtgtctctctccaggttcccggggatggtagatgaacgtggtgactcactcagggtgttcctgcgaagggaaactgagaggcccacgtgggacgttgggtgtcctgttggagtagtcctttaggaaggagcttttatatttatatttaactagcatcattaaacctgtttgtatttatttctcgatgagccagttttgttctgagaatgagaaaatagagccgttttaataaatgtccaaatcaggacagtgttaaatttgttgtaagtccatatatagttgattggtcgaattaacttgggagtctgtgtttagttaaaaacagcgtttctcaggcgttgctgtattttctgtgaggttcagtaaaatatacacgcaacagcaaccattttgacttctcatggcaggagccagcttcgttgaagtgggccaggctgaagtgaggccagctttgcctgctgcagccctgtggtctgtgtccaaattgctgagtactgccgggagagggagccgggagtgcctgcgtctcctgctgtcagccggtctgactgcctgagcggagctgttgaagtggactgaacaacagtaaccttagagggttagacttggtgaggatggtagatgattttaagtttcttctcttttttccattctttcttcattaatcaatgttccacactttaaatatagtaatttaaacaaataacacatttcaagaattcagtgtaacatgtgacctttcagtagtattggctggagccggcggcaataaagatagaagcctgtgttcctcttgtggcaaatgttaaaggaaaccagaaattcttgattcatatttttccctagaacacgtggctttacaggtttcaaaaaatgaaactcttgttcatatggtaaatatgacacacatttctatgcattctgaaaagatttagaataaactgccatttgttgttaaaaatagcagttatataactttttttttttcttgagacggagtcttcctctgtcgcccaggctggagtgcagtggtgcgatcttggctcactgcaatctccgcctcctgggttcaagcaattcttctgcctgcctagtagctgggattacaggtgcgcatcaccacccccgattaagttttttgtatttttagtagagacagggtttcactgtgttggccaggctgttctcgaactcctgatctcgtgatccacccaccttggcctcccaaagtgctgggattacaggcgtgagccactgcgcccggctgtagttatataacttttagttattagaagatcacattcatatgtcttgatcagtttaatgatttctaagatatcattaacaaaagccattatgatgtattgaaataggattgatcttaaaacgttcgtgctaatgtaacgtgagttccctttaattttaaaccagtatttttctcttcttatttaggctatagtttgttataaagagtatagagaggaaaatggagtgcttttctgttcatagagtttttctgaaattaaagtcaaaattttcagtttcaagtagtgaaagcagtgttaacagaaagtttcccagatactaatcctgggtcttttaagatctttagataattagttgctttccaaaatagcttttaattctgaactcattttagacttaaagaagaattgcaaaaccagtggagttcttctagaccctccacagcattctccgatgtgaacatctcacatttggaagccaggaagtgcagtgtgggataaaggccactaacaggctggtctgcccgggaccccgcatggcatctggtggtcctgtgccctcagcctcctctgctctgtgagctcctcagtctttatctttcttgatcttggggcacttaaaaaataggttttattgagatgaattcacttgccataaaattcacccctttagggtccacagttcagtggtttttagtgtattctcagacttgaggagacctcaccccagacagaagccatgtgcaccaggtcccgtcacccgctccaagcctggcactgccagcctgctttccgcccctgtggatttgaccctgagacctccagagacgactggccagatgttctgtaggacgcccctctctctgatgctttctcgtgtgttactggaaagagtgatgtgaggtgacctgccctcctccgtgtgctgttgggcccatatagtgccccacaacgggtcctgcgtggtctggaccttgatccctggtcaagatggggcctgccaggtgcctccacttgaggagactgtgttttcctctgtaactagcagtgttcttgtggggtactcgaaggttatgcaacatcctgctgtttctcctttggttttcaccccatccgagctctgtccaaagaccttgttgtgtggtctggtggtggttcctgtgtccccaccccgacgttcagtgattgcagcttgttcttaaggaaggctcgttcctctcccagctttatttcatcattcgctcctgccagtgtggactcatgggtgctcatcctgtttgggggttatcatctaacactattgttactagttttgtttgagttataatctaacactaactattgttattaatgttgctcaaattgctccagctttggccacttcaggttggcttctgtgtcctttcagcaagatcctgttcttttttttttttttttttttcttttttcctgagccttttttctttccttctggcaccacaagatgcacctggcttatctttttgcccctgccccagccctagcatccaccacttcccaggagtctcacatcctctcggtggagaacagtatttggaatccaggacgccgggcttggcctcagctgcctctaggtcccctccctctgtagctgagtgtgtgcccctcttcacagtccatgtttgcacagacaccagctctagcccagcttcctcctggcctcccttcgtgtgccgcttctgggcctactgtgtagcacgctctgctgccgtgcgtctgccgtcatgcatctgacgtgattttggagctgccagcccacacctgtgtgagcaacagactcaccactcagggtgggacgctctgtgcatcctcctcaccctgggcatagcgttgccaggccatcgctcgggtgagcccttctggtgctgctggtctgggatgcagacaagtctgccggttccctctgtgctggtccgggatgcagacacgtctgccgcttccctctgtgctgggctccccaggtctgtgattgttgcttcttcaatctgcatgtggttgtgttctacaactcaagcaccaaacaggacagtccgtctcccccaaaaactccccagtctgctccccaaccctgggccaacattggtctgattttggtcctgatagtttaccatttctggagtgtcttataaacggaaataatcagtaggcttttcattctggcttcgttgacttggcacagtgcccttaagactcatcccagtgatctttcctttttttttttggagtggtgtattgttggacggacctggcggtcacaggcctacctgtctccttgggtgtctccagtcctttctggaggctcaggggggctcaagggaagactctgcttccctgcttgagttgcccgcattcctttgctcatgggctcttcatctaccttcacagccagccacgtccacgtctcgcttcatccttcacgtaccctatgcctgtggtcctttcttctgcctcctgtgtctgtccttccttcttccttcctgtatgtatttatctccttacctgtctacttatcagtctgtctagatggggtctcgctgtgttgcccagactgtactcaaattcctgggctcaagggatcctcctgcctctgcctcccacagacagatggagcacaggtgtagccagggccgctggtgtgtaccactgtgttcggcacccgctgggctgcaggagtaatccagggccctctccccatcttagggtcaactgattgccaaccttaattcccctttgtcaggtaaaggaacatgtttgaagtgggacacccttatctttgggagtgggtattattctgctgaagacaagggtggggacagatatgctgtgaccagggtagttgggcttatgactttgttgttgtttacgtggaggaactgaaagacctgggtgtgctgctggatgccccaaggatctggcaggaggaggcatccaggccctcagggcaggtagcgggtgggcctccgtggtgttgggaggtgctgggcccggaggtatcagcaggaactgcagggtccctaccgcaggctccccacacagtgacacctgtctgtccgtccgtctgtccacaggagcaggaggggctgggcggggaggacgcagggtctgtcggagcatagcagtggcccgtacgtgagggactttgttgttgccgtctccccagggtgcagagcgtggtggtttgtggccatccttgcagtgtgagtgagcaagtggccgaggggtagactttggatggctccaggcggaactcggggaaggaggccgtgtactcccatagctctgggctctgtttgtggctgtggccacacagggcagggcctcagggcagggaggccagtgcttttgggaagggcctcccccagccctcagaagcctcccaccctattccccttgggctccatccttctgttttttttctggctctggttcctggcgtctgtttgcaaggctggctggacactgcaaccacctgggcttgctgctgtggcctggacgctggggtctctctcggcccggtggtgagctgagaagcggccctgtggtagaagagggcctttccacgctgagaccacagattgtccctgcaataagcaaacatttctctaaaatgtgagataaacgctttatccactggtgatccgtggttgttagtaattaaaccaagtaaacggtagctcattcggtcaggccgcttgccgccgatgaggggtgcagagcttctgcagcatcctggggaggtcccggaacgtgggtctgggctgtgctgatgctggagcagccagcggggagagctgccaggccactcctgacagccccgcacccgctctggatggaagcttctcgctcccagccgatacgggcctgctgcctgctgctggggctggaggggcccctctgcttgagccttggggtaccccgtgcctacgtgccctcctggctttgcccatggttggtggccgtgttttgggctgcgttgatgtcgttgtggagcccgctctgggcctcggcacgtctgagcttgattggggtggaaaatgcacctggtggtttgtattatgttgtttctgttttatttaatttcatttgccattcttatttcaaaagatgcttcctatgtttatgctatattgttagtttaacttcctaccctttccatctatgaatttctgtttttattgtggttctcagtgaccacactctaggggtcctttctctctctctctgtctctcccccctctcccctcctcccttcctccctccctccctcctaggcagagcctgtgagacttgcaggcatttccccagaacccaggccctcttggccatctggctgctgccccacccaacctttggcctctcctggggctcctggatggttgggcgtcccaaatccccatcagcagagcacttggtcacaaggcccgagtcacatgccccagcttctccgaggaagtgcagagtccagccgcagggaggactttctcaaccggccctggggccagctgtcctgctcctccttgtttgctgtgggctcacctctgtgggctgctcactcagacccactcgcacccatgggaccttcccacctgtttctcctgcctccttcagtctgtgcccagcaccccgctgtcaagcccattcccccccagcccctgacgttggacatgctggaggagactgtggccctgtggcgtgttctgggccatctccagggcctggagcgggcacctgtgcccagcactggaggctgggggacaagtgctctctctgataaatgcccccgagtttcagttctgtggctgtagtttgtaggtctcctagctcagcatccccgagcccatgccctggggactcatggggccgaggagagaggagcgcagagaacatgaggatacgtgagccccttgcctgagaggtgtgctgtgaacctggagagcaaggccagtgggtctggggtgacagacagtgcgagatgcaggaaaacaggctcgagatgctgtgaatctggagaacaagtgggcctgggtctggggcaacagacagcgtgagacacaggagaacaggcgggatgctgtgaaaccggagagcaaggccagtgggtctgggtctgggtctggggcgacagacagtgcgagacacaggagaacagacgggatgtcatgtgcattgtggctggcagggccggcgcctcacacacacgccccggaagtcaggatgtggtgctgacggtgtccgcgctgccaggctggagcgggtgacggtgcctgcgctgccaggctggagcgggtgacggtgcccgccctaccgggctggagcggagcttgctctctctgcagtgggacctgctcacttttccttagctggatgtatctttcacatttagcttaacagcagagctggtgagaggacgcacacctggcgtcaccattgtcccccgtgcatgtccccggcgtccttcatgttgacgcgggccccgccccacggctcaggtctgtcaacttccctggaacaaggcagagcacttggcccctggaagacctggaaaccaggaacctcggaggcgctggcggccttggaggccgcttatctccgcgtgtctgaaattctgttttccaccttttccctttaggctggtaggaggcgcaatctctcaagccttccttagaaaggatgattgtcctccaccctgccccaaaccccctgtgttctgtgcaacgcctgatgagagcgttctgggttattcacagtaactgagctgggtgatctcacaagaggacataatgaagcccaaggagcctggtgggggccgggagaggccttgctctgagtgtggctcgcatgggggcagcgccttggcgtctgtgtgtggtgcggtggttttcctgccactctgtggaaggggcctctgccagacgccttgtcttcagggcctcaggtccctctgggcacggtgggtgttcatgtgtttctgcagggttaggctctgtgcatggcgtggtctgcaggacctggacagcccctgccccggggcatttgtgtcggccaccttggtttgcccccctgtccaaacgctgccagttctcgtcctccagggcactccgtttctgtcttttcattcactggacctccccacctcctgcgccgccccaccacagcaggccaggtgcgttctgcccccaggccctgtcctcgtggctctttgatcctgtgccctcggtgtgcaccgtctcgtggctctcgttagaaccagggtcggccacccccagctcccacatggcgtctggtgtcttgggggtcacatgtgtctgtctgcagtccctgggtgcctcaagctgtgtgttgcctgtggggcatgtctgaacctcaagtgggcctgagtcgtgagagaaaggctttctcatcgatactgtgtggtctgtactgttttgcagaatttctttttaattaatcctttctctttttcacagtgcactggtgattgctgcggtgtttgaccgagacataaactgcagaagagcagcctctgtaagttttctcattttgatatttcctttcctgaaggtggggggtgggcctggtctccctgatgctcctctgtgcactgctgcctggccagctcacccatccacagcaggagccgcgagggagctgctgagagtgccagctgcgggcaggccactggttcttactgtctctgggcgtcttcagcgtgtgaagggcggtcagggttaagcatccccagagctgcagccatcactgctgggggttgatgggtgatggaggcgagtgggaggtgcccgatgacaggtcttggtgcaggcagctgcacgctgaagacgcagaagagagtgggttctgcgagggtggccagaatgtggcggcgggacgggtcactcaccgggtggctttgagcctcgggaggggctgttgcgagcagtggtcagctctgcttcacccgccacactcgcctgggccttgctggatgtgggagctgcctgcaggaccgggtgcgtcttgaacacagatggctggtttcctctagagagagccctgtgacgtttggggtgaattctgggtgtgaggagctgtagcaactgctgctgcgctgagcagactacttcatttggctcagagctgggctggagtgaggcctgtgtctcttgggaccacagagagcggacagttgagacggtggaccagtctcaagataagagtctttatttcagatacagataagacgctgaacacgttttaagagggtaagaacagagaggcagccctttgagaaagatggaggggtgaggttggcttttggtgatggggtgggccccacagttcctcatgggctcgagctgctggaactctgtgtgcaggctcagcatagctggcttagtgggaacctgttgagggagccgttcacactccctgatactgtcagacttgggggccagtggaccaggtggaaggggtgctgggactggtgagggtttcctgtcagccctgcagtgtgtggcccctggtgagtgggaccaggcggaaggggtgctgggaccggtgatggtttcctgtcagccctgcagtgtgtggcccctggtgagtggggccgtgcaggtgcagtgttggttctctctctctctcaaatgcaggagctcagatgataccctgaagtctttctagctcaaaatgtctgtcatcttctatagcttctggtggtctgcctgctctctgtatcctgaagtagttagaagtctttctctgcctcaggtcctttaaaactagagagaattcaccaggagagctcagaagctcttctctgtccctgaagctgctcttattttgtcttcagcatcagtaaaaacctcataattttttggggaaatcatcacatttttgccctgctatttacccaaaggcagtaaatgtaagactttgaaatataatacaattttatgttaaatctgtacttaaattaagcttttagattttctttactgcaacctaagacatttcatgggaagcagtaataaaattaaagtacttaggcttctatgaaccctgaatatgaagtgaaataatataaatcatttttcacattaaaatccctttaaattggcaataaatcttttctgataaataccaccgagtgcacctagcttaccctgtagcttgcaaaattaaaacagccaaaggtaaaagacacctttttgaagcttagttggaaatgtgaggattgagggcctcataattgggaatcattttttggagctgctgctttcagataacaatgtctcggtctttctggctcagcttggcttcctgtttgacgctgtgtcactgggtgaggtcacccctgtgaggccctgaggcctcttcagcaccggccaggaggcagcagcaaaaggcgttgaagtcctgtccctccttggggctggacacggtcccttgcccctgaactctagacgccctgcattgccctggtgctcccatgtcaagactggccgcggtcgtccatcccatggtttgtgaccctcccagcaacgctgtgaggaaggtgctgcagctggttctcagcattggcaggagcatggcgactcaggcagtcagtgtgtgagtgagtttgtgaaaacagttccagctgtgttcgttgctgaatgctggtttttctgcatattggaaggaatctagcagacccccaaacgtgctgacattgcaagaagacatgtctcccggcggggaaggaatgggcagtagagatggggtgtggtcgtggcttcttgttcatcatgaggaagggagatggggccccgttcactcacagttaaagtaaaggcacttaaagcctacatttaactgagaagattttaaatctttttcttccagcatttcgtttgatacatagtgtctgacctctatttgtgactttttattttgggataattgagatttatatgcagttttctcccctcccctcccctcccctcccctcccctcccctcccctcccctcccctcccctcccctcccactctgtcacccaggctggagtgcagtggtgcgatcttggcttattgcaacctcggcctcccgggttcaagcagttctcctgcctcagcctcccgagtagctgggattacaggcgtgcaccaccatgcccggctactttttgtatttttagtagagacggggtttcaccatgttggccaggatggtctcgaactcctgacctgaagtgatctgcctgcctcggctcccaaagtgctgggattacagacgtgagccactgtgcctggcggagatttacatggagttttaaagactaatgcagggagagcccatgcgtgtttcaccattgcctccatgatgaaatctggcaaaaccgcaatggaacatcacagcctagaacattgagccaacccaccagtcttattccttcttccttggttttacctgtactctgtgtgtgtgtgtgtgtgtgtgtgtgtgtgtgtgtgtgcgcgcgcgcgcacgtgcgctcacgcgtttacttctgtgtgattgtatcacatacaaattcacgtatccaccaccacaatcaggatacacagcagccctgtcttcccgagaggcctgtgctactgctttgcccacagtccctgctgtttccctctcctgacccttggcagccaccggtcggctctccgttgcctattctattctgtcatctcgagaatgctgtgtaaatggactctgtggcctctaatgctgtagctttcttctctcggcacagctctctggagacccaccccgagcgtggtgggtggtgctggtttgctgcttctgttgctgagtggtgccgtggtttgtgtgaccattcatgtattacgacatcaggatggtttctagtctttaagctgctgtaaacattcgtgctcaggttttcgtgtgagtgtaacttccatttctctgggttaaatgccaggagtagtttctgggtcgtggtagttggacatttaaactgctttctagagcagctgcaccattcacgttcgcaccaccacctgcccgcagccctgcctttctctgtcctcgcttgtgtctgacatggccactgttttctgtgtcggcctttttgacaggcatgtggtgatacgtcgttgtggtctttacctgcgtttctgtcatgcctgatggtgtggagcatctttcacgggcttacttgccgtctgtacctcctctttggtgaaatgtctgctcaggtcttttactcatttctaagtggattgttttttgtagttcttgagtttagggcactctttacatatgtaggattctggtcctctgttggatttgcgtttggctttctcccagtctgtagctcatctttccgtcctcttcatagggcaagagtttttaattttttaattttgctggggtctcgatcagttttttgtttttgtggctcatgtttttagtgctttttaagacgtgaagactttcttaaggtctgggaactccacctcgcccggtcccggggatgctgtcccgtgttttctgttctgctggttggtctgcgtgtctgttctgccagcgcacactgtgtgacgggctgtgctgcgatgctgctgtgcatagtcagccttcgcactgggcagggagatgcctcccagcgtcttctttctcaggactgttttccctgttttagggcttgtgcttttccacataaatcttgaatttttaaaacatcttttagataccactggaatggtacatgtcttcctaatagtgtatgttaaattgatgttacagtatatctttgttgcattgccttttggcgggttttgtttcttactttcctaatgaatttatcacaaaagttacaaatttgcaaagcagcagtcaggcctcctcccagcctgctgtgaagcgcctgtttcctccaatctccagcccagcccaggggtctgccttggagccacccgcacgtctggtttctgtgtgattggccagaggtggtgggcgcgtctgctccttttccctggggggtgggggcacagaccctgggtggctgtgttcggctccttacttggtgcccgtctgtgtgtgctcctcccagcagccatcgctcaaccttgctctcaggaagcccccaggcgagtgttggcaggaatcctgccaggcgggaggtcgctcctccagagcgtggtccctgaagccgccagcctccctggcctcgccccttgctggtggtgtgtgtggtgtggccgtgggtgcactttgctgggtcttcctgggacactgaagtctcctgtgtctccagccctgagaactcggagcccgggtgcttttgggaaggacggggcaccagctggtgacacatgggaagggaggtgtggttgtcaccttgcccaggtaacctgctctgcctggtcggtgcgcctaaggggggcagggtgtttggggaggacatgagaggcctcctggaagcacttcatcctgttgaagttcacattttgaccttttcagcagcccttgctctgggcctgtgcccggccctgggactcggcctggagagcctattgacaccgtgccatgggtgcgggcagggcgccctccctggagggcggcacgtggtgccagttggtgaccatgagctgcctcactcctgaggaagagtgttcgggctctgggctttgatttaacctgcctgtctgtctctctgagttgacagccggggcctccgcgtgggtgctgctgggaggctcagtggtaaaggccacttttcaggatgtgtctgattttataaacttgaattcttaaattgtggttttaaagagcaccaggacgtaaaaacagagtgacgcaccttgaggctctgttcagccaacaatgagggcttttatttaaaaaataaagccgtgggtcattcacgttgtgctgtttgttctgaacttgcctctggtgttggcggaagctgacctcgctcacctgctgtgtttgttctttgctccgcaggccgccttccaggagaatgtggggagacaggtatggctgctttcaaacacctttattccaaaaacttcctgcgggtttataggtaggaatcttgagagctataaccctggtgtcttctcgcactgtgagatgtggtgtggctacatcaatgccagggtcatgagttcactataggacgcacatgttaaacagcgagtcctgtttcacagggaacctgcatgtacagtaatttacacacacaggccggaaagctgtgctttacacgttgccaagagccacataatgtggctctgcagggtggggcgggtccctgggaccagcctggccttgcggggacgcagacctgaccccgcctcatcccacacagagcaggagctggctctgttgacgtcagcttgtgcctcatccagaccatagacgggcccagaagtcagctcccagaagctacggaccccatgaccccacgaccccacatcatgctggggctgcttttgctgtgccctctgaccctgacatctggtcactggtcagcttcgcctgtgaatggggggccccaggttactcatgttgtgtgtgatgacgtcacatcttgggcgtgtggttgggtcttgcaggagagtgggacagaggccggagaggggaccggggtctgggctggacctgggcggggagcaaagttcccacgagaagtcagccgagaaggctctggagttcccggacagcaaagcaaatgcagccggggtctgggctgtggccaggtggtgtggggcggcatggggtggacgtgggcctgcggacccttctgacctgtggggagccctccaggcaaggtgtctgacctggagtggaagcattgaggccaaatgagtccacaggaaaagccggatgccagagtcagctggagaggcgggcggacgaggacttgcgcctgttattgaaatggttctggaggagcctggcgtgagtggtgtgggcggctttctgtagacggagcccaggaaggggcgtgactacttcttgctggcccgaggcagccgaggcccacccagcatccttggggtgccgtggggcctgcatgtgttcagagccctgagccctggtcggagccagttcactaggaagagacaccagccttgcaaggggagcctgggtgtgcagacagcaagagccgcccaggccaaggagaatgtgaacgaggtttggtcttttgagtggagagtgtggctgctgtgaggaagaaggagcttgttggaaaccacttagctgagcctagggacttgccagcttcctggaaagtgagagcccaggagaagaagtctccctgtccctgggcttccagcccctccagagcccccactggagaggggcgtgctgaggccagagcccggggtgacgaccgtgctgggtgggccctggggcgcactccgccatcactctgtgttccgggttcccagatgctgcttcctgggaggagcagcccagtcgcatagggagccacggggccctgcagctgagctgaccagcctccctgtgtgtgtggctggatttgagccacgttacctttatcggggcagctcaggttggggattgattgacagggaaaggaaaggcctttacacttggtctaaatttaggcaagcagccagaaaatgggatattcccgtgggtgcgggagtcttgcacctcagtcctgagcctgagcagtgtgagtctcagagcatcctgcacagtgaccagcatgcggacggcagcgggagcctcgtggaagaagcggcacagattttgaagagacacagactttgaaagaaatgcaagacgcgcaggtgcggagcgtctcccagccccgcacggccatgtcctgctgaggttggatagaaacatttgagaagaaggtcgagaacttggcaaggcaaagcaaacgggagtggacgtgtcgcatagcacacagggaagcagcctaaaaaccctcggatttggaggaggctgtttctaatacacagatttggaatgaagttgtaagaaatgcgttacagtggaggccgctgggtaacagcagcagggatggggggtggttggggagcggcctgggggacacagagggggctgggggcagagacgagggaccagcttctctgtccaggttcgtcttggctggagttggagactctggtcctgagtggtctctgccttctccctactgagcccaggggctcttgagcaggttgtgactaacccatgggcagcttccacgttcagggcctgtccgacattccagccctatgaccctgctcctaggcgagtgctgtccaggcccccgacaccatcaggcccttgtggtggcctgtccacacccaggccccccacttcccccctgcacaggtgaggaagttgaggctcagggcagctgagcccgcttttgtctgctcggagcctgttgttccagccctagcctggccagacagagccttggcccctgtgttggtcttgctttgttctcaccgtggggggatgctggacacagagtccccttgttcttgttctcggtgagacctggtcctgggccaccccggatgtttccctgggctcctgcctgctgtgatgtggggcatggagttgtaccccagtgggcgacatcccaggttgtggcacctgctgtctttctgcagagtgagccgcaacagctccacctgggtgcaggtttctcccctgttcacggttcagtgaaggatgctcatgctgtcactgattgcagcagcctcaggcagaagtttatggtatctccatcagcccaagctcccagtgtaacccttgggagagatttgctggaagaaagccgcatggtacctgctcattccggcctctcctggtgggaaggagggatgtggccccgggtgttctcaggagtgctggctgttcagttacgttgacttgcgaagctattacatgaaggtgtgaggttttaatggtcaagtgcagggtggtgatgaatgggttaaagacgtcaaggaaggatctgaatcccggcctcggaggtgggcaggcttgggagacctttgaaaaaccctgctgtggtttatagctgtaaggctttctatgtggggtttaaagtttgtcatttgtattttcttaggaaattatttatgttgtttccagaatttcacatcctggaacctgagagtggtatcagtaacaccatgtaggctgcggggctggagctggggctccactgggaggctgtcgtggcggggtgggaggaggtgccgcctctcccatgtcagagcctcggcggctgctggtcctcgatgcttctggggtcagctgtcaccacccccaagaaccggctgggccagctgcccccagtcaacgtcttgcctgcccgggactgctgagtgaggcctgggctctggtccaggctttgtagaccgtgcaggcggctgcatccccgacctgacccaggcctgctcgctctggtgtgcaccgacctgccagctttgtggcactttgtggcatggggctcaggccgatggaggtcagtggctgtaacactgttgagacctgaagaccgtttacggtgtatgttttcgggaaaggtctcttaccacgtaccgaagtggaaatgtttgagttgtttgaaaaagatgaaatacttgtgagtggtttcaatgatttagcgtggtgttgcctgggtagaccgtcaggaagtcagtgtgacgtggaagtcctcggcgagccatgtctgtggtgtgtggcttgctcaccacctgcctcagggctcggggttcatgagtgtaaatgtctgtggatgtgattattgaacttggtgaaatgcctttgttcattcaaattcttctttttcccccatttccactttcttattagggcactttccctcatggtattgatattttgaccacagctgactattttgccgtcggtaacagatccaactgtttcctggttataaggtaagtctttaatgtatatcacaaaaatagaatactctaaaatcagattggatgtcagaaatcagctaccaccattttcttttttcatcctgtaatgtccactcaatggaatgtagtttttgtgtgaaaaattaaaaatggaattgggaacagtgactgaaacttgtgtttcatgttgattggacacacctcatgctttactacgctagataggggacatttactcacgtgttaaagaggggctcagcttcaggagtgcggccttgccgtgagtgctgtctctgcttatgatttttctcctggtcgccccgttttacccgtgctggttctgtgtggggcttggagtttgagaggaagcagctgcaagcacggccacacctcctcctgatgcttccctactggatgtcctaaatgctttcccaccgtgaaatcttggattagaagggactgtttctttctgtttcggtaataggaagtgttttgaagttgaagttatctgtagattgtctatgaaatgagtaagaggtattttagaaatcaggttagaaacaaatgtttagcacctctaattgcagtttacagaattatatcaaactgttttagttgtgtaattaggtactggggaggttacttcagttatcttagttgatccattgcagcagaaatgtgaaaaagggtgtgactttatttatttatttttggagacagaatctagctctgttgcccaggctggagtgcagtggggtgtgactttatgaagtgatttatttgccttaaattaggaccagaagcatgcccgatgcatttttaacattaaccattaaataccctaaagatcgattccccaacagccctgctgtgtagaccgtgcagaaaggacgtttctccgtcaccagcctgggcagaattttgaaaatgtagcatttggcctctttcccaggaaggatctttgaacacacttatctgtatttttataccctttcaggtttcctcaacatttaatgtccttttttgccttatcagttctttcctattaatacttggccatatattttatgtggaaaatctactggcccgatgcagtggctcatgcctgtaatcccagcactctgggaggccaagacgggcagatcacctgaggtcaggagttggagaccagcctggtgaaaccccgtgaatactaaaaatacaaaaattagccaggcgtggtggcgggtgcctgtaatcccagctactcaggaggctgaggcaggagaatcacttgagcccgggaagcggaggctgcagtgagccgagatcgtgccactgcactccagcctgggtgacagagtgagactccatctaaagaaaaagacaatctaccaccttttcccgagtttcctgagtaacacacctgacagctatgggaagcttcagcatatttcccttgttgctgaggtttctaagccagcctaaaactcgcatgtaattagctgtgtgcgttttataaaaacatttgccaacccaagacctgggtccaggcatgtcttcccccagtgtgtttggcttcctcacgatgccaggccctgcgtgcagaccagatgccacttgtgaggacgcaccggcaggcaggcccctccaatcctgagggcggcatcacggggacctgcagtcatggctgcaccctagtaccgcggggcccccctgcacccgaggcagggtcctgctgtcagcctggaccttggggtgagggaggcagtggtcctgttcagcagagggcatgggactgagcacagcccatcagggaggagagttagcagggccctgggccctggcggggagctgctgggggcctttgagccatagtgaagagtgtggattgtcctgaggtcatggcactttgatggtcaggtctttgttttgaacatatccctgtggctgtatttggtgactggaaataaggagagggcttgagggctcttgggagacgggagagggctgggggcctggaggtgtgcccgctggaggaaggtgggagttgccagggcattacagagggtctcagagctgtgttggcatcactccgcaggtggagggcacagctgagggcgacagtgtcgttgagtgcgaggaggttggggcctcagcttgcacgtgctggcctgcgaggaagcatcagccgtgctgacatggagatgtttcctctgcaaattggagtttcggacacacagactggaattgaactaacgggcaccccaggaagactgtggggcgagacgaggaggatggggggaccagccgtcgccccactctcctgttcatcatcacagcctcgttggggtgtaaacgacccccagtaagctggtgcatgttcaataggtacatttttgtaaatgttaacatctgtaaattcgtacctatcaccacaatcaagacgagaaaaggcccaggtttcccctttcccattcggggtccctcccctcccacacccccttcttcaggcacccctggtctgttgctctcactgcagctgtgtctgcatttcccaaagctctgtgtgaatgggttcaggcagtgggcactctcctcactcacactggcttcctctgctccatgcttcctgcagactgtccgcctgtggggaccgtcccccgagcctccagggccaggggtgtggtacgtggcgtctgtctccactcacctggtgaggggcttctgggcagtgtcttgtctgggttgtcacaggtgcagctgcggtgaacatgtgtgtacacatctgtctttgggcctgcactcttgttctctggcatagatgcccagagctgggtggctgtgctgtcagttttttttttttttttttttttttccttttgagacagagccttgctctgtcacccaggctggagtgtggtggcgcaatcgcggctccctgcagcctcgacctcttgagttcaagcgatcctcccacctcagcctcccgagtagctgggactacaggcacacgccaccacgcccggctaatttttgtatttttctgtggagatgacaaatcatgttgcccagggtggtcttgaacccctggtctcaagtgatccacctgccttggcctcccaaaatgctggccttgcaggtgtgagccaccacaccctgcctgtagctttttctgaaatggccacatggctttcggcgtgatggtgccacgcgcccccggtgctggatgagctcggggtccgggatctggggtccttgccggcgctgggggtgttggtctttcaagctcggggtccgggatctggggtccgtgctggtgctggggtgttggtctttcaagcttggccattgtcatgggggtgtgggagcagctgactaactcgtgttctagtgactgatgatgcagtttcagtcatcatccatttcaggggcgtgtttaacacatctttcgcccatttacttattaggttagtcgttttcttcctgttgagaatttgagaattcttcatgaattctgcatacaattcctttttcagatgcttccttgctacatatttcctcctgctccgtggctttccctttcagtatcctgtatattcctaagtcaaagcctttttaaaaaaaaatcagctttgggccgggtgcggtggctcacacctgtaatgccagcactttgggagacccaggcaggcagatcacgaggtcaagagatcgagaccatcctggccaacatggtgaaaccccgtctctaccaaaaatgcaaaaattagtcgggcatggtggcgcacccctgtaatcccagctactcgggaggctgaggcaggagaatcacttgatcccgggaggcggaggttacagtgagccgaaatcgcgccactgcactccagcctgggcagcagaatgagactccgtctcaaaaaaaaaaaaaaaaatcagctttatctttgtacatctactttattacatatagtttacatatagtaaaattgccagttttcaatatgggtttaagtgtggcagcgggtttggcagatgtgagctgttgaatgaccaccactgtggtcagtgtggtgcacatgaccctccctccaggaggcgccatcctgactgacctcctgtcgctggggctcccccgttttagaatccgtgcaggtagcttccttcatctgctgcctgcctcatcagctgcctgtgtttcagggttcctcagtggttctcactgtgtggacgccccacatttgaggggctttgagcccccgtgggttttgatgtgagcacacggcacagctctgttctccccggctggttttctgttggagtgagcattgagcccccgtgggttttggtgtgagcacacgtcacggctctgttctccccgatggttttctgtttttcatgagcattgagcccctgtgggttttggtgtgagcacacggcatggctctgggttttggtgtgagcacatggcatggctctgggttttggtgtgagcacacggcatggctctgttctccccggctggttttctggttttcgtgagcattgagcccccgtgggttttggtgggagcacacggcacggctctgggttttggtgggagcacacggcacggctctgggttttggtgggagcacacggcacggctctgggttttggtgggagcacacggcacggctctgggttttggtgggagcacacggcacggctctgggttttggtgggagcacacggcacggctctgggttttggtgggagcacacggcacggctctgggttttggtgggagcacacggctgcttcccacagctctgctgcagaccctggggcttgggccgttggacagctgagcagaggcttcgttttcttttcctatgtgcaggaggctgaacaccgcttcaagtggttgaagtgtgtgtgtattttctgtaaactttttgatgatatttctgctacactattttttttttattgattcagaagaactggtttattttagggaagcctcctgttggtaagatcagttgcggttgttttttcagatttgttgtttgacttttgactttgtttttggtgttttcctggtagactttgttcggcatatgtgttggtagggatcgatttcttctgtggctctgggtttcgagtcataattagaaaggcatatcctacttagagattattgtttaaaagtcttccgtgttgttttcacaagatgtaacttttatttttgagacataatttacacgctttcagctgcccctgtatggagtggacggttgtggaggggctgacagtgtgtccacctgcgtcacctgcatcttccttgggagtggagctcccaccacttccacggccaacactccttccccccagcctgtgtgctgctgccctgccctcgacgcggagcagggctgcccctcggggaaggtcgtatccatggaaccagagggaacacactcctgtgtgtcaggttctttgctcagcgtagtgcgcctggggaccgtccgcagcgcgtgtgtcctcagtgcatgtgtcctccgctagtgtcctcagcgtgtccgcagtgcgcgcgtcctcggctcgtgtcctcagcgcgtgtccgcagtgcgtcctcagcatgtgtcctcagcgcatgtcctcagcgcacgtgtcctcagcgtgcgtgtcctcagcgcgtgtgtcctcagtgcgtgtgtcctccgctcacgtgtcctcagcgcgcgcgtcctcagctcgtgtcctcagtgcgtgtccgcagtgcgtcctcagcgcacgtgtcctcagcacgcgtgtcctcagctgcttttcgttggtgagtctttgctcagcatcgtgcgcctggggcccgtcctcagcgtgtgtgtccgcagcgcgtgtgtctgcacctccttttggttggtgagttgtgtgcactgttctgtggctatacaatttttctgtgagtttgcctgacatttaggttattttgaatttttggctctgatgaataaagcagttgtatatatttatttagaaatcatcttcatgtggatgtgtattttcatttctttcagataaagagttagaatttttatatatttaactttatgagaaactgccaaactgttttgcaaagtggctgtataatcttgtactttcaccagaacgtatgcagcctctggttttcccacatctgtgccaacgcttggtatttaccagtcttttaaaatttacccattcgagtgggggtaacgatttaacaattagcattcctggctgaatactgatgttggacatcttttcatgtgtttattggccttttatttattttcttttgtgatgtttatgtacaaattttgtatcaattttttgtttggggtttatctttatatattctgttacaagtcggtttgccttttgattttcttaaaagtttttaacagctttgccgaggtataatgggcatatgttagctgtatatggagtgcagggctttactgaagtgcagctggcacacactaaccagagcgcacagcttcctgtgtgtgacggaggcctgagcacagccatcaccctggagcccccccatgtctgctccttgtaattcccgcctcggtcctcccccaccctgaggcccctgatctgcctctgtgggtgtagatgagttttttgcacgtccttgaattttgtgtgaatgaaacaaagctgtgtgcactcattttgtcagtcttctttggcttagggtagttgagattcagattgtgtgtgttgttgctgagtattcgattgtgtggatcaaccacggtttgttttccccgtggatgatgtcagggtggtttccagatttcgccgttacacatgaagctgtgtgcacgtttgtgtaaagcccgtgtgtgcacagatgctcttttcttttgggtaactgctcaggagggaatggctggatcacgtggtagatttgaagaaatgggcaaactggttttgaaagtaactgtgctgaattcccacccacaggcagtgagttctcgttcttccgcgtctcaccacctctccatgctgtcttttccagtgtgtttattgccggctttcctgagtacacgcagccaatgatagaccacctggttaccatgaagatcagccactgggatgggtaggttttctgtttttgtttttctaagagctttttttccccccaaaggagagattcagttgagcttataagccttgagtgtattttctcactgtggatgtcgtattttaaaataacttctgagaagtaatatgaattccagtcttcatgccggatgtgttgagtcatggtctgtctccagttccacttctggagcgcctggtccagtgtgtccgacgtggcggtgtacccgtgcaaatgtccacgctggcgtgttgtggagtgccgctgccgtccgagggggcgcgggcgtagcttggaggcggactctgcgttgtctccctcagcagtgcttcccgctgactctgctccatgtggctccacaggtggtttctgcgctgtctcctgggagcccagcagttcttagtggccgttttcatcattacagtagcagcttcagggtttccttgcatttcataggcagttaaatgtgtctcagaaaggaaaagtgaagtgcggtctggagcataaacagcgcgttagtgctgtgaccgccgccctgaggaggtcagagggtcccctcctaggacagtgccgtgctgtggcactcctcacggagcctcgaggagcggtaggtgcctgtgggtggaggtggctttgtgagggtgcgagtccagaatctcagtttcagagttggtgtgatgtggagggggtcctttctgatccatgggggatgcgtttgctgctgcctggggagcggcccggctgcctgccgtggtcctgctgcctggggagcggcccggctgcctactgtggtcctgctgcctactattggtcctgcttcctggggagcggcccggctacctgcggtggtcctgctgcctggggagcggcccagctgcctactgtggtcctgcttcctggggagcggcccggctacctgccgtggtcctgctgcctggggagcggcccggctgcctactgtggtccaggcagggccctcaggactgggagcctctgggaaaggaactcctgggtagcactcgggctgccgggggaagaccctcccttcattcgcttacagagaggggtgtgaattcctgagactcggggtgtccctgcaaatgttacaccaaaactctctccattaggtacaaggtcccctaaaccgaacctagggaaaattaattaatttgtcagttgtatcagccgattagtcaataacgtctttaaaaccaaagttacagatatatgcccgtagcgtcggagctgtgggactctccagctggtacatatgcccgtggcgtcggagctgtgggactctccagctgttgctgtctgtctctgcctcagttctgtcggcctttccttcacgtgttttgggcggggtcacttattggaggcagatacactttcgctttttgtctcttcctaatgtattgaccctttatctttgcggaacggccctcattgtctcgtgtgagatttcttgccttaaagtaactgatgactggtgtagtacctgagttggcaagccttttctttgaggggctggataaacgtggtagatctctgttccatacgctttgctttagtttattttatttagtttatgtaacccttgaaaaatgtgaaaaccattcttagctgagggccgtccttacgcgaagaggcctcgggctgggcttgcggctgcagactgcattgcctccgcttctcaggtgctttgtcttttctgttccctcagagttgcaggcgatggtcttctagacagcatgcagttgggtgtcgctcagggtgtggagtcctggcacatgagacgccacctgcctcgaagagctctttgtttaccgttagaagtggaccctgagcagggccctcggccgacaccagaggggctgtggcaggtggtcctgccagcgcgggcgtctgccattgtgcctggtttcactgtggtgctgtgggtttggtgtttttaaataattagaggacagacacccgccttctgcatgttttcaccttcacattttgcttctttgttgttacatggtcgccctcatgatgattttaagtcaggaccacttgctgctccagctgggtctggaggggctggggcatgagctctgcgggtcgctcccagcttgaccatctgcctctgcatggagctctggaaggaggggtgggctcaggaggggctccagcctcttgagccggtcctgggtcagcctttcgcggtccgcatgttcaaccatgggtgctttcagtgtgtgtctgatgaggcagttattggatatgtgccccagatttggtgggtgagcctcaggaaattccttctgttcaccccttgtaatcgtggaggggtggtttcacgtggctctatctcacactcacaacctcagagtagcgtgggggtggggaggccggacacccaattgccacctggccctgagaaggaaaggcagctgtgtcccaagaagaaccgtggttagccgtgtgacctcgctgttgtagactgtccttgtcgtctgttggagtcggaggttcttgtactggttcgtgtgagtgagtgagtgagcctctgctaagtggccggttgaggactcgtgtgttgtctccctcactttctttttatgaattgaataaagctagaatcataaaatgaaggcacttacgacattctctcctcactctcagggtcatccgagagttggctgcgagggcgctgcacaacctggcccagcaggcacccgagttcagcgccacgcaaggtgggtgtgtgtcccggccggcctgcgggcaccatgcatgcactgcagaaaggcctgggttgctggtttcaaaggctgggggctgaaaataaggttgtgcttctgtcttggtgagaagcatctgaggaaagagctgtggacttgatcagtggataggctgtgaggacggatgcggtgagtgtgtccgcctgcagggcagggagccgctgaactgtgttacgtacaccggagcccgtgatggtcccgccggatgcctgacatgcagtgctgcttccctggtctctaggtggctcgcacctgccacacgacactccctggtctctaggtggctcgcacctgccacacgacactccctggtctctaggtggctcgcacctgccacacgacactccctggtctctaggtggctcgcacctgccacacgacactccctggtctctaggtggctcgcacctgccacacgacactccctggtctctaggtggctcgcacctgccacacgacactccctggtctctaggtggctcgcacctgccacacgacactccctggtctctaggtggctcgcacctgccacacgacactccctggtctctaggtggctcgcacctgccacacgacactccctggtctctggttggcatgcacctgccacacgacactccttggtctctaggtggcttccatctgccacacgacactccctggtctctggttggcatgcacctgccacacgacactccttggtctctaggtggcttgcacctgccacatgacactccttggtctctaggtggcttccatctgccacacgacactccctggtctctaggtggcttgcacctgccacacgacactccttggtctctaggtggcttccatctgccacacgacgctccctggtctctaggtggcttgcacctgccacacgtgaatgcactttggaattgggcagcgtgtatagaaagaaaaggcctgaatgggagactcaaagtctgcccaggactaacatcaccttggaatggctcagctaagtctgcacttcttacacttcatcagtgaagagagaaatcctgtttgttctgtcttgtttttttctacttggaataaataatcatctgacttaaatgtggggaagaatacacacatttctcaatgtgtgtaccgtcactcccccgacatttattacaggggctacactggaggctggattgtggctcttcagtggagttactgatgtgacgcctgtgttgaacatcctgtgggggctcgttcattcctaagggatctttcagcttcgtgatctgttaatgaggcatccacgtcacgggtttagtgtggcgctcccctacttttcagtgataattaacccttgctgacactgagggggctcagctttgtcctccacccggttgaagagcacggacacccagaacaggactgtgaccttttgtagatttctctgattctcgaaaatccgatcacccccagccgccacatcttagcctctctgattctcaaaccatcgcaagcctggcagcacttggggaggcttaggctcggggagcttggtttccccacgcaggtgtggcagagccgcctccctctgcgtccgtgagggttctgaggagtctgtgctttctgagcaaactcagagtagaggcaccacccctgggggcagccctgcctctgtcctgctccgccccctccaccgcccaggcagccaggcagagctcctgccaggaccagaggccaccctacaccgacagggaaggcctggggagtgtgtcgtcctcctccatgctccctctcctgtctgagttacccaccccgtctggggcacttgggagcgggccatgtccagcacaccgcagcctccgtcctgttgcccttggtgtctcaggggccatctgcatcaccacgggtgccgtcctgggcactggggtgatgaccctgagggatgccagtgtgggcgggtgcgtgtgggcgtcccacaggtcgtccgtgtgtgcacgccgtcgcctgccctcccggccctgtgtgggtgcgtgtgggcttcccacaggtcgtccgtgtgtgcacgccgtcacctgccctcccggccctgtgtgggtgcgtgtgggcttcccacaggtcgtccgtgtgtgcacgccgtcgcctgccctcccggccctgtgtgggtgcgtgtgggcttcccacaggtcgtccgtgtgtgcacgccgtcgcctgccctcccggccctgtgtgggtgcgtgtgggcttcccacaggtcgtccgtgtgtgcacgccgtcgcctgccctcccggccctgtgtgggtgcgtgtgggcttcccacaggccgtccgtgtgtgcacgccgtcgcctgccctcccggccctgtgtgggtgcgtgtgggcttcccacaggccgtccacatgtacacaccctcacctgccctctcggccctgtctcttgcagtcttcccgaggctgctgtccatgacactgagtccagatcttcacatgaggcatgggtcgattctcgcctgcgcagaagttgcttacgccttgtacaaacttgcagcccaagagaacaggtaggaagagtgggtctcgaggagacacagggctctgtccctgatcccctcaccatgtaatcacagtgctctccagttcgagactctctcatcccttctcatttttgtttatctgcaccagtgtcacagtcgataggccccaggttgtattgatggagtgtgtaagtggccctctctcctgacggtcatgccgtgggtggaccacccacctcttcagcggggcgggtgcagcacccggatgggccgggcatctccccacggctgtcctgcccctgctgcctccttgtgcacctcctggtctcagaggtgacaagcgaggtcataacagcaaaggtcctttttccaagacggcattgagcgacttgcatgttcagtatcctttcttcatcacgttccatagtttaaaatgccagagaatatacacgtttcttttgaatttttcagttggctatgtttgtacaaataataataaagcatgaaaaacatggggtcactgggaagttgtgtgcaggaggctgtaaggcatcgactgtcgtcttacgtttcttcccagtcgagtcttcctcaagagtaagaactcccggacttaccatagtgacggcaacctgcttctcggactccagtttaagaaacgtttttaagttcatgccctgtgctggagacagttccctgggaacgggttgagagcagggtatgggcccacctcccgcccaagcctgaggaagctctggtcggccccgagctcagatgcagagtgcagctccttcagggacgctcgctcgtgtgggtgcagctgatgcccgtgcaagacctggcctttatggcgctgctctgtggttgtggaagaaggcacatggggtggggtctggggagaaccaggcgggagctcccagggtcctccagtcgggtcccacagggcctgtgtcattcccccagcagtgagatgtgaccacacctgtgaggtgtctatcagggaagcacatttgagcctcagtgcccaggctagactggggtctggccacgtgggcacctccgcctggcacgaaacaaaattccagacccccagcaggaaagcaggtgccagcgtaaagcacacggtttgcgcagattgagccagtgagggggcctcatgaggcagggcttggtccaggcccccgcatgccagcccaggtctgatctcgccagggaccttcccttggatgtcagtggacatgagctgtcgtctcagcctcacctggacctgtctgttttccaaggtggtcacattggcaggggtcacagctttaaggggatgccctaacatcctcttcctttgaccaggcactgcttcatctaaaatcacaaatgggccaggcatagtggctcacgcctgtaatcccagctatttaggaggcggaggtggggggattgttagggcccaggagtttgagaccagcctgggcaacatagtgagaccccatctctaaaataacaaaagaatgcaatgtaaaacaatacagtagaatacaaaaataatcggaggtatgtcctgcagaggtctctgggacccactgggacctgaacaagaatgagaccttgctgagcctatgctcctccgagtgtacttggggttagggtcttggggagtgtggcctcagctcctccgagtgtactcggggttagggtcttggggagtgtgacttcagctctgtgtttgaacttctgcaggcccgtcacggaccatctggacgagcaggcagtgcagggcctgaagcagattcaccagcaggtttgtgtgcagcctctgggtgtaccctcaggaggcatcacaggacctgcccccttagggcctcccaccctccccaggcagggtctgcagtcctggtggccactgtgctccatcagtcctgggctcagtgggggacctgcggtgtgatcactctgggaacaggctctctgctggcgtcatgcttgtgaacagccaccttggagggttgccctgggaggggaagagactcctaggaaatgagtgcagactttctgtgcacgtagccagcatgtccttggtctctgaggaaggcttatgaagctagtgcagtcggtggaggtttcggctgcagctggagtgtggtttccctccggggcgcgcggctgcggtcccacgatggagcgtgcagccaactctgggtgggggcattgggccccgtgctctcctggtggagttgggggcacacagaacgagcacagaagcctctggtttccagccgtgcatctgcagctggggtctgatgtctcctgaaagtaaagcagaattttgtgtgtgcgtctgtcggatttctctggggagacagtgtgttcatctttctgggctttgagagattctcaaaggcttctgtgacccagaggtaaagtatgaactatggatcttggtgttacaggagaatataaaaattgttcacgagggattacgtggtttacttgtctgttgtccagatagctttatattctttaagattcagctcggattcttatcctatttttgccattaactttcattatgattttggcaaagccattttgtttgcttacatttttcacttttaatgtggtgtctggcctccccctctgaccgagacaagcatggctgcagagtgcagacggggaggtggccccgggcagcagccatgaacgtggcctccccactgacgctgagccatggctcccttttttcagtaaaatataagcagtaatagagccgatctccttgagtttttgtgagaattaaagaatacattttaaagaattgaggagaatttttgggacagtgtgagcattcagtaaattttagttgtagtggccatcacaacgtggcttttaagctctcttacaaaaaaagaaacatcagcatcctgtttggcacagttacttttctgcacaagaggctgcctgggtgggttctacgtcggtctctggggccagaatgcaggtggctccagctccctactctggccctctcctccctctctctgtgcctcagtttccccttcaagggagctctgggcctgtctggaggttaaacaaggccatctgcgtcagtaggtgggcctccgtcctcagccccctaggcggctctcctggctggcatggcatcttctgccattttctctttgttcttgtttttgacagttgttaacgtatacgtattattttaaaatttaaatcattaaataactttcagttttttattttcagctctatgatcgtcagttatacaggtgagctttacaaaaccaaagttcttatatctgtgtcctaatgaagaactgcgctgtcaggagcaggcggggcgggtgtgttcgcttccctctctgcctatgtgtgtttgggttgagcgggtgggtgtcacccggcccgctgtgggaggcgcatgagggtctgacctggttgtgtgattgggttgagtgggtgtcacctggcccactgtgggaggtgcatgagggtctgacctggttgtgtgtttgggttgagcgggtgggtgtcacccggcccgctgtgggaggcgcatgagggtctgacctggttgtgtgattgggttgagtgggtgtcacccggcccgctgtgggaggcgcgtgagggtctgacctggttgtgtgattgggttgagcgggtgtcacccggcccgctgtgggaggcgcgtgaggttctgacctggttaggttttcagctctgcaggtgtcatcgcgtttcctcgttcccaggacttgctggtcataggcaggggtgtggcctccccaaccccgagatctggccgggtgcctccctgagggtttccctctgtgcctttgcagcccaggcagcctgtctgctctgacagattgctttgctttttctagaatttgctaccgagggtgtcacacagtaggaagcctttgggtgtggtttcttccccgacgtgtctttgagatacctgtgttgctgtgtgttccgtggtgtgcatgtacggcgccgtgttatccactcaccagcccaggctcatctgggtttccagcctttggctattgtagggaagctgctgtgcacatctagacgtacaagtcttggtacgtttcacgtttcctggctgactaccaggagcagcatcgcagggtgtggggcacatgtgtgacttctcagcagccgagccaacttcccagaccctgctgctgcacgtccccatccacaagtgaccccttggtgtggtcggctctgaacgtgggccctctgggtgagtagaggcctctcgctgctgctggagtctgcctctccccagggctcctggtgctgagcctctttccctgtgctgacgaagcattcctgggtctttcgtgaagttttttgctcattaaaaagttcagactttttgctcattaaaaattttatcgtctgtcttattgagctgttagaactcttcatatattccagatgccagctctttgtcacacacaggatctgccagtgctttctccagctctgtggttcacttttcttttctcttagtgactttttttttttggagaagcagtctcactctgtcgcccaggctggagtgcagtggcagcatgtcggctcactgcaagctcacctcccacgttcaagcgactctcctgtctcagcctcccgggtagctgggactacaggtgccccccatcatgcccacctaatttttgtatttttaggagagacggggtttcaccatgttggccaggctggtcttgcactcctgacctgaagcgatccgcccgcctcggccttccacagtgctgggattacaggctgagccaccgcgcccagcctcctagtggctttttactgggacttgtgtggggtagtgaacctcgtgctgttctcctttaccttcgaggggtgaagcctccctttctgcctcctagtccttccaggctgctcccaagaggtcccttggctgctcccaccagtttctggccacctcctcagtcagcagggcgggtggccctgtttgggctccaccccacacactgggcctggagggctccttcaggtgctccttggggtactggaggacccctgccttgggcctcagtcctgtactcttcacctcctggtgttggagccagcatttcatatgttgcattctgtccagttttctacttgcaggaggggacatccaaccctgccactctgtgtgggccagaaaccagggtctcaggagtgaatattttgccctccccagggcagcgcgcctgcccttgtgcaccagggtcccgctgtcagcgccagggctggggcaggtgtcccagatgggcagagcagcccggagctccgcctagcttcgctcatggtagaaccgcagtgcactgcttctctaggctggatagggggctctttctggcatctgagattagtttctataaagtaagagctgagcgctgcttggaattagttctgtgatgggataccagtcaggactagaatgtccagtaaaaattaaaaatcagcatcaccccagctaggatgggagacctctggaagatggctgtaccacgttttttcctttcttttcataaaaggttgctcatgctcagtaacacattcaactagttctcattttaatgctttttggagcctgaggttacattggcaagcatatttcatggtgttttatacgtcaagaggttcttctaattctgatgttttcattccttttcaggggtctgggaggacagctcatgagacaagcaggtaagtctgaaggcctttgcagccctctgcagccctttgccgcagccatcgttgagggaggtgtgctcgtggcgtgcagggcggcccattagcccccagggtgaagggctgggtgtgtttcttctgtggaggcggcatctgtgatgtgcttggtttgtccagtggttcctacgagggagagattgagagattgagattgagagagagaaagaggaagttgtgagctgggaggggttgcacccaggagccactggttctggaaatttctcaggaagcagaggcagctggggcagtggggccagtgcttgcctgtggacccagtggacattgcagatccctccgagcacggccccagcgtggacagagcagccctggtcgtgccctgtggactgagcagcgcagggaccaagagccgttttgggcgagcacaggaagctcaggcgggggcaagaggaaagctgagcagaggcgaagctccttacacacccgagtccaggcgaacctctgcgcctgattcccaagcctctgataccccccgggggttaggacagtcgggcattttttctttgctgattcttttttagcatgtgaggaggagggaagcgtagaacacattttagactgttccacagagtattaaaggaaaagcctgatttcatagacattcctgatggcagcagccgaccccaaggtccagggagctggattccccgacacagctcctggggccctgctgttgtggacagcccatcccacgccaccctcagcccctcgctgtgggactgtgagtgtgagtgtggaggcacagctggtgaggaagcttggaaaaatcgcggttgtgtgcagacttttgctgaggtctgcgtggtctgagcagaggagagcaggctgggattcggggaacccacggccggatgtcagggctgtaccagcctcttgtgctttctgtccacacctcccagccctgacctgatagggacctgcccgaggcctgcagccatctatctccagccaggctggccgggcttctgtactgagagcagccagcttgcatttctgctggtgttagctcagtgttctcatgagtctgatggacgtcacgggaaagtcaatcctagaaacgtgagccagtttctgtcagctgacgtcagaggcatgggactgccagttctgcaggtggtccctgttggctaagaccggtgtgtcatgttttggatgtagacttggtcattgtccctcagatgcctccagagcacacggtgcaggggtgtcacctttccgacgtacccatgggtgcccggagttgcctccttagtgggatcaagaccatcccccacatgtcatggacagctggtgacctgtaagccgtttctggatctaggagtttggcttgggatggagtggggtgtcgagtgctctcagaagggttcaatgtcccccacttcccacccacgacacgggtcgtgccctggagatggcagttggaggcagtcctacgaccttcacacgaccttcacgtgctccccgtgtgctgcggggtctgcttttagggtcgctcttggtgtttgagcagtaagtctgcacaggagccactgcccaccatgaaaggggggagttaaaggcgttccgaatccctttggccaacgacggagttgaaggtgttccgagtccccgtggccggcggcgacagagttgaaggcgtttggagtccccgtggctggcggtgatggagttgaaggcgttccgaatccccgtggccggtggtgacggagttgaaggcgttccgagtccctgtagctggcggcgatggagttgaatgcgttccgagtccccaggacgccattttggctgaatttcctttaccctcctgctccgtgaagcggggcccattggggaggtgctgctctgtaatctgctcttcttcttgaatgtgtggttagggcagccacattgatgtcccccaggctccagagtgaccgccccttaggggtcctgctgggcgttggccgctgttggccgcagggcaccgttggcctgtgcattgctgccacctacccatgatgggcagaattgtcacgagctcaggaggaaaccatggaaaaaccgcaggtcctggagcctccgtgtggttgtcgtgggcagctttccacgcgacgtgccctccctgggcgtgaggctgcatttgcacttagcggggagagggggaatgttgtgggttctagttgggctttttgatgatgatatttggaaagacttgagacaaagtagccaccctgtcctgtcccttcctcacccaccacacccactgctccccgctggcaggcactgcaggctgcacaagtaaccgtggaacctaaacactgatgtgcttcgtccgggttttaaaaaggcgcccttaccgcggtttcggtgtttggcgtcttcacgccatccgggttctcggtgctctgctctgaaggatggtggagggctgtggtctgttgttgggggtgctgggtgcagggtggtttctgtctgcctctctctacccccaactccagctttcccaccctgccctctgctctggggcacgtgtgctgttgggatgcatccctcagggttcacggcagggtgtggattgctggggggcatcgtggagaagggcatctttatgggaggcatccctgctctgggccccctgccggcctccagctgtgtctgcaccatgagtgtgtttgctggagtgcggtgtttgcactccctcacaccgctgagtgcaaacgcggcactcctgcacatgtcgcctcgcaccgtggcgggcgtgtcccgtggaaagctgcccatgctgcccacgccctccctgggggccccttggctgcctgcactccccagccgtgacctcagctcccggcgccggccctccttgtgcagctccttcccctccatggcctttgctggccccaggagactctggcctgcaggctctgaagccggctgtgtccctggtgatcctgactgagccttggtgtcaactcaggtttttttctcctcctcgttcatttttacacttcgtaggaaattattttccctttcagctttcaagtaggaatagttcagaaggggaaatagttctgcatagcgtctgtggtcttggccccgcatctcccagtcccacatttttatttttccaaaggcaaccctttcagttttttagctgtctgttttccttgcttctgtatttctgagttctgtatgtacgcagctgtttcctgatatccttagttttagatgtgttctttcaagtgagacaagactccaagctcttgtcggggtgagaaatctgcgggttcacgggctacatgtgggagacggggaggggctgctggtcactttctcacccaggccagaggatggcgcccttacccccgaggacgccggcatgtcggtgacatgccgcccgcaggagcatcaggtgcgccctggccgcaggtgccccggaggtgtcgaaccgcagatttcttcagacgttttttgcacattttgtgggaaaagtggctcaacccttgggagtcgtctgcgtccccatatcaaagaaatgtcatacaggttggcctttgtcgtgaatattcacgagaggagatgaacatcctggatgtcctcagcgtggcctgaactgagctgcttcccccggtgccaggaagatgagcgtccccttgtctccgtcttagtctcagtggctcttgcatttcatgctttagaatcaaaggaaagaaacaggaactctgtttagtgaagcagcgatgaaggaggggtttgtcagtcagggtggactgcgttttgctcttgaaacaatccccaagtttcagtgtcttaaaaccacaggtgtttttttatcctgctcacatgtggatcaccgagggcaggggccgggaggaagggggtcatctggctcacagccttgcaccagaggcgtcacgagaatcaggaaaagttctcctctcatgccgaagacgggagggaaaccagagggactggtgagccttgagtcggccacaggtgtgtggaggatcgtgacttagcaagccggggacacgctgttaatggacttcctgctgtgggggtgagggctccgtgctccatctctgatgccctgtacacacctgccacctcccctgtcccctcagcagagacatggccggtgctgtcgtgcctttcgcttttacctgtatcttaaatcacacaggagttcattcggatttacctgtacagataccctgttctctttcttgttccgtgggaattcactgggatttacccacacagccacctgctgcttctccttcttgttctgtcctgcatttctcaccttctaagaggaccattttctctttgcctggagaacactctagtgttttccatagtgtgtgtctgctggtggcaccctctcgtttgtttataccaaaatggctttttccactttttttttttgagacggagtctcattcactcttgttgctcaggctggagtcacagtggcgcgatctcggctcactgcagcctccatctcccaggttcaagtgtttctcccgcctcagcctcccgagtagctgggattacaggcatgcgccaccgtggcaggctaatttttgtatttttagtggagatggggttccaccatgtgggccaggctggtcttgaactcctgacctcaggtgatccacccacctcggcctcccaaaggtgctgtttttttttttttccccactttgattcttaaaggttatttttgctaagaatgaaactttagtttgcatttattcattcgtttgtgttttggcactttaaagataatagtctcttgtcttctggagaggttagctgccagtctacttattactgtattggagacaatcttttaagtttcgctggcttcttttgagatttttatctttatttggttttcagcacttttaccgtgatattcctagaacaagttccctttgtgtttatctgacttggggctctagggttcatacttgttccataatctgtattttctgtcgatgttttgttcactttagaaaaattcctagccatgatctctttgaacattgctcactggcctctcctctccttttgggactcttattacccacgtcttgtctggatcaccgcacttaattctttacgcctccttacactccctcctctggttttgtcttattcagtttggacttttttttttcttttcttttcttttttttttttttgagttggagtcttgctctgtcaccaggctggagtgcggtggcacaatctcagctcactgcaacctccgcctcccgggattaagcgattttcctgcttcagcctcctgagtagctgggactacaggcatgcgccaccacacccagctaatttttgtattttttgtagagatggggtttcaccacgttggccaggctggtctcgatctcttgaccttgtgatctgctcaccttggcctcccaaagtgctgggattacaggaacattttctttgatttaaatttcattgtcacaaattctttcaggtgtgccttatctgccgttaaacgcatccttgaatttttttatttttcagaacttattttttatagttttcatttttttcacatcctggaacatattaagcatggtttaaaatctttgtttaatgtcatcatctggagcctctgtggctgtttctgaaggacggtatatcatacatgaaaagcatctccaccaagctgcaggaacaagacatgacagaaatgctttgaggtctgcaatgttctcctctcccagagagacttgatgttggctcttgacgggaggcgggtgcttgctgtcggggtcacctccattgggttttgggacgtaggaggggtccgtgctgggctggcccacgttttacacctatttctaggtgtggtcctctgggttcagagcctgtggtgagggctctaccgcttctccctttggtcatcctggactcccgttctcctgctagctggagatgctcctggatgcactgttgggggtttctggttcttgtggcgccccctggagtcagccgtgagccggggagagttggcccccgccgctctgtccctctcaggtcttcgtgagctctctggtaactgcaggcacttcctgtgtgttttcattttgtctggcttttaaaaatgtcttagtggagggttggtctgcgttatctagtctgttagtttttaaaaaatattcttcatttcgaaataattatagacttacaggaagttatgagattagtaatagagcctggctgtgcttcccatgcttcctccgcggtgactccgggtatgacagtgttggagccgggactgcggtgtcgaggccctgcctctaactggactgcaggcctgtgcggtttcgtggcttcatgtgtgtgtggagtggccatgtgtgtctagtttcgtgcagattgatgccctgtgtagatttctgtaactaactccacactcaaatcagaaacctgcatccttcccacagagacagcccctgccctttgcattctcaccctgcccccctgccaccagtctgtcccttctagaatatgccatgatcgactcgtatggtcgtggcatttcgaggtgggcattttctgtgagcgtggtgccgagaccccatccagctgtccatgtgttcacagtttgtgccttcctagcccacggttgggttttaccagagtgtgttcgaccagcactcagtagagtacactggggctatttctatctgttgctgttgtgaacaaggttgccaggaatattcctgtgcgagatgtgggtacaagccttttcatgtctaccactgagtcccgtgtgccgtttcgtgagaggctgaggcaccgcttcattccaccgctgagccccgcgtgccgtttcgtgagaggctgaggcaccgctgagccgcgcgtgccgtttttaacttgattataaaatacatttaaagttcacatgcaggtgcatctccaagaaaattattttaaaaactagttaagactttcatttcccagtcctcaacacacatcagagcagtactctgttcagagctgaaaggattcgcgctgggacaaaggcgtgtcacttgagtgagtgatggtgtcacaggtgcccacgtggaagaaggtaaagtcgtatctaaaactaaatgtgagagtaactaataacttacgcataaaaactaccatcataaaaatcctcgaagaaattttaggagacgttgtaggacagtgtcagtctctgaagaaaacttcttagtttagaaattttcaaatctgcgcagaagtaaagagaagtagtttacggggggggcccagagtctcgcccggcgcttcctttctcctcccctcctctgagtttaaagaagaccctgaatgtcaggtcccagcagcccctcgctgggtttttctaacttgtggtaagaactggttttctggggttttttgtttctttttgtttcccccctcttggcatgtaatccccagctaacagattttatcataataattccacaaggtagaaacaaaaggagataattatgttgggccttatattgaagaatagaccatgtgtaggttggtagggaaaacggagattgagaataaacgtctgttctacagtcgaaaaggtaaaaagttaattagtgtacaaagactaaattgtaaaactgcctgtgacgaggtaaaggatccagtatgaaatggggcagagcagacgtgtgggcatttcatgcagaagaggagcagactcacgtggccgtggacggtgagggtgccggcctcacctcggaggcatggaagtaccaggttacttcacatcgagaggaccgttttcctctttccagtcggctgcggttggcactgaagaatcttggtgctgacagacacagagcagggtctctcgtggaacaggagttgtctggtctgttcagtttgatgagtggcagtatctgtgacgatgggaagtgtgtgtgtggtccctgtcctgtgtgcagggacgccaggtggaccgacggcctccgcatctgtagcacggtcaggcctccttgttcacggtgacaaaaaatggaaggagagtttagtccctcaggagaaatagcaaataccatgaacaagtgtgcagcaggcgtctgcgagtgggttccgttgttaggtagagacggtgggagctagagcagtgtgtggccgtgggagctgctgatgctgtccagtcgtctctgtctcgtgcgtcctggccccctcgtggctggtcagggccacgtttctggtcatggagagtgtgagtgacgagctatgtggggaagtgacaggcatgacctgtggtctggagcattgcaggtgatggctgtctgtcgcttgggtcctgagtgacaggtctaggagcagaagccgctatgcttcccgtacagcctgtcacagggacgtctgcagctccctgacaggccggcccggcttctctgaagtgcacgtgggctcacacatgggccttctgccacgtggctgggtctgcagcactttcttcaggctgctcagcggaggaggcgtcttgggcttctcatggtggttctgaaatggttctgggatgtttccagccctggcagcagggtaggttgggcgggtgaggggcaggagctggccgcacacaactcagaatgtggcaaaggcaagccgctgtggcaggcgcttttagaaaagtaacattgcgtctatcctttttttttttttttccagtgtgtgttttaatagaaaagttgtcactttccaaaatgccctttagaggtgacaccgtaattggtaagtgcttttgtttttaataatagcattttcttacagaatgacttcagattaaaaggtaaaaatgaacctgttaggatgggggcgataaacgattatagcttaaaggttcaagatattaatcggatacgttgccttgaagttgttacaagaacctgcttaaataatgggtacccaccgccctctccccccaacacaggagggcccttccccgccgtcacctcagtacccccacctcctcgcttccatgcccagggcccggcactctgggtcagttcttctcccaggcagacagtcgggagctgcagccacccaggccctcgtggaccaggagcgtgccggccgccgacaccacggaccctgtgggcagaggcggctccagttcctcagcagccccccacactgggctgccagagcacagtgaagggagcccccagggctgtggtgtcccggggctgtctcagcagcctcagaagttaggactttttttttgttaattgaatagccttcacatttgttgcttgtgcaggatctaattgagttaaagatttgggtttatattggtgggagccgggggagaccgtttgaaggaaaagatttaggggtaacaaaagaataaaagtttcccaaaatgtgatgtataaaaatttacagaatgctggtatttccctcaataagagcttacacaatttaacagccatgagaggaaggggccttagacttaacacaacgtggagaatgttcactttggcttttccacagattcctctcaaaggttaccatcgactttaagattagtattaatagaagctgtttttgctgttgtttttgatttcatggtgtttttgattgcctgggtacgctaacttgattttttgacagatggttggcaatggctgataaatgacactttgagacatctccatctcatctcaagtcactcccgccagcagatgaaggtacagtgagcatgggcgttcccggccggcgctgtggcggtgttagtgtgttagtcacggatggtgtttgtgttggcgactgtgcatcatgaggctgtccctgcagtagcctgataactgacaaatgggggcataattctatttggaatcccggatggtagcgtctacacggtttataaccagaaaatccaatacagccattggaatccgaatgtttaattttttattgcttctggctgttttaattatagttacctttgaaatactttttctgcatcaatagtaactgtgctctgttgagttccgtgtcctgtaggatctgaggtttggaaactccctttatgatgctcctgtgcagatgagaaaacagcaccccaggacctctgctcgcacacattgacctggtcatgttgtgtgggtgccagtgtgtgtgtgtgtccccggccacctgccctcccctcccgtcctgggggttacaggtggactttggactcacagagctgtaacgctgatctcattgcatagataagaaaccatgggcccggcgcagtggcgggtggatcacttgaggtcaggagttcgaggccagcctggccaacatggtgaaaccccatctctactaaaaatacaaaaattagcggggcgaggtggcgcgtgcctgtaatcccagctactcaagaggctgaggcaggagaattgcttgaacttgggaggcgaaggttgcagtgaaccgagatcacgccattgcactccagcctgggtgacaagagcaagaccctgcctcaaaaacaaaaacaaaaacaaaaacaaaaaaaaccatggttaccaacgttgactaggttttgatattgaggatgaagaatggaagtacatttaggtgtcttgtaattctctgacttcctccatgcttagcatttctttttccttagcatcttcaattttcttattttttttttcttaaggaacttgaacattctgtaggatccaagtaccgttctactaattgaatttgaatgcatcatgatcagtgcctcaaaattttatttcaaaagtccatgattaattcacactggccatgatgctggtgcactttgcccctgggattggcacaggtggtgactcgtggaatgcagcaccctgtagacgacgcacctcctctgctcatggcccccacctgccccgcccccagtgcctctccaaggctgctctgttggcctcggctcctgggcttcgggggagcggtggaaagaacacgtgggtttggtgtttgccacttgctggctgtgtggtcacgagaggctcctccgtaggtggcagaggtgggggttcgaggagacagtggcactgagccccgcacgcggcgggactggtgactctctgcccgctcctgctctgtgcagcaattgccgtccctcccaccacggttcctggtggccttgggatgggttcccgggggtctcctgctgtccggccccaactcctgttcccagtgcgcccccggagccctgtctctctaaatgaggctgacgtggcttggcctgaaggccctgccccgttactctgggtgcatagtgtatgcctttttcttcataactatttctgggaaagaaaaatatgctccattttattattgttccatattagaagacagacattgtggaaggaataatcaggttatccattcagtttcttagttgtagtggtagtaaagtgatgcgtgtatctgacagatgatggtgagcaggcgtgctggaaaggagtagcatgacttaggggttcttttggtttggttcgaaagtcattgctgtgccgagatctcagggtgacccgctgtgtccctggtcaggtccttctctgacctcaagggtgacctgctgtgtccttggccgggtgcttctccaacctcagggcgacccgctgggtccctggtcaggcaggggctgctctgacctcagggtgaccacggtgtccctggtcaggtgcttctccgacttcagagtgacctgctctgtccctggccgggggcttctccgagcagagctgctgtgcgctcaccgtgctgcctttgttttaggatgcagcagtctcggccctggctgctctatgcagtgaatattacatgaaggagccgggggaggcagatcccgcaattcagggtgagtggggagcccttttcttgaagactccaggggcttccagcaggaagctgctggggagtgtctgggcacggaggaggcctcggttgtgcagtggagcagagccaccacgatcatggctggagtgggactgttcgggtctcaggttcccagccgaggagctgtgggcaggtcctgcagctgcccaggatgttgcatcagctctgaacaggtggctcagcagggacgcgtctctgttgacggcaccctcttgctccatcacccaggctggagtggtgtggcgtgattcggctcactgcaacctctgcctcctgagttcaagcaattcttgtgcctcagcctcctgagtaggtgggactacaggtgcctgccaccatacccggctaatttttgtatttttagtagagacggggttttactgcattggccaggctggaatcgaactcctgacctcaggtgatccacctgcctcagcctcccaaagttctgggattacaggtgtgagccactgcactcggtcagtgtttttagaatttttgtatgcaccgtgacatttttctgctgtgtgtttcactcgttaatacattttgctgttttttccttctttatgaaagtagcattaggctggctttacgccgtgtcccgtgcgtagctgctgtgccgcctcactgtacatcctgcacccccgtgctgaagttcaggcttgcttctcgcacatcatgttcgagggatctgcttcatgaatcgtacttttatttttaaagtgtcacatgcacatatgttggcccacagtgttcctttatgtcatatgatagaacatgcattattaatcacgtcaaaagtgtgtgaatcaccacttaaaattattataagtatataaaaatcatgcattagcttggcatggtggcacacacctgtaatcccagctacttgggaggctgagtgtggggttgaggctgcagcgagctaagcttgcaccacggcactccagcctgggtgacagaatgagactctctcaaaaaaaaaattctctttctgattcctattttgaggtaggccactttggaaacgtgtctgctttgggaacctcaggcggctcctcctttgttcactgtggctttgctcctgtttggggcacacgtcgggtgtggctgtacacgatgggcagcagagggcctctcttcacactcgttgcttcctttcagaggagctgatcacgcagtacctggctgagcttcggaaccccgaggagatgactcgctgtggcttctcgttggccttgggcgcccttccaggcttccttctgaaaggccggctccagcaggtgaggctggccacgcgcagtggacggggcctagggcgagggtgtgggagcctcgtgtgttggggcatgaggtaggcccagccgttaataaacccatcagtgcttgtagctgggagggggttcctggaaaccggcacctgtggccaggaggaagggggcagagggcacccaaggtctgtggccccttagggccctggcgaaccctttgctgtcagaggacagacttgaaaaagctgaattctgggagggaggagaaggtgttgtttgtagaagcagctgccgagagtgaggagaacacagttgcctttgtgcgttgtggagccgggtcctgttttggttgcggccgtgcatcctgcatccaggtcggggcagaggtggttccacgtcctcccagaggtcagccccacgctggcctcagtgacctgctctctcacgctttcctgtggtgctggtcccactgaccaacctgccgggaactcctgcttgtctcccctccggccacctggcgtctgaagctggaataggccctggccactgggttccccacgcccttccctccccatgggatccagccttggcacttcaggatctgcagctccagacggactcctgcctgtgtggcgggtgggcctcgcagccgccatgccatctaaaactcgcatgtgggggtttatccagttgaaacacagataaatgtgaaacaggatcacttggagatatgacagatgaggttgtcgggacccagcagcttcctttgtcaataccccaggtctcagcgtaggacaaaagggggggacctcaggtagggtgtggccagacccccagtgacaccctggggtgggggctggccgtggagaggctggaggtgacctctccccgggtgtccttcctgggttgtactgggggccgtggagaggctggaggtgacctctccccgggtgtccttcctgggttgtactgggggccgtggagaggctggaggtgacctctccccgggtgtccttcctgggttgtactgggggccgtggagaggctggaggtgacctctccccgggtgtccttcctgggttgtaccgggggccgtggagaggctggaggtgactcctccccgggtgtccttcctgggttgtactgggggccgtggagaggctggaggtgacctctccccgggtgtccttcctgggttgtaccaggggccatggatggccgtgaggaaggtggtgccaggagctgcctatctcatggtgtggggtctgtggctccgggccaacattgccacctccctaaagagtgcactttgttatagcttatggttcttctgtgattctttattgctttccaggttctcacaggtttaagagcagttacccacacttcccccgaggacgtaagttttgctgagtccaggagagacggcttgaaggccattgcgaggtgagtcccaacagttcctccctaaagtcgtaagtctctgaaaggccagcagatgaacgctaagggggatgtttttgctcagaggcaggacttatgattcttcacttcctaggtttcctctcttccagaggatcgtcagtcccagctgctggaggctctttcattctcttgctgtcatagtcgtagtgaatgttaaacttctttagggacactgggccccttggagaattggagaatgtgtcctggcccaaggttggcaaagaggagctgaccctgccagccagtgtttggaatgatctctgcactcgttgacagacacgcacctggggccacgccatatgccctctcctccctgcaggcacacaagaggagcagtcccgcgggggccacgcacgcccccttctctcctatgccagcatccgttccctctagtcagggtgggaagtgggagggaccagccgcagggggcgtccccatccacctttcaaccggagagacggcagagcgtgacctcggggaagcacgtcccacgttccatacatgtggaaggagctctgtgtttctgatctacccgagggtcctggactgttctgagcgtgtcttctcaggatcaggaacacacatcagccctctgcgatgtggaagatgaggctcaccgatgtttgtttgttagctcacacattttaaatttcaggatttgccagactgttggtgtgaaagcaggagccccagacgaagctgtgtgcggagagaatgtttcccagatttactgtgcgctgctgggctgcatggacgactacaccacggacagcagaggggacgtgggcacctggtacgtacgtagcagtgggtgagcgcttcttctgagaagcccatctattccgtggaaactcggaggccccgggcttttctgcagggagaaatctttgtagatttgtgccgtgttttgcgttttaaaggctctggggaagatgacctgttctctgctcccgggtgagcctgcgtggcagggctttgcaggtgcttgtccagcccgtcctcaggtgttgggcctgtgtcgtcctcgttgacagggtgtgagggaggacgcgtcttcaatgaaaggctgccggctgcttacattgggttttgccaacatttcttgctgtagtgggattgataacccctgaaacgcctgtgtgtgtaggatgcctcggggccccggtgtgtgtggctgtgggtggctccctgcacacgtccctgtagcgcacagggaacctctgcaggccccgtgactccctggcagcgtgcctgggctctgtgtggggttagtcacgggtgtcgaattcacacaggctgccggcgtggtgggcagaaccagggttggaacccccctctcaagctgggtgtctctgcctctccttgtcccatcagggtccgcaaggccgccatgaccagtctgatggatctgacacttctgctggctcggagccagcctgagctgatcgaggcccatacgtgagtgtcacgtcgcagctcttctgcatcctagagggcagccccgagcttggggaggctggcggggcgggcggtcctggtgctcagtggcatttgcactgctgggcacacaccctcctcccagagagcctctctggtccctgaccccaggtttgtgcaggcccctcctcctgcccccatagccatggcgtgagctggggcccatcctcctctgcccagtgcccccaggacgaggctctgctccccagcctgggcctccaacggtgctctggccagtttgatgacagccagcttcccggggtagggccgggcaggaggtggggacttctcagcttaggaccctgaacctgggggtctgctcctgccaggaccagctgagccatcactcagttccctgcacctgaggctgccattggggcctgcccttgctgtgtgtctctgtcgggggcacggggttgtgggtacccccaggccctgccctttctgtcggtctctctgtcgggggcactgagtcatggaggtccaggccctgcccttgcggatctctgtcaggggcactcagtcagggggtccaggccctgcccttgcgggtctctgtcgggggcactgagtcatgggggtccaggccctgcccttgctgtcagtctctctgtcagggacactcggccgtggggatcccagggcctgatttccttagttctcacctctttctctttccccctccccatctcttccccagccccagcttctctctccccatccccggcctctctgtccccatcactcttctccacccgctcctgtaatcctatttgttgtccctgcttcaaccctaagacctcatcagcacgcatgtaacacgtagcacatgtgtaacaagtacgtagcatgtatttgctgcgcacctgtagggttgggctcctgggatgtgaaggtaacggagtgtggttcttccgagccagtgtcctggtgtcagctgccaactcagccaccatgtcccgaggagcccgcatgtcctcgtggtgcttgggctggagtcacggctcggaccgcctgtgctcagtttaccgcccgctcttaatttaccgcccgcccttggtttacctcctgctctcggtttgcagctgtgagcgcatcatgtgctgtgtggcccagcaggccagtgagaagattgaccgtttccgtgctcacgccgccagcgtgttcctgacgctcctgcactttgacagccctcccatcccccacgtgccccaccgaggagaactggaaaagctgtttcccaggtactgtcggggtgtaggccccccgtgctggccccgcagccatggcgagatcattggcagcccggccttgtctcactcactctcttgcaggtccgatgtggcctccgtgaactggagtgcaccttcccaggccttcccacgcatcacccagctccttgggctgcccacctaccgctaccacgtcctgctggggctagtcgtgtccctgggcggcttgacggagtcgacggtgaggaggcgtcgggctggctggggcaggaggtggctccaggagtgcctggtgcttccctgtctcttgggagcatgtatggagctgggccttttcttccattgctttctatctctctcgggcatatttggttagggggtcaggggcccagtgtcttcctcatgacccaggaggcttagggcctgtgggatggttgagtctgatgaaggtgggacagggccagcgccactctcttcctgcggccgcagccttggagctcccagcgtcccctcggggttcaatcctccaggacctgtgtctgatgcctgcatgtgggtacctgggctccatcaggttctagatcggcctccgccctccactttcagggctccaggcccagcttctcatgtctgtggggagggtctccagagccttggtctgtggctgagctgtggaacttgaaggcctctctgcatcttgtcactcgtggcccctgcaccttgggtcatgacctgctttatgtggcaaccctgtgacagctgctaagtcctagaaaacacgtaacaggacgtgaggtgccctctgcgccgtgtgggcgcgtgcggggagacccgggccccaggacgtgaggtgccctctgcgccgtgcgggcgcgtgcggggagacccgggccacatgcgagcggggccccgagacattctgcactcgggaattgcggggattatcaaatcccgcttcagtgggaaacgtgagcgaaacccaaggtgagtggccgcagcctttcgtcacgtgctctcccgcatgtcctaagtgagggctcaggctgagctgccgttgccgagagccttgtgtctgcttcgggtgtctgcactgtgagtggctccgtgctggcgtccgcaccagccgcttggggccagaccttcgcgtctctgcagctcggagcagttctgctcttcagcagatgcttgaccggctgtagccaagcctgaggggtggcaggctcgggggtcccactgccttctgaggtgtctccgtgttgcagatccggcactccacccagagcctctttgagtacatgaagggcattcagagcgacccgcaggccctgggcagcttcagcgggacccttctgcagatctttgaggacaaccttctgaatgagaggtgagtggtgtctcttggggcctcagaggcgtgagtggtgctggtgcctctcaccacgttcccacagattcccggggtctcgcagggtctgtctggggtctgaagggagaagcgagacacacgctgtaccagttggtggctcagcgaggaagatgtgcctgcagcatatggttctccgggcggccaggcctcagcccctgcgcctcctcttctagcctccacatgaggcagggaaatgaccgttgtgtgtacaatggacgtaaaggtagtatgagtacaaggtggtccctgtgtgtaggaaggcgttgtgggagctcctccagcttggtgctcccacggacgtgcttgcggacgctcatcagccacccggcaagtgagagctctgtgttcctgaggatggaatgtcaagtgagaaacatcgctgctttctagaagtttctggctttacatggaggcagagtatagaccctgtgggccttgacctcagaattgggaacatcctctggaagggttgttcccagcatgtgcgaggacgaggacacgggcctggtgtcccctcgggcggggcctcggcagcctctcccatgagagcacagatgccgctctcggcaaacaggaactcggcccagccatgttttcttttctcgttacgactataatcagctgcacataaaggggcagttcgatcgattttgataggtgtccacccttaaaatcttccccagtcaggacggtgggctccagcccaaggtttcctcccagcccttcgagtccgtgcccctgacctgcgtcaccatagcctcagcccatggtcacttgaggcgctgggccgcgtgccggtcgctcattcctccgtgccggtcgctcattccgccttgccgttcgctcattcctccttgctgaccagtcgtgtctgttggtggaggcaccacagtgcatctgtctgtgggcattttggttgttgccgcatcggggctgttgctggtagagctgcaggcagtctgtgtgtgcgagcctgtgggtaggtgtgcacagctgggcctccctctctgtgggctgcggagcccagctctcctgtgtgttagtcggcctgtgctaaagctctcctgatgctcctgtcgcccagaggggacctccccagcctccttttctgtggggtaaataccgaggcgccgcaggctggctcacacagaggcgaatgtctagctttggaaagctgctggagggtttccagaacgcccacgtgtcatgtctttctgctgatgctgtctgaggtcactctcactggcgcgttgctgttttatattctctttggagaagtgtcttcatttttttctgttctccttccctgactgttgtggtctgatcctcccttgtcacacatgtgacttgagggtgttttctccctgcctgtcctttcacgcaccgagcgggggcctcacactttcctcacgtcccagcatctccccttgttctctgaggcacagatttttctggtgtgtctaagacagcttgcctaatccgtggtcactgagattttctgttttgtcctagaagatttatagttttgggttgtgtatttagacctgggacgcgtcttgagtgaggtttcttacatggtatagcgtcggcacaggcaccttgacgcccagcggtgcccaccccaattgctgggagggctcccctctccgctgcattgccgttgcagctttgtaagaaactgtgggtttactttggactctcctgtgcccgacgtgtttgcttcactttgcaccagggccgtgctgtttctatcccttccactttaccatcattttcgaagttcagcgtcagcctccagccttgtttcttctttccacagttgttttgtcttttcctgaagctttgcgtttccacgtaaattataaagggggcttgtcgctttccactgggatcctgctgactctcagccattcagggagttgggcgtccttgttgctggtgtccagggtctcacagctccttctcccctcagggtgtccgtgccgctgctgaagacgctggaccacgtgctcacccacggctgcttcgacatcttcaccacggaggaggagtgaggctctgcttttcatgacttcctttccgattaagcctaagtagctcatgtattaaagaaaaagtcatcagacacagagatcagaattccaggaaatgatcttccagtgcgttctgggtcagttatggtgactgtaaataccgtcatcacagctggccctcaaaataacgcaataataacatatttacataatgacatattatgactgtaagtgcagtcagccccatctggggctgaggcgggggccctgctgtgcactctccccccagctatcccaccgggccaggggtgggcctcagggttgtgctgggagccgcagggcctgaaggggcctcggctgtacggggatgagactcgcaggggagagggcagaggccggtgacctggcgaggacttgcccaggagattggagctccttgcttctgcgccacgcggatgccccaggctggtctcagctgggttgttggctctgagtggtcatctcgttgctgccatattttcttgcttcattgaatttcaccgtgttgggccagtctttttttttttttttttttgagacagggtctagctctgtttcccaggctggagtgcagtggcacaatcacagctcactgcagcctctacctcagcctcccaagtatctgggactacaggcatgcgctgtagtctaatgtacggctaatgtttgtatttttagtagagacaggatttcactatgtttcccaggctggtcttgaactcctggccccaagtgcctgccttggcctcctaaagtgctaggattacaggtgtgagccactgcgtctggcctggatatatttgtatctggggcacgttgggtcatccggagacagcgtggtctgtttttgggggcactgctttttttttgtttgttttgagatggagtcttgctctgttgcccagggtgtagtgcagtggctcgatttcagctcaccgcaaccccgtcccgggttcaagcagttctctcgcagacttctgagtagctgagattacagctgtgcaccatcacacctggctgattgtttgtattgttagtagatacagggtttcaccacattggtcaggctggtctcgaactcctgacctcaagtgacctgcccacctcggcctcccaaagtgctgggattacaggcgtgagccactgagcctggcttgggcgctactcttaagctgtcaggtggacccagagctgtgctggtctccagggttttctgcccctttaaggtctctgctccctggcgcttcccttcccaccgctgctggggcagtgccggggcttctggccatcttttgggtggttcgtccccagccttggacagcgtcctcgtactcaggtactggctgacccaggcccaggttagtcctcagcggcccccaggaagccccctctggtgctcagaacctgagcgagctctgcagacttggaatttcccgcttctcaccacgggcttcccgctggagtctgccacctgctggacttggctctgccttaaccttcgggcgggaggcagatctggtctctgttgctccatctttgctggacgctgcacatgtttttaaatctaacagcattgaagggtttccccttttaatttcttaatggggcatcactgactgaccttcttacacctgctgttggaacagcctccatgttcacaggtgcacccagctcggttgtggcgtattatcctttaatacaatgctaaatactccatttaaattttttttttgagatggagttttgctgttgttgcccagactggagtgaattggtgcgatctcagctcactgcaacctctgcctcctgggttcaagtgattctcctgcctcagcctccctagtagctgggattacaggcatgtgctaccatgcccaggtaattttgtatttttagtagagatggggtttcaccatgttggtcaggctggtctcgaactcccgacctgaggtgatctgcccacttctgcctcccaaagtgctgggattataggcgtgagccaccgtacctggcctaaaatattgacatatatttttctggcttaaaaatttcaaaataagcctgggcgccatggctcacgcctgtaatcccagcactttgggaggccaaggcgagtggatcacttgagctccggagtttgagaccagcctggccaacttggtgaaaccccatctctacaaaaaatacaaaaacattagccgggtgtggtggtgcctgtacggcttgggcctgggaggcgaaggttgccgtgagctgagattgagccactgtgctccagcctgggcaacacagccagactctgtttcaaaaaaaaaattttttttccaagataggatggtagagaaaatacctcctgccatgtcctgctatgaatacagctttgtatttctctctacagttttgtcagttttggcttttcagattttgaagcgtgtttgtgggctgaatcttgcccttatcacccatttctaggatgctttttgctccactcattctttgtcttgcttcacttgactttgaactgtatacttttttccatcgttttactttcagtatcttcatacatgtatgtttttgtacgcctctcttagaacagtgtatggttttgtaaaaattcagcctgtagcttttacctgcctccttcatgacctttataatccccttggttctcagcctgccactcacaggacttttccctgtgctgcgttcccagtgccccctccccgcccccacctgtgctttttgttggattagtagaattgcttttgtcattccattgttttcatatatttgtttgggacattttacttttttctgttaacgcttaccctagaaattagaaatgacaccacgtattcttagcgaagtccagttttcagcattttgtccttattggacaatagcaaggatattagaacgtgttggttccgcgtgcttccgtcttgagttatgtgctgctattgtcggatattttgtcttagatgtacgtactttcctgttcattgtggtatgtgtaatttgcgttactttgaattttccacgtttttactttctttgtctctcatcacttactgcttttgggaccccccccatcggggttcacattccctctccctagagcacactcccttggatttcctcgagtggggtctgctgcggtgaagctttcccattttatgtgcagattattttcagagggtatatagaattcaggcagctgtttcgttgtagcacattaaaaatattttcccacttcctccttgcttctgttgttgcttttgagtgttacctctgagtctgcctgtgctccctggaaacggcccgggtttcccaccccctgcccaggtttgctccttccctggtttttctgtcattatcacgctcacgtgtttccctcggtcaccccctctgcaattttcacacgtcttttccctctctctttgcttcattacctttggcccgcctgccagctgctgattctctctgaagatgtctctaaatgacttttaactgtgatttgtggaattcttattgtggagttttgcgtcttttcaggtgtaggttttttgtctcgcgtgtttccacgtctgcttgtagcgctttccgcttcgccgttccctgcggcccttccttccgtgcccggtgttcatcctcttgaatgctcttttcctgcctgtttggctgggtgtgtctgagttgcaacctgagcgggtttctttgtcttcttacttgtctggtattgtgttctctcgggacgttgcgtttgaggggtcgcacctcagagcaagccgaggtctgggctaagcctgtgctttggcaggcaggaccttagtttgccttttctgggcacctgaggagagggtagcagcagcctggggtctccttgactcacggtcagcagtgagggtttcctggcctgttgggtggctggagcttggctgcattccccactgagagagggaggtgcgcaccttctcctccctggagtggccttccaggtgccctctcagagctgctcatcagggctgtgcctttgtcagcaccaagcctcagcccttgtccctgctgccactgaaggctcaaaacaacactgcacagccttgtgtgtcctctgtgtgtcggcagtttcccccggctctgcagcagcccaggccaggtagcctctggagggagtggtggaggagcacgggcatcctggccgccgctgtgttggggacagaccctggggcctggaaagggaggtggggccccgtgggggctgctgcaccacaggcaagagagcaagagacagcagaggccggccaggtggtggcacagccgctagggaccaggccggcctgtggaggtattgggatggggaccagcggacttgctggcagaggggcctcagggctgcaggcttcttggactgagccactgggaggacggagttgaccttctttgagacagaaaaagtgtgcatcccggggctgcctgtgaaagctcatctctaaagtgtgtgttgttcttccagccacccctttgctgtgaagttgcttgcgctctgtaagaaagaaatcaagaattcaaaagatatccagaagctcctgtcaggcatcgcagtgtgagtttcaagtgctgctggccttagacggaatggcagggcgcagcctcccttggctgagggcaggagtccacggctccaggcgggagaggagcagttagtgttactcctcaagctaacctaagatcgtgcattccaatgttcaaagcagtcgcaatgggaggtgaggcagcccaggtgctggtggagggagttcccgcgggaacaggcgagctctgcctctgctgccctcgcgctctgccctggcgggaggggaggctccggaaaggagctgcgtggtcaggggctgcctccccgattctcctgtgtgccctgggggtcgctgttgagtgccttgctctgcggcgctcaggtggacactgggcaggtgcgccagccagcgataggcaccttggctgctctgtggctccttgaggtgggggtcctcatggcagggcgagcggccctgcaggagatcctctgtgaggcgtcctcacttcccacagtgactttccaagtgcgacactcgtgtgtgtaggcacagtgcagatgtacgcacacacacacctccggcttggggccccaggcccgcactgtgctcacggatctgctctgcccaggtctctgcatgggcctttgggtccggggtttgctggggttggcctgcgcggggtggggctcacctggagccatgtgctgctcccggcaggttctgcgagatggtgcagttccccggcgacgtgaggaggcaggccctcctgcagctgtgtctgctcctctgccaccgtttcccgctggtgagtgcctgcccctgctcacgtgtgtttgccgtgtggacacaagcccctcagtgacaagaaggccttcgctggcactgttgtgttggtgtgctttccagccgagcccctctcgttaacgcgcctgggtgacgacgcgtcacaggcacgcggctgccaaggggctctggacgccactgttctggctttaaggacgggctgtccggctggcgtttctatggacatacattgaggggtgacctggcggtgggatctggctcaggagcttccagaaggacccaggctgaagtggttcagccacacctaggggcagtgcccttcatccccagcactccccggctattagatttctaggatttcttttctcctggctgcaaaaaaaacctcagatgatacaaaggtgacattttcctaaaaggcaaaagtaacttcatgttgtatggtggttctcgaagtggggtgccggaccctcaggcttggcacctctggggcttcagcagtgcagctcttgggccctgtgctgccgactcagcacctccagggtgggcccggggctcagaccaccagcgcagtgagacatgatgaccagggcaccactcaaaaagagagcaggcgagattgcttccctgatgaaaagagagcaggcgagattgcttccctgatgaaaagagagcaggcgagattgcttccctggtgaaaagagagcaggtgagattgcttctctggtgagggagcaggttggttaatagatagcgggcgagattgcttctctggtgaggtagcaggttggttaatagagagcaggtgagagtgcttctctgatgaaaagagagcaggcgagattgcttctctggtgagggagcaggttggttaatagcaggcgagattgcttctctggtgagggagcaggttagttaatagagagcaggcgagattgcttctctggtgagggagcaggttggttaataaagcatttaaacaagaatgatgtcatcttcactgctgggatcctgcagctagctgtgtgtctgtggagggaggaggtggttaatgggcctggaaggcacctcctcttggttgcagccctgctgtggctgggatgggatgcagggtcagcgtcctcctcctgacgccttccactgacggggctccctggcctgggtcctgtcgtctctccggggtggggcggtggcgcttccctccggcaaatgcactgcatccctgtcccagatccggaagaccacggccagccaggtgtacgagacattgctcacctacagtgacgtcgtgggcgcggatgtgctggacgaggtggtgactgtgctcagtgacactgcgtggtgagtgaaggcccttcctgcacggccacctgggcctggcaccgcccctcttcctgtccccaccgtgtctactcgtctctcccaaaaccctctgataggaggaggaaagagggttcccaggtctccacatcctctgcttaggttttacaaggcagccgtgctgctgtagccgaaacctcttctcaaccgccctgtccccaaacagtgtcaggtgtcaggaacacagcaaagccatccatcccaccaggggagcgggcacctgtaccacaaggctgtgtctggtggcctgtggagcagagggcactgaaggcctggcaggtgctgctgccccagacctctctaaagttctcttggaataggccgtgtgagcacctgttggaaatcaagaggcacaggcggaaataagaaaagctctccccacgcctctgctctgatgtccacccccttcctcagggccatgaggccctcaggaggccatagtgccactctccacgtttactttggcaggcacagtttctgcaacatgggctggcttctttaccatgggtggagtagaatggcggttttgaaagatgtgtgtattgagttgggggtgggagggtctgaatgagagcagagtggggaaagtgcaggctcaggtgtcctgggccaaccggtatgttcctgggaacagcagtgatggtgtcttacacatatgggcatgggcacccatgctggctcacacacatgctcacttgcacgcgcgcacacacacacacacacacacacacttctaaaaggggagcagtctcgtcaccccgtgttggagatcaggactgaagcaaccagaggctgtgtgggtgtccacatggcatacccggggtggtggagtcccaggtgtcctgcctgtggatgctgctctgttttgagtgccgactgtgagggcctccgtgctgatcccggtgcgttgctacaggtctgtggggtccacgccccttgttgaatccagcaaggacgtaggtgacgttccctaggtgtctcctcggaacagtgaccttccaacagggctgggttcccatagagctcacgcaccaggcagccgctgtggcctcggaggacagaggtggcctctccagggcttccgcgaggttttctggtttggggaggagtgtgtgtctgctcctaaacaaacacgtggtcccaggagaggaaccgggagcagctgggctgtcttctcaacatgcgttgagagaatggccatcttaactactgctctggagacccgtttttacaatgatttttttaaaaaaaaacaccaaggtgcattctggaccagattctaaaataattggctttaggactgaagaagccaggtgtcccgagcggggcgaggcctcctccagcgaggctgggtcggggtggcctcctttcctcacatcagggagggaggaactagcagggtgggcctgggggcttctcctatcgtttaatcccctttctgttaaaaaaaaaaatccttagaatttaaagagaatattttaaattagaaacgaaaaacatgccccagatatctccacagcattgctagaatttttatttcgcatcaacagctaaattaaaacctggaaaacccttgtcagcccctccttggcctcgcttggtctgtcctcccgcagtccctgcgctgggcgtggtccttcccgaggggcaccccttgttgggaaggaaccgtcctcctgcgattccggaaagggctcaggctcgaggctctgctggagaacgtgctcctgtgacgtcttttctgccctcagcctggctatggatgtcgggggtgaggtctcctttccctgactgcggccatggaagcttgacgcgggacctccgcacacctgaggttctccggtgggcactcgagagactcacggctctccctctcctcacagggacgcggagcttgcagtggtgagagagcagcgcaaccgtctgtgtgaccttctgggcgtacccaggccccagctggtgccccaggtaaccctgtcaccttcacagcatgaggtgcctgtgcttccctgagctctggaatgttctggggccagcggctgtgcttagcttctgccagcacgtccacacggcccgttccctcgtctcatgtcaggacccctgggattacgggaccagcagagctgccttctctggccactgcccacacctgtgggcccctgtggcatccaggccacttgctctggggcgtttggggggccggggagtgggtggagctggcaccagcttgatccaggctcctcatgcctggccctggggtctgtttgtgctccaagtgccaagagtgccaccctacccctcctcatctgcttcccatgagtggggccggggctgggtgagaggcccccagaagctgcccctgtgcacctcaccagcccgtcactcttctaaagtaacaaaaacaagtacctcagttctctcgggggctggggcccagggttgctgtgctgtctctctagttaccagggttggctccttcctctcagcctccttccggcaggaggttatatctgagagggaggaggagaaccatgtctagatacatgggggcagtggggatgggctgagcatcaggacacagcctcccccatttctgtgtgtgtaaaggctgaactcaacagcagactttggaattaaatgtgctttttacatttttattaggaaaaatttcaaacgtgtgaatgcaggttaagagcagtgcagtgaacctcccttcccgctccccagatggggtgcccttccgaggacacgttagtcatgagcacctgtcagccacatagctcaggctgccgggtgtgtgggaaacggcacaaatggtttcctgcaggaaccgtgtcagtccccacacagggcccagaggggtgagggtcccctggctgggaatggtgtgtgttggagctgaccagcctgagcttgtcttgtctcttcttcagcctggtgcctgctgaagccagtcctggagcccatacctcacccctgcctggtgaggatgtcttgttcctgagggaggccggtgtggaaagcctcgcacagtggtgcctccagctgttgaagggtagcgctggcccttggaggctggcactagctgacagcttttcctctctgcacctgcgctctggtgacttggggtggacgcctctgccttcacttgaacacaaatgtgcttcctataaaatcatgtaccaagaagttcctgccttttgtctctgagcctgatgtgtgtaggggtgatggaaaggctcactgcccaggggtcagccagaggggaggtgggctgcactcctcctgcctggagaccaggcccccttcttgcctggtgctgtccctgctgtgggagacgtctggccacaggcagtgccccacccagtcttggagagagatgaatgttaaatcagaggttcaaatgctagagaactgagaagccctggtggcaggcatggtctggagtgctgggcagatgctgtttctgggcccgtctgcctggtgggggtgctgtcctcccccctgtgcacacgtgagcatcgtgcatgtggcccctctgcagtgcaggagtcactgattgatgggtgtgccgaccagcagcttcacaaatgtctgctgcaaggggaatcgtcagagtccaatgtgtgcctctacagtaatgtcggaaataaataccattcttgaaataattacactgtcttaggagagcctgggcagagtccacacttgggtttttaggcaaagggcaggaggctacctttgtctctgtgtctgagctcgtgctgatccatcccaaagctggtgaggggaacgtgtataaaaatttcactgtggtagcaacccacacccatctctgggacctgtgctgtgctcatagggcttgaggtgcagaaccacggccagcagcaccaaagcagccccaggtgtggccactcagaggcccaagggcttgggtgagcaaccctttccctatgtgaggagcccaggggtgccatgtgcgtggtgtagattagggtggctccctggcctgctctcaggtggggatggggcctggacacaggaacatgggcaggccgagaactgggaggtgccaccgcatctgtgaggcttgtgaggtcaccaggaccacaagaccaggactgtgacagtccgtgctgtgtgtttagcagacagctcttcacgggatgtgtgtgacgacctggccacacaggagtgtggggttaacacactactgttgttgtgtttgacctggtggccaatggtctttataccctaaaagagccttgggttacatttttacgagatttaaatattttattccaacctgtgtaataggggtctcctcctccttgaactgtcccgattggctggggtcacgtggtgagggtcctgggtgaccaggcctagccttggccacatgagtccacacagtggaaaaggcttggctcctgtggtcggcacacacgagactctggttgcgcctgctgggtgtggaacaggcgcaccatcgccatgcctgcagctcacaaagctcctgctggcctgggatgcactgaggatggaaggaacaagtggcttctgagaaaaacatgatgaactgttcttagtgcaattaaaagaagattccagataaatggcattttaagacatggaggcaggtcgattacccacccagacccatcagtgacactatgtggcaaagcagttcttcttttaatgtcggtctaacttagcaacccgaggaaagtggatcactccactggccactgcctctttcccactggatcccatccatcactggggcacttgtgctcaccagacacctggtggcctggaaagccctctttcagcagccgtttctggagcccaccagggtccaggtgatagagtttggcaaggaaccccttgctcacatgatagctggggcagacaatagcaaatgaacaagcaagcaccatcaaggcaggcaacactgagtgctatgaacaaagataaagtgggcaatggaatggcatgttgggtgttgactccgagaaggtgttcagaaaacctctctgaaggggcagcatttgggcagaggtccagactgtgtccaatggcagaaaagagaatgcttgtggtcccagaagtggagcaagctttgtgagtttagagagcagcaagaagccagtatccctgggaccggggag

SEQ ID NO: 603 - DNA, 11953 bp, Homo sapiens
  source 1..11953: mol_type = genomic DNA
cgggagctgccccggcccgggtaggacagacgcgctcgctcgaagccagaggctcccccggctgaggtgcccaggccgctcctccagcccgggaagagcgtgtgcccctggggtctgcgccagacgcagctcaccccttgctccttcagtctcccgggcggagcccgccctcgggccggccagctctcggggccgagcggagctctgggcggcgctcctcctgctcattcccgcgcggctcggcgtccgggaggaaagccgcgggagggcaggtcagcgagcgccgggccgcgggaggcagctttgggcagataaaaagcctctgccgctcttggccctctggctcaggccgagggctgggctcctctgtagagccggtgctgggagacttcctccctacacctcggggtctcttcgggcctcgtgctatttatttgtgccaacatctttttaaattggtttttttctattcctctttagattctttttccttttaaaaattattggcatggatgctttttctcccctccagattatataaacattaaacacacacacgtacacacacacacacgttttcagtagcgattactgtgttgacaccacttccactctgtctccccagatcagcgcttctgacgagcccatttgcacggggactcggccctctcttttcctggcgaggcttttgaacctgtcgccaagccagtacctcagagagaaggaaatgcagagggacgagaaggatgcatggcgcctgcccccagttagatgttcttcagataatctgcaaccaagtgcgctgataaaatatttaataaagagccggtaaacatcactgcaaatacattaaggcatttcagcccgacagcttatgattatttcaaaacttaaaaaggagatcatagattgtcactgtttctgtactcaaccaagaaaccgaaccttcctgaggtgggtggattggtgggtgagttgctgcttttcgccccctctcctccccccttctgcttgtcgctgtggctctcagcagcagggatttatttatttatgtttgcagtttaaaaggtgggggtgggggcgccgaggacatgtaggatctgctcacaaagcaccagctcaggtgttgtgtgcttttgtattagctggaaaagacagactctggaacttttacagggcgagaagaggccaccggctcgcgctttgtatactttgcacttgaaatcgttacattcaactgaatatttggctcattcagatccgaaaagtctcctagcatcgtcgaattccctcctccgcccctccgctctaaaggggggaagggggggaaggtaggaaatgtttagtaaattccacatctttgaatcttcctaaagcagtggtcacagagcttaaaggtgacacaacagtgctcacgtaaaccaacacacattccccaccccccaagccaacaataaaatcatccccttcaatttgccatgatcgtcgctaccaggagccaggtgattatcctaattaatgtctatctaattaaattactgtcagcagctaaccaatggcaggagccgtttcatcggctgcacaagcagcaagatcaaaagtgagccttttctgattgctgcatagtgtcaattggccaatctcttctcccagggaaaaaaaaaagtaaatcaaacctttgagaagcatttgctggttgaagtgctttctgtctagtgagggggtctgtggatttctagtttatgataaataggactttaaaaaccagggacgggagggcgagtgttcaggttctagagctatgcagctggagcactgcctttctccttctatcatgctctccaagaaatttctcaatgtgagcagcagctacccacattcaggcggatccgagcttgtcttgcacgatcatcccattatctcgaccactgacaacctggagagaagttcacctttgaaaaaaattaccagggggatgacgaatcagtcagatacagacaattttcctgactccaaggactcaccaggggacgtccagagaagtaaactctctcctgtcttggacggggtctctgagcttcgtcacagtttcgatggctctgctgcagatcgctacctcctctctcagtccagccagccacagtctgcggccactgctcccagtgccatgttcccgtaccccggccagcacggaccggcgcaccccgccttctccatcggcagccctagccgctacatggcccaccacccggtcatcaccaacggagcctacaacagcctcctgtccaactcctcgccgcagggataccccacggccggctacccctacccacagcagtacggccactcctaccaaggagctccgttctaccagttctcctccacccagccggggctggtgcccggcaaagcacaggtgtacctgtgcaacaggcccctttggctgaaatttcaccggcaccaaacggagatgatcatcaccaaacagggaaggtaatactacatttttggctgccgctgctctaggcgcagccggggacaagtgcacctaggctgtgactgccgcggcagcgacgatttggggtcgggagcggagtggaaggcgccctagagttggctagttttggaaagggggaaagtggaagggataaccgccagggtgatgttggtgggggggaccccgttctaggaacatagtgggagagccagtcagtggccagaggaaggcaagaaaaaggaagagccctggccagcggctgggcgatgggagggacgcatcaacactggcatgcacggacaggtggagacgcaggtcgccaacctcgctctccacctgggcagtgataactgccaccttcccactccagctcacccgccgctctccctgatttgggttgcacttcttttcttctcccaccaccctttttctaatccagcaaatattcgcctatttgctgcaagtacaagttttgctttgctaactggcgccccgcttcttgcatttaatctttaacatttatgtttcttttttccttgttttctccccccaccccttaatttaaataggcgcatgtttccttttttaagttttaacatttctggtctcgatcccacggctcattacaatatttttgtggatgtgattttggcggatcccaatcactggaggtttcaaggaggcaaatgggttccttgcggcaaagcggacaccaatgtgcaaggcaagtccttccaattaacacattttcttgacacttatttaggtgagaatgattaattaaagcctttgtggactggctcgagcgacttttaaaacgatcggccaatgacttctaaaaggaaacgagggggacagggggacagactgagctgcgagaagggggaggattatgcaaaagctattttaatcacccccagttaataggaagaaagaatggcctaaaaaagccccagttaatgggcttcatggtggagtaaggtgtgtgtatgtgtgtgtgtgtgtgtgtgtgtgtgtgtgtgtgtcctacgtggtgaggagctgggactgggcagtgccaggggcatatgtaaacaatgtatttctttctctaggaaatcgggtctatatgcatccggattcccccaacactggggctcactggatgcgccaagaaatctcttttggaaaattaaaacttacgaacaacaaaggagcttcaaataacaatgggcaggtcagtggctcaagcgctcgtgttttctctctctctcaccccttcctccctgacatccagttcgtcagtgtaaagcagcatatggaactggatacacgtttctttgcttcattaaaaagacttaaaaattgtatttccaccctccaaatttatattaaatctgtaaagttgttctcattggcaacacctccgtcggcccaattttggagtgcccgaccttcccaagtactaatactgattgattttgagaagaaaccccacaagatctgcaggttgtggaaatctttgttcctccttacaggaggactaggagaagggccctgaggatcgggcggtcggcttcccccttttttccggtgccccggcttatcttcgctcccagaggtgcgaaagccggtctgccccagccagccagccgccagccaggcgagtcccgcggtcagttagcctggaaggcgggctgcaggctgcctccgccggcccgggcgcgcagccgggcgcacacagccacgcgcacagcgaccgcgttaacacgccacccggcgctcccctttcttcccgccggacagatggtggttttacagtccttgcacaagtaccagccccgcctgcatgtggtggaagtgaacgaggacggcacggaggacactagccagcccggccgcgtgcagacgttcactttccctgagactcagttcatcgccgtcaccgcctaccagaacacggatgtaaggagacctaggggctgggggcgaggcgggcggcacagacatctctcccaccctctcacattctcccgccatgcaaggctagggtactagcagcgctaacatcagcaacagctggctccgctgtgcgttttaaggcttagggctcggggcctgcccacggcacctttcctaaataccaagccggtgggaaaaagctttctatttgttttcgtcgctggtcacccgggccacctttgaggtggccaggatttctaaagactcttcttttgggagttttaatttgggctttgaactagaacagattaaaatctactttaaaaaaaaattctctctttcctttagaaaacaagcagatttccccgtgcattttattcttggcaagctttggcatctaaaaaaaaatttctctctctctctctttttttcatctcagaactgatggctgaaatgaacaaacatcactgttctgggagatcaaaagaacatacacattcatatatgtgaaaactacaataaatcaaattactgagggctatggattgagctttctagcacttgaaccacttctgatttttcaagtttgcaaaaacagattttagtggctgatttgactactaggagtgataggggtttttgtgtttgtttcttttttttacttaaatgataatatcagaaattaaaacatgcttttaaatccaacctgattttaagatgcaacttgtggtttctcaggttgtgagtcagaagcgacaaacgttttaaaatataaaatacttaaaatagtcaacatttagtgatgaattcaagttctccttaaagatttttgtctgaacaagtgcattgtgtgtaacaagcatttttaaaatgtgagtttgaacaaatttagaaaacacaggagagctaattgaaagcagttctttggctataggtatcattaatttaaacatgttcctcataactttcatgatactttctctttttttcctttccactcaatccctcaaatttttcagttaggaaaaccttgctatttaataaattgtaggccttaagcccctgtaaaagtggcagatgatatattctcaaacacccagtcttcacgtataaaaggtgagataacattcattttttttctttgccagattacacaactgaaaatagatcacaacccttttgcaaaaggatttcgggataattatgacacgtaagtaactttgtatcttccttttcaaatagctgtggaattgggctttaggtcaaaggtgtattattatgtacaaggattttgaaagctggaatgtgtgaagacaaggttgttttagaggacttcttcttcttcgtctttcttctttcttcttcctcttctttttttttttttttttttttttggttggctccccttctctctggtgaccttgtggcttggtacttgcgtggtttttggtcagaggtttcctccacctaattttaactttcctgtggattacaaagttgttggtgggcctctggggctggctggctggctggggaggctgccctggttctcgggtgcgagtactgtatgtggcgctgcagatgctcagctcagattgtctatgtctgtctgaaacgggcaattctgcctaaaagtgcatgtggctcctctggcagttgttaacagtctccttagcatatgcgacctttatttacccatttccaagttttgtataatagcatttcctgtgcaagttggctacggactgaatacaaatgtgcacccaccacaggcgagttcatgagcagaaccgctgttatggtcattttaggctttcggaaagattcagacggtgttgctgtgtattatttataagcttcaaaagaaaaatatttcctctttgttttgtatctaggtgtgttttaattaaacatgctggtgcccttttctttaggcctcccttacctccctcctttctatcaaaaggctgttctctggggccaacagtaggtgtaaactgaatgctttctgggcttgttctgcaattctcactcagggtccatagtgcctaagagttcagatagtgtcataaatctaaatctggattgtggggttcccccacgttttctgaccataaaaggaaagggtacatacatcttaatttcgtggcttacattgagcgcctgagacagagctaaaaagttgaagctgcctttgactagcatagattaaatgtgtggagaaagagacaagtgactgcctctattccatctccaagcagataccaaccatccctcctgatattttctaataatttaaaagagagtcattgatattactgcctataaccaccatatatattcttcaaaagtactccaaaggaaccaagtctcatcaatatgattccccagaataaaaacttggctactctattcctcacaatctaaaaaggtgtgcccagcacagtggaaagtatatggctcaagagactagagatgttagaggagagtcctgtagattttgagattttaattctgttgtgaacatctgttcaaaagcattttattttgcacaaatcaattcagtaatcccaagtgggtgggacctggataggcatctaaactgtatcttttgcggactgcttttttctttttaaaatattgtggtgataaacagagaagatatttgcaccttgctagttatgttcccttcctgcctccctctacttctcttatttgaaactggaattcaatttcagaagggaaattttgtgcactaaacagaacggacctgagcagccacagcaaaactctcacatgcccctcctcctctggctgccttctgttggaaaagccactcctctttgatcttaaatcactttaaatctttcataaaagcttctttatctatacacacacacacacacacacacacacacaaacctgagatttttaggggacagagaagagttgagtggttcatgacactcttcctttccccttttacgttggttacttggacatggctcaattttggagaaagagggagaagtataagggttcatggggtactaggagcttgcttggccactcaccagggaatctcctccccaaaggattaaggtctgacaagactgaggctctccttcaaaacagtctgttgactaaagattaaaacatttatgtgtgagctaaataaaaagggaggcatgtgtgcatgtgtatgagaaaacacttctaccaatcttcatccaacccttggtttcctctcaattctaatgggattttctaggcccagggcctaaagttaatctttgattattttatctaaggtaattcccaacaacacaatcactgtcgctggttgggcaagttatttaacttccttttgcctcaatttcctcatcggtaaagtgggataataaaagttacctagctcacagtgcctggcatatagtcgagctccgtaaaggttagctattattagtggtccattgcatggagtaggctgataagtacactgtaggtttgccccgaagtttctgcgggtaacggaccaaaagctaggaaaagaaggtcagagtaaagaacaccttttctcttaagagaatatttctgattgatgactactgtttcagagtagtaattcttgtttgtattagtagaggtgggagtgaaagtttcacacaggggaaacaatagacactaagtactttggaggcttccagcagcaaacctcgggttccagaacacgggtgaaggccagtctttcatgattactgcgtgcgcggctttttcctaggggtttctgaaacaatctagaaaaaggagagatatcacctgaacaatcaaatggacacaggaggtcttaaaagggtggaggagtgagtaccttgcttagaaatttcactcataaactgaccgcagaggaaaggcccactgggcaaagagcatcttactccctaggtaaatctgccttaatgtgcacacatatgttggagaagtgggatgaaagtccttgcttgtgcccctctctcagtaccccagtacacttgacgagagagagcaagagaagagggaagtcgttcccttgatggtctgtatcttgctcaggtccctgcatagacagattggctcctctataattccgtgatttattttgggaatgatagaggtctgtggcctcttgtattctccaggaaatcctggactgcaagtttgtagatggagggtgtgggggtgggcgaaaagtggaggtggccttcccttctgcccccacccccaccccaagggacctccgcgccacccctcggctctctctctctctctccctaccccgcaggatctacaccggctgtgacatggaccgcctgaccccctcgcccaacgactcgccgcgctcgcagatcgtgcccggggcccgctacgccatggccggctctttcctgcaggaccagttcgtgagcaactacgccaaggcccgcttccacccgggcgcgggcgcgggccccgggccgggtacggaccgcagcgtgccgcacaccaacgggctgctgtcgccgcagcaggccgaggacccgggcgcgccctcgccgcaacgctggtttgtgacgccggccaacaaccggctggacttcgcggcctcggcctatgacacggccacggacttcgcgggcaacgcggccacgctgctctcttacgcggcggcgggcgtgaaggcgctgccgctgcaggctgcaggctgcactggccgcccgctcggctactacgccgacccgtcgggctggggcgcccgcagtcccccgcagtactgcggcaccaagtcgggctcggtgctgccctgctggcccaacagcgccgcggccgccgcgcgcatggccggcgccaatccctacctgggcgaggaggccgagggcctggccgccgagcgctcgccgctgccgcccggcgccgccgaggacgccaagcccaaggacctgtccgattccagctggatcgagacgccctcctcgatcaagtccatcgactccagcgactcggggatttacgagcaggccaagcggaggcggatctcgccggccgacacgcccgtgtccgagagttcgtccccgctcaagagcgaggtgctggcccagcgggactgcgagaagaactgcgccaaggacattagcggctactatggcttctactcgcacagctaggccgcccctgcccgcccggccccgccgcggcccggacccccagccagcccctcacagctcttccccagctccgcctccccacactcctccttgcgcacccactcattttatttgaccctcgatggccgtctgcagcgaataagtgcaggtctccgagcgtgattttaaccttttttgcacagcagtctctgcaattagctcaccgaccttcaactttgctgtaaaccttttggttttcctacttactcttcttctgtggagttatcctcctacaattcccctccccctcgtctttctcttacctcctacttctctttcttgtaatgaaactcttcacctttaggagacctgggcagtcctgtcaggcagcagcgattccgacccgccaagtctcggcctccacattaaccataggatgttgactctagaacctggacccacccagcgcgtcctttcttatccccgagtggatggatggatggatggatggtagggatgttaataattttagtggaacaaagcctgtgaaatgattgtacatagtgttaatttattgtaacgaatggctagtttttattctcgtcaaggcacaaaaccagttcatgcttaacctttttttcctttcctttctttgcttttctttctctcctctcatactttctcttctctctcttttaattttcttgtgagataatattctaagaggctctagaaacatgaaatactcagtagtgatgggtttcccacttctcctcaatccgttgcatgaaataattactatgtgccctaatgcacacaaatagctaaggagaatccacccaaacacctttaaaggataggtgtctgttcataggcaagtcgattaagtggcatgatgcctgcaaagcaaagtcaactggagttgtatgttccccccaccttctaaatagaatagctcgacatcagcaatattattttgccttatttgtttttccccaaagtgccaaatccattactggtctgtgcaggtgccaaatatgctgacaaactgtttctgaatatctttcagtaccccttcacctttatatgctgtaaatctttgtaatgaatactctattaatgatatagatgactgaattgttggtaactatagtgtagtctagtgaagatgaattgtgtgagttgtatattttactgcattttagttttgaaaatgacttccccaccacctagaaacagctgaaatttgacttccttgggagaacactagcattaatgcaagtaagactgattttcccctaagtcttgttatatttgataaggagcattaatccccctggaaatagattagtaggatttctaatgttgtgtagcaaacctatacttttttgtatttaaaaattaatgtgaaatatgcatcatacacaatattcaatctagattccagtccatggggggatttttcctaataggaattcagggtctaaacgtgtgtatattttggctcttctgtaaatctaatgttgtgatttttatatttgtttcgttttgtctgtgaactgaataatttatacaagaacacactccattgagaaacgttttgttttttgctcgtttgtatcgtctgtgtataacaagtaaaataaacctggtaaaaacgctaactatggtgtttgaaagcagtttacagtttgaaaataatttaattattataggtgatgatatttaagggttaaggaagactagcccgtccccactccaatatgggcagcctgtttaatggaagccacctcccattccccccttaaatttgttttatagtacttccaggagctacttttttcttcttatttataattatttagctacctatgagccaagtctcacttttctgcgctcattttcttttttcaggaaaacatatgcacttttctcatcatatttatctgattctctctgaagttggaaataatgcgaacaggaaaaggaggttctttaaataaggagttaagaatttctttaaatttcacagagtaaggcgggaggcgttggccaaaagtagggtgtaatttaaatgcatgtcaaaataggatgttgaccgcagatttagtaaattctggttgtacatacgaggccttggaggtgagtggcgaatctgtaaacgcagacacagaacagcctacatttcttgagtggatggtttccgaagactgggcaggggtagggtggcgaaagacacgtagaacaaactcgcgaaagggtcgttttttaaccactgagcttaaaactgcttctgggaggcatctgggctgggggtaggggcactgctctatcccttctgtagtggaatcttatg
